United States Patent Application Publication US 2025/0146087 A1 - sequence listing, part 4

SEQ ID NO: 99 - DNA, 417071 bp, Prevotella timonensis
  source 1..417071: mol_type = genomic DNA
taagagacaggtctgtggattaagtggcgtgatacattcttttgacctaacaaaggctaatgtccacgatattcgttatttacaagacgtaaaatatgaatatcatgactgttgcatttttggagatagaggctacatcagtgcaacggcgcaactggacttatttgaaaccgcaaatatcagattggaagttccttatcggcacaatcaaaagaattggaaacctacttttattccttttgcgaaggcgagaaaaaggattgaaacagacttctcgcagatgtgcgaccaatttatgatttgccgcaactatgcaaaggaaacagtaggattgtttacaagaattatcggtaaaatcagtgcctttacggcaatgcaatatttaaatcacattaataatagacccattggaagagtcaagtatgcactggcttaattccgccaacgggttattcacaaaaacgggcgcaatagctttctcaatccatacatttccacctttcttattcttcgttcggcgccatccacagtcaatagctgtattgttatagatgacaagcttcgatgcaaagttcttttccacacccgaccctgaaagcttaaacgcattggtacaggcattgtatatcaggttgtaggcaatgtcgagtatgcatcccgatttcacattgatagcttcaccgccatcactctcgttaccactatcggcaaacacggacccataaataattccattaccacctgtgaaataagtttggtcattgtaattgtcatggaagaaacagttaacgacagcaaagcgacctttggtattgcagaaatggaaggcaggtaccccaccatcaatggtggtcttgaacaatttgttttgaaaagaaagggaactttccgttggagtagcaccagcatgggctatctctgtatgacttaacactacctcttcacaatcgtatccacaaatgataccaccccagtcgttgggcttgcccgtatctgaactgatgactacaggcttccctttcgtacccatagcgtaaaggtttcctaatgccacaatctctataggatgatcttccaagggtttagagctgactgtgaccttcacgccgggctcgatatagagggaagcaccagcaggaatcttgaacgaagaggtgagtgtagtgtcatgtgaccaaacgatagagcctgtgggataagaggctatagtcgtcttcactgtatttgcgtcacctgtattgatggttatggtatcggttttggcagcgtaatcgtatggattaatgttttcgtcttcacacgaactcatgcctcccataagggttacagctaatatacttataaaaaaattaaatctcttcatgttaaattttactaaagttgatgattacaaatttactctcactccaaccagaaatgtgcgtccatacttgtaggttcctacaatggtacggtcgttgggttgtcctggtatcttggtattaaactcattaacggtttttaggtaccgttcgcgcttagagttgagcaggttattggctttaacaaataaggatatgccattattgaaacgcttctcagcactcaggtcaagcgaaaagaggtgcttctcccactcatcagaatcaaaatatggggataccaatacgagttgtgtcccagtataagctgctgccaattgtccattccacccatgttgcgtatctttataaagcaaagataaattagcggtatgtggtgcctgattgataagtggcctcgtttggtcaacattctccacttgattctttgcagtatagcgtttcttggtcgtggtgatggctgaatgcgtataagtatagttggctttcaatccaaagtgacggatatacttcaccacatcaagctcaataccataatttctggcattgccaaggttttggggcatatagtagctggcattaccctgacgctggtctacatcgaaagttgtctcaatcgggtctttgagatatttataaaaaacacccaaaagcacctgttcatcttgcgatggtaaccactcccaacgcaagtcgaggttatcaatgcgtgcacattttaataacggattacccttctcggtgtagtcctcaccatccacctgataaggcacaagctcatagaatcctgggcggttgatgcttttgtaataactgaaacgaagattcatcttgtccttaaatgtccagcgaaatgaaacagacggcagataatcccaatacgactgttcaccaagagaacccgttgtctcaaaacgttgcaacattgtgtatagttggttggtatgctcggcacgaaatccagctactaactcatagattggcgaggtaagtgttaccataccgtagatagcacctattcgctctttagagtcgtaattgagttgtgaggcctgcgaacgaggtgttttgagtgtccagtcaattctgtgaaacgcatcaatatcattagaagacagtaggataccattatctgagggtacagatatgtaagagtaatatcgattattacgcttcttgttgcgatacatagcacctgttttccacaccgctttaagttcttcactgaaaggagtcgcccacgaaagattgacatagcccgtccaatccttatcgtcgttatgctggaaacgacgctcctgtgatgccgggaatatcttagtgaccttgccttctgtcacggtgttctttatagtggtatagatacggtcaggatctttctctctggcatcggcgaaaagtcctgcccaatctaccgtgaggttacgcgtgaaatgatgcgttcccttgatatttgatgcaaagatattctgcgtttgtgtcagggtacgcatctcatccgcacgtgtccagttgccatttgcaaggtcaaagtcgtagtcggtcgtgatatccatgctgtagcgtgtattgtccgcttgacgacgcacgtacatgttataccactctatcttgtgattgtcaagcgtgaagtcaatctttccatgcactcccagattgagatcgtggatggaatagagcctcttcttgatggcactgatataagcagcttcctcaccgttagccatcacctccttattaagctcgcgttccgtaccacgatacgtattctgcaggttggtagcgaatatcactccaagctttttatcccaaaaacgattgccgatagagatgcctgcatggacattgggcattggtactttacggcgtgaaagctgagttccaccattcttaaagtcggcattggtcgcatcgtaggtacttccataacgctcgtatggcgccgtaggggtggtacttccgcgcttagcacttaaaaaatcgtaattgatttgtccgaatggagattgtgttttatcgccttgccaaaagaaatcgcttgcccctgttgcaatattcgcttgaagtctgaaactgcctggagcatctttcatgttcatatctaccacaccacccgcagcatcgccttccatatcggcagtgagtgacttagaaacaataatcctgtccatcaaatctgaagggaagatattcaagggaatatagcgatttttgtcatcgggactgggtattttcacgccgttaaccaaggtataattgtaccttttgtccattcctcttagaatggcatacgaggcttcacccgacgcatcgtgctgcattgttacgccagagacacgttgcagcactgttgctacattgacatcgggtgacacctgaatggcttgtgcactcatcacgttgagtacttgcgatgaatttttcaccatcgcataagcgcttacatcagtgtcttttgtacgaaatcccttgacaaccacctcttttagttcttgtagttcgggttccagctccagattgatagactttcctgcggacatatccacctgaacctccttggattgataaccaatatagctggctatcagcgtaatggtgccttgattgggcagatctttcaacacgaaagaaccgtccaagcctgtagaggtggcatgatgtttctcacctttcacttgaactacggtaccaatgagcgtctcacctgtcaacttatctttcactacaccagtcaaagaatcagcaaaacagacaggaatgatgcctaaaatcagcactgtcgttaatacaatcttcttcatatcattagcttgttcacttttacgaatgcaaaattaggacatagatattacaatcacataaaagagatgtttcataacgatgaaaagaaaagcgagatatttccacctatctcgcataaaaaagcagcaatatcgtccaacgatatttacatgggatcgacgtcgtaatacatttgtagggcagcataccgcttgtcttgcaagagttgttgttgcacacttcgtagatattgccgcacagcttgatagtcgataccgttctccattttgatgacgattttgcggatatacaagtttttaacacgtgctatcgaaggtttgtctggtcctaaaatacgctcacccaacccctgtcggagcctgcttcccaattctactgccgctgtttctaccacttgttcgtaacgatgcctcaaatatacatacaccaaacgataaaaaggaggataggaaaacatcttacgttcgtctaacagtgacttaaaaaagccttcgtaatcattctctaccacctgttttatcacgggcaagtctttatttttggtttgcagcaacaccttgccacgtgcgcctttcctgcctgccctaccgcttacctgcgccatcatcatgaaggcatgctcgtaagcgcgaaagtctggatagttcagcatggtgtccgcattcagtattcccaccacactaacacggtcgaaatccaagcctttgctcaccatttgcgtgccaatgagcaaattagtacgcccacaagaaaaatcatcaatcaaccgttcgtacgcattacgcgtgcgagtggtgtctaaatccatacgagcaacaagagcttcaggaaacaattgcctcacatactcttccactttctcggttccatagcctctgccacgcaaatcggttgcgccacatgcagggcataccgtagggacctgataagtataaccacagtaatgacaagtcaataagttcatgcgtttgtgcatggtgagcgatacatcgcaattggtacacttaggaacccagccacaagtgcggcattctatcataggtgcaaagccacgtcggttttgaaacaatatcacctgctggttgttttgcaaggcttcgttaatggcagcaatgagtgtgggcgaaaatggtcccgtcatcatcttgcgtcgctgcaagtctttcgtgtcaataacttgtatttcgggcaactctattccttgataacgagtggtcaaactcaccaaaccatatttgtcctgtgtcgcattataatagctttctgccgatggtgtagccgtccccaataaagtcttggcaccatacatttgagccaatatgatagctaccgaccgtgcgtgataacgtggcgaagggtcttgttgcttgaaagaggtttcgtgttcttcgtcgataatcaccaacccgagctgctgaaagggcaagaatacggcactacgtgcacccaatatcacctcatagggatgagatgaaagctgtttcttccatatttcaactcgttcggcatcactatatttagaatgatagatacccagtttgttgccaaacacgtgtcttagcctactggtaatttgcactgtgagggcaatttctggtagcaaatacagcacctgctttttctcatcgagcgcctttttaataaggtgtatgtaaatttctgttttaccactcgaggttactccatgcaataaaactacattctttttaaggaaccgaaaaacaatttggttataagcatcttgctgcgcttggttcagacgcttgatattttctacatgttcttcgcccgcatcgccgagccgtcctacctctcgctcgtaagtgaacaagattttacgctctaccaaccgcttaatcaccgcatacgaacagcgtgccacattcattaattcctcacgagtaatgtccacgacaggctcgctcattacggttccttgtaaagtctcccaatgcgaaatgcgcaaaaagtgcgtcaacacctcttgttggttttgcgctcgattcaataagtcgaaagctatgttcaacgcttgctccgaacgataaggcggacacaagtcaatatacgtctccatgcgagacttatagttctcttctaccttcaaacctgcgggtaatgctgcattatagacatccccaaggggtgccatatagtaagccgatagccatttccacagttggtattgttgcgttaagagcatcggttggtcgtcaataacatcaataatcgtctttaccttaaagtcaggcgcattgtcatgtacgtgaacaacgattgctgtatgcacctttgaagtgccaaacgttacggcaacacgtaccccaaaccgcaccctatcccttaagttttcgggtacagcataagtaaaagtgccttctaatggcaacggaacgataacatctacatatttcatgagccgaccacaaagttaagtgaaagtaaggaataccccaaaaaacaaacacagatatttcttccaacgaaattgtgccttacagattcgtttaccaaagcgagcctaaaatataactgaaaacaatctctttagaaatgagatgcgtttgaggagcggtattgataaaagcgataactaccttaagaaattatcataataatgcgttcaagaatgcaaaagaaccctgtatctttgctttgattatcagttatttacaggattggtaattatttacagagttgaaacaacactactgttatagtctcagaaaaccacagttaaaataaaaaaaataaaaagataatgatgatttattgtattgtagccgagattgttgtatgttccttattagttgttggaattgtaaaatggaatgctcgccattagtagtccctattgcaacacatcttttaaggtaaagtttgtcaagatgctggtagactgacacagcatcttgataaattcttgtgcagaatgcttcatataagcatccttcaaaaagtgtatgcacccttccatctgattgtctggcgtgtccaaaggaagcgctttcaagccttcctcatgtacaaccgtggactctgctaagatagaaatgtaattggaacgatgcaacagttggaatatcaagtcgatggtattcacttcaaccttaacttttagctccaaatcttgatgacttatcagtcgttcaaaggcatgccgagccaacagaccacgtgcaggcaacaccagtccgaaacgttccaactcctttaagtggatgcgttgctgctttgccaagggatggttttggttgacgatggctgctagacggttagtaaagatagtacgactatcaatttctttgtctgactgaagcggtaaaaaggctaaaacaaaatctaccttccggctctttaacatctctaagagttcatccatagaatgataaaagatgttgagcttcacaccgggataggttttcataaaatctaccatcgtatccatcatgatggtactgaacgagtaagtcacaccaatgttcaactcgcccgttatcatttgctttaagtcttctatgtgagcgatgcaagaatcggtggcaacaacggctttcatggcataaggcaacaattctttgccgggttctgtgagataaaccccatgactatttcgctcaaacagtggcaaaccaatctccttttccagatgactgatttgctgagaaagcgtactctgcgttataaataaccgccgacttgcttcagaaaaattgagcgtttcggccactttgagaaagtatttcagctgtctaatttccatatcatccttttaccgtgaatataaaggtatgtcttggttgacaatccatgcccacactcttaataaaactactgtatcttggcatcaatattctcaatgtccatgtgtttgcgttgaactaataaacgatataattttatttttcgccgactgtacagcatactatgaacaaatatattgggaatagccacgccaatggcaatcaccaaaataaccaaagaagcaagcatgaagttgtgcatgcctaccgttacttcgcccacaacgccttgcatttccacaaaagcaaacaatgctctatacatcaacacccctggtaccattggtatcacactgggtatggacaagcattgatgaggcgtatgaaaccagtgcatcgctacggtacacaccagactgattaacgttgaccctgccaacgagcctactataagcccttgatccaatcctatattacccgtactgggacccaagttcacaaagttacgactgcatacagcaataataccccctatggcaatgattggtaaaagtttttttggaatattaaatatggtagagaatcccatcgccgagattgctgccgcaatggcaaactctaagtaggtatggtgcggtgtcatggataggtcgtgcgcaaagttatcaattccgcacaccttaatagcaaaaccgataccaaagaccatggctacaatcatgagaaagacgttaagtgcacggactaaccctgtctgtatgtgtccaccaagcatgtcgctcacgaaattgatgagcggaacacctggcacaatgaacaaagcacacgccaacaatggatgccaaggagtgttggtaagcatgaacgatggtatcaaggaggctatactttcatttagcgaaaggaacgagctgagccatgccacaatcgtggaaacgaatgcacccatgcaaatacaaatgtatgtgttggcacctttcgcacccaaaaacatacgcagccggaaaccaaggatagctgccaacgacgcataaaagaaggctggccaatcacaaccaaactgtatacagaagccaccacaggcgaatcctgcagcagtggctacctgccaaggcgtgtaataacgtggtctcttcttgattgcatctattttttcctgatactcatctaagctgtaattataccgaatcgcatcccatgtaagatgacttactcgagtaatccctgccatatcaatggcatggcgatcgcatttgcgaaatcttgtataggaagtgctttcatcactgtagttcaccaaaatgacattgtagttgatatacacgtgaagaaactggctctccagtcccaaatatgcctctacacgcttcatatcccgaactatcaaggtggtgtcagcagaacaatccatcaagtagcaccctacttgtaacagtaaatccagtttacgatgcaccagctgtgcatctgtcgttatttgtttattcttcgtcatctatcaagaaactttatccgaacacaaaaatcatcatctgtattgtcagtattcttaagaacatggcaaacggatatacggtggaataacctaccgacggagaatcgctctgcgtcatatcattgacataagccaatgcaggagggttggtatgggcacccgccagcactcccaccagcgtgaagtaattaatgtggaatacatatctgcctatgattcccccgaagaggatgggcaacattgttatcaacaaaccgtataaaatccattgcatgcccgactgtgatacaatggtttggacaaagtcctcacctgttccaagtcccacacaagccaagaatatacacaatccgaagcgacgtaacatgaggttggcactgatagtgttgtacgtcaccaaattgtatttaggaccaaaataaccaatcaaaatagccacgatgagagggccacccgtcaaacccaagcgtagacttgccgaaatacccggtataaagaaaggtacatttgccaagatacaacctaaaacaatacccaagaagataggaattaagttaggactgttgagacgcttcatagaattgcccaacacttgttctacatgactgatggaaagttcattgcccaccaccgtcagcttatcacccatttgcagtttcaactgtcctgttgccaccaagtcaacacccgaacgattgacacgtgtcacgttcacaccaaaggtacttggtattttcatctgctctaatgtcttgccgttgaccgatgatttggtgattaagatacgacgagataccatttgtttcccaaacttcttccaatctatttcctcttttgcgcccaacaaagcacaaataggctcttcatctttcggtcgactgacgatgagtaggctatctccaagctgaatcaccgtctgtgcactgacgatattttgatgtatctgagttccctcgcgataaatgcgagaaaccataaaattgcgtttcaacagctctctgaggtgctttaccgtcaccccttgcatcatctcgttgctcactttcaccgcaaaagtattaaccgtcacctcttctaagtgtcccacaccgaccaaagcggcagcctcttcttttttcacattaatccgaagcacccatttcaaaataatgaacgaaatgataactcccaacacacccatgggataggtcacagcatagccgctggcaatggtaggagcatcaatgtgacgcaggtcactgtaagcctgttgtgcagtacccaagccaggcgtattcgttacagcacccgacaaaattccggcgatagtggtaatcggtgtatccgatatgtaataaatggaaatggcgataaccaagctcatggctatcactattgtcaccaacccaatgagcgtattgctgcctcgtctgaaagaagaaaagaaaccgggtcctacttcaagtccgatagaatagacaaacaatatcaagccaaattctttgagaaagtgaagtaaatgttcgtccaaattaaactgaaaatgcccgaacagcaaacccgcaaacaatatccaagctaagcccagcgataccccgcgtaccttcagcttgcccaatgacaaaccaatcgtgataaccaacgataatatcatcaccgaatgggcaactcctccgccccagagttcaggaaatcccctgaaaagattctctattacctccattgcatatattatagtattcgtgtacaaaggtatcgaaattaataaacgccaccaaatggcagccataaattttaacgatgttcgttatcatacttttcaatactaacctttcggcgtaaagacatctactgtttttgtccaatcattttaccaaaaaacgaccatctaaaatcttcaaaatagaaaaaatcaataggcaaacgacatgcaaaaatgccttgatttgaacaaaataagcgcattttcaagctgaaacattgagtttacgctcttggaaacatgtattaaaggtgttattcacatacagtagcagcattaaagtatgcaaatagcaggcttatctcaatgcttcaatcgccaaaaggtggtaaaaacacgaatgtatttacaaccgattattactcaatattttatagataataagtcagaaatatggttgttatttttaattgcacattctaaaaggtgaagatttaacgcttttattgattattaactcaaaaaggacatcaacttgggtcgtttcttctcttttccttgctattcgtttccgatattccacttttgttttggtctatctcatatgtactgcaaaggtattgatttttgtttgatattgctccttgcttgctccttgtcgtagattaattttcacacaggaatttttgttctctttctataggggcttgaaacaatccatttattggaaacaattaaagacggagctggtttgccccagtgctttttaagaaacagggcaattattttatctccacaaaggctcttgttcccaattatgaggaaagcctaataaacgagttcttactgatgggtatttcgataaaagctgcttgaaatctgcaacaaaagtgttgcccatagaaatggagttaagccaatacaccacatagcagagttgcggataaagtgtttgttcacggaacgagaaatccgtaatccatgtgtttggcatacgcataggcatcattggcttgacaggaaagacccgatttgacagtcttgaatgatgggcgcagcaattacgaagtacgggtctgggtacggattaaaaggctaagtgattattttcagtcatttagcctttttaattatctaatttttccccacattttccccacagctgtctatttatatacagggcaaccgcatcaaaataacgttagcttaggaaacaaacgtagttttcaacctcctcctctcccttattgtccattttcctaaaaaaaccattggtccaaatcgaaactactaccccataaaaattgattttttgccccatataattcaaatttcccttgcgggtaatattttttaagaaacatgatttttgacaacaggctattattcagacaaatacaaaattatgcatttttaaggggggatattgtaaattgttgaaacttctcatccttgtatccaccccacttatccctattaatacaaaatcgacaagtattgattatcaggttattgacattttgatgcggttgccctgatttatatattttagaaacatatttttccgtaaagttactatgtttgcaaaggctaacacacggagacaagtcggatgccgctcttcggaggcttcacgcctccggccgcatggcaaaccaccgcggtgtttttcatagtctgcaaggaaaaagttggtacgataataattggattgtatatttgtagtgcaaacgacaaatgacaaacaattagaaccgtaccgatatgcaaagaaacaaaatttccttcaaaggacaaaagatttacatcggaattgatgtgcatgcaaaaacttgggaggtctgtgtgctgaccgagtcgggttacaaagagaggcacccgcagcaagcctccgcaaagacgctctttgactttttgaagaagcatttccctgatggcgagtaccatgccgtgtatgagtcaggcttcagtggtttttctacatactacgctctcaaggagtacggcatcaactgtgtcgtgacccatgccgcggatgttccgaccacccagtacgaggaggtgatgaagaccgataaggtagatgcagctaaacttgcgcgctccttgcgcgctggtgacatccgtcccatatacatccgtgagaaagagaatatcgatgacaggtcagtcatccgcataaggaagaccatacagaaacaactctctggctacaaggcaagggtgaagcacctgctgcactgcaatggcgtggagatacccgagcggttcgcaagaccggggacgcactggtcaagggctttcatcaaatggctcaaggaggatgtcgtgctgctttcctcctcaagattgtcgttggacttgctcgtcaagcaggtggagacgatacgccagacactcttggacgtgacaaaatccatacgaaggcttgcgcagaccgacaggtacagaaacaattacgagcttctgatgtcgatacccggcataggtgtaagtgtagccatgtgcatattgacagaaatctacgatgtgaagagattccgtaacgagaaccagttcgccagttatctcggcctgataccgacctgtcataacagtggagagaaaaccgcaagcggagagaagaccttccgtggcaacaagcatctcggaccgatgatcatagaggctgcatggatagccatctatagagattacggactgggaatgacctatgccagatacaagcagtccatgaaaccgcaggaggccatagtcaaaatagccagaaagatgtccaacatcattttctcggtactcaagaacagtaggaaatatgagccatacagatgggataaagaataacatacagactttcggacaacttcataaaacgactccttttcataattgatggaccttcgggtgtcatctccgataagattgttgcgttttacctatattctgaagaagtaaattgttgggcggatacgtccgtgtcaactcatagaagtttgtctgataggtctgttgttcgtagcttttccatacccggtgttcccatgccgggctggtggctgttgcttcttctaaagtcatcgtactaataaacttcacgctaagtaattgataatgaacagttaataaattacaaatattttccaattatttggaaagcaacatagaagttatgtacctttgtcggcaaataaagatattctcgtcaaacaaatataaataatataaacatggaaaaaaacagaaaaaaacaaatcgtagttttgagtatagctttagtttgcattttcatcttggtattttcattgttccataaatcagcgacaaaagatagcgcaaatcctcctttaacaaatgttttgactgatagcatttctcaaattgtctcagcttgtcctggcgaaattggtgtggcggttattgttaataacagagatacggttaaggtcaataataagagtgtttatcctatgatgagtgtgtttaaggttcatcaggcattagctctttgtaatgactttgacaataaaggaatttcacttgataccttagtaaatataaatagggataaacttgacccaaagacttggagtcctatgctgaaagattattcagggccagtcatatcattgacagtgagagatttgctgcgttatactcttactcagagtgacaacaatgcaagcaaccttatgtttaaggatatggttaatgtcgctcaaacagatagttttatagccacactcattcctcgttcaagttttcagatagcttatacggaagaggaaatgtcggctgaccataacaaggcttactctaactatacatctcctcttggtgctgcaatgttgatgaatcgtttgtttactgaaggtcttatcgatgatgagaaacaaagtttcattaagaatacgttaaaagaatgcaaaacaggtgtagataggatagcagctccacttcttgataaagaaggggttgttatagcgcataagacaggttcaggtgatgttaatgaaaatggtgttcttgcagctcacaatgatgttgcctatatatgtctgcctaataatatcagttataccttagcggtatttgttaaggatttcaagggaaatgaatcacaagcgtcacaatatgttgcgcatatatcagctgtagtatattctttattaatgcaaacttcagtaaaatcttaaactgcacttgctttgataattaatgataaacaatctaaaagcactctaatcgttatcggagtgcttttagattactaatcaaattgcttctattataatttgaatcctctactttttctttcttcctgttgcggcactcttgctccatatctaagcctgtgccattgctccctgaaccagtcggcaatcggcttcctgtttattgtcaggttcagcctgctttcatcgtcagggtcattttccacccttaaaatatcatcctttatatcaaagttccgcctgtgttgctcggaatagattttaccgctacatttcagggcttcttttttgactataagactttcagtcatttctttagagaatcccagcatggcacaaaacttttccatgcgcagcatttccctgaacatcggaaaccacctgaaagccttgtctatgattctggcgagccgtgacagttctttttctttcatgtcaagttcctgcctgtgcatttctctgagattgtggatttgcgtatcatgctgtttctgcatctgctgtacttggctctgcaatttttcaatattggtgttccgttttgaaacctcgtcttgcagtttttcgttggcacgttccagttctttcagttttccactcccgaaaagagaagcaactccactagttatggctgtcgctgccgtggtggctgtcttctttaacttgtcagtgcgtatttctgatttcacctgtttcagttcctgctcggcaagatttatctgttcttctttgtgccgtttggctgcatccatgcgttgcagttcagctttctgcttctcaatgataaagtcgttccgttccagatgctccttaccagtgacagcctttgactgcccgcgttccatcagcaggatgtcggatgcaagggtctgcatctgcatcatgtcatcgtcattgagctttcggctctttcctgtttcgtggttcatccagtcgaaaacgatatgggcatgatagttcggcttgaaccatctgtccccgactttgaagctttccctgtcttccgcttccggctgaccgctcagccaatgcccttcatccttgtgcaggaagatttgcagcggtgtgattccccagcgtctttgacactcctcaccgaatttacgcacgtctgccagtgtggtgtccgacctgacaagcagcactccttcacgtatgggggagcatcccgcaatcttgactattttaccgttcttgcctttgcgttcacgctccttttcctgcatggcacgtccggtcttttcctttaccatctgtctgatattgtcataatgcatccgcaaatccggactgccgaagtcgggatttatccactgctcattatcggtggagagttctggaaccacataggttctggactctccgatgtggcgcatgtattcggcagtcctcctgttgtgagcctcactcgatgcgatattgcagggcttgatatgtatgcttgattttgttgccatagatacttgttttttgggtttgtactttattgtttgcttttccgctgtccgtaaacgcatggggttcttaggggtgcaacccataagcggagattgcaaagagagggtcactctttgctctgggttctcaggggagaaacgccctgagtgggtcattagggtaaaaccctaatcccctcgggagagcccacaactacgtaagcggagcgtgtagttatagtgggctatatcaatggcaagccattgtctgcaaactccagcctacggcttccgctctcctccgtcagggaggtttttcatcatcgttgccgattggagatgcaccgaccagcacaaggtctaaatcgtctatcagtttttgcaggacgggattcttctctatcatccgctggaggattctctcagcctcgaccaagtggttggctgtactcatcaccttgccctcccgtatctgaaagataatccaatcggctatgtcgatatgggcttctttttgtttcggggtggcattcctttcgatgatgtccgaaaccaccaccttacaaaagtacatgctctcggctcgctgtttccactcggcataagcatcggcatcgggaaagagaagcacggttcgccctgacagtacacggagtttctcttctctcatctgactcttaccacccgtagccagccatacataatcggggaagatagcagaaccgataacggcactcttctcggattccaccaagaccaccaccttgtcgggatgcgttttcaacaagtgttccccgaaaaggcattgggatagttgccaatcctctgccaacacacgctgctttttcaatatgctgtgtatccagttcactgccgatgtctgtcctcccttgatacggtgtccgtcttcgggattgtactgcatcacctttcccgtgcgtaccttgcccgtcctgtctatctgccaaaagataacagagccgtcacgggtagcccccaaacggtattcctccaacaaccgcttcaacacctctttcgccttgtcgccatagtaggaagtaaggagtgtgaagaggaaacggaagaaattgctacgctcgctttgcgacttctccacatagtgagggggaatatagccgatggctgtcggcttactttgctgcttcactttcttctgctctgctctttgcctgtcaaaagagaaatcattggtagttctgtgttcaggatgctcttgaaaatactctttcggagtgtagtgatacccacaaccgctttcgtggttacatctgccgaccgatggatgcaacggcacattattttcgtccacgtaatagacgaaagaatgcctgtctccgcatttggggcaggtatgccgtgttgccgttcctttatacttctgtaatgaataattgcccatagcttagtccgtttttgatggttgattgtcggctgtcccatcctgtcccattgtcccacactctaagggttgggacagtgggacacttgggacacctgcgtttttactctctttgctgcgctggatgatacggtttacggtggacttgccacaattcacctgtgaggctatctccctgacggacttgcccgattgggagagttgcagaatttggcaatccctttggcttgattcattgtcgcccaattttttcaagtgttccttttccgtggaatagcccctgaacacgaactgcaagaaagcatccaccttgtcaatctcgtaaacgattacattatccgcatcatgagagaacgtgccatagcgcactttaagctgcttcacatagcgaagccctccgtcttgggcactttttccaatggtgaacacgctgtcaaagaaattgtagagccgtttgcttccggcaaggtcgttggatgtgatgggacaatccaaagagcgtttgggcgtatgtgccaggacaaggatagagagcgcatatctctttttgagattgttcagctgaatcatcagccgtcctgcggcatcgcctttctccatggcgcaacacaggtaggtaagattgtcaatgatgaaaatcttgcagtcggtctgcacagccatctgttcaatgccgcctatgatagcttcctcaaagttggcatccaaaagctggttgcagtcaatagacacccgatagattttgtcgggaaaggtgtagagctctccatgctcgttggtatagcggagctggaactgcttttcggacagttcaaagtccagatacagcacattgtcggttcgggcgatgcggtcggctatctgcacggcaaggatggacttgcccacgttggaatcggcaaacaagcaggagagttccccctcgtaccaaaagctgtcccacagcgcacggggcgtaggcaataacgatgcttcaagaatggtttggtttgccgtcttgatattcatcatgcctacactgtcgggcataccgttatgcgcttgggatgcttttgtgaggtcgccacgtatcaggttgatatagttcttatcctcttccatatcattcaccagttacgtgggttgggcttgcgacggtgggaagaggataaggacttgttcagttcctcgtctgacaacggtatgggattctttcgggcggtttccagccacttgtccagttcgtcacggtaaaggcaatagcgtttgccgggcttggtggcagggattgtcccttctgacagtttcatgtagagcgtacccttagggatacctaaatactctgctgcctcgtccacagacatgggcacgtgggtgtccaccgttttggcattgttcacactgcgctgctcggcgagcaggcttttcaggctcatcacttcgtctcgaagctgagcgacaacctcggggaggtcgttgaaggtaagaattgatttttccattcgcgtactcgtctcttttgtaagacttggcgcaaaggactgaaatgatatatccgtgaatatctccacgacacgtcattgcaaaataattcccgaataattaagcccagccataaatgacgggtaaaattactcgggaaacgatgtaaaacaggcggttatgagttaccggatggttgtcgttggtgtcgtgattatcctaattccgcacataatcctcgggatagtggaaatcaagtttgccgttttcgggttcatcaatgggaatttccgtctttaacggctctaccttgaaattcttgatggttgataagtctgtatcagcaaacgatttcgggaaaagggctttgatgaacttggcacggttatccccattgtagtatctcttgtacaggaaacgctcagagatattccatacgaagtgacggagtggaatgttgttgatgtctttggtaaacggtctttgtatgggcttcggggtataagtgttaagattcatccatttgtccacctcagtacagatgtggttcacggtttcttggtcggcaatgcgaggcaggtaataatggcaatactccatgaccatgcggatgcgctcttccttttcccgttgctctctgcttgcgtaattggcacggttcttttcgtgaagatccggggcgatagtaagctctatcggttgtgtttggataagtgtctcttcttttgtcggggatgattcgggtacaggctcagggactgatgtaggtccaggcacagatgtggcttcttcaagtgtattttgtgacagttcttcctgcacctctatggcttcggcaatcgtttctttcttgccgaacttgattttgtagatttcgtatgtatcaaagataagtgtctgaaaggagagatagagcaaccatcccaacaggttacagcatacgaatactatccacctgacaaagttgtcttggttgaagctgtccgctattaccagcgtggcaatggaagatattaggacgatggcgaagccgacaaagcccaagatgatgtatttgtccttgattgatgattccatatttcgttgagagattgaatgttcctgtattattttgtgcaaagttaatgctatttttcccaattactgcccgttatttgcggttagaacggtctttttcaatgtatttcacgaaatgtcatcatatcatactctgtttcatactctgaggggcttataaatggtggcatcaagccaaaaacatagaggggcgattatagccttgtagccataaccgcccctctgaatacctgtcaatgtgagacatttatgcctccttgcgcttcaaggttatcttgtccaccacctgacacatctgctgcgctgctatcttggaatagatttgtgtggtggtaatgttcttatgtccgagataggcttggatgacagccatgtccgttcccatttccacgtgcaggcttccgaagctgtggcgggtacagtgaaaggtgattttcttggttatccctgctgccgtgagccaccgttggagtggtccttgcagcatcttgtccttgaaatcctcaaagataagtccctcgccccgttctcccagcagtccataggcttcatcactgatggggttatgcactatttctttggttttctgcatacgggtggtaacgaacatcctgccgttggtgtatggttgtatctgctgccacgtgagctgtctgatgtcgctctttctcagtcccgtaagacaggcgaaaagaaaagcttttttcaagacctcctcctcacagggtgtttcggcaagccgtatcagttcctcttggctcaaatgctccctgatggtgggaatgcactcgatgcggtctaagaagccgtttgggttctcctttatcttcctgtcacggtaggcggtgtgcagcacggcacggaaagttgaccaatagcctgctgcggagttgatgtgcagcttttggttggtgtggatggattggggtgcatcaagcaggtattccatgaacttgcggcacaaatccacatccacctcctcaaaggtgcatttgccgttcacgaaccgctggaaatgcttgtatacgtgctgccacttgatattcttgcggtcagccagtcctttgaaataggcaaggaaatcgcccttcatcttggtcttgtcaaaaaagccgttgttttcattgaaaatggcttcgtagcgctggttgcgcaggatgaccgctttcttcatcatgcgtgcgttgaagtcccgttcctgctggtttgcaggtttggcgaagatgtaaattcctaaggcttcacgtgtaatcactctcatggtgacattgtcacggtagccgggatagtagtcaaggcatagtgaatactgtgtcccgttcttaatcttgcgcttacgcaaggtaactgttttgcatttactcataataattatgttttaattggttgtatacattttggagttgtatccatgtttccgatggcaaaggaacaacgtgaaatatccgtgaatacctccacgatacatcattttgaaataattttcgataatcccgatttttcacggttatttgttcctttcagccatgacacgctccacatctgagcgcaaaagcaggtttttcacacccacctttatcttttcgatgtgcttcaccttgacgatatggcagatgttggctgacgaaagaccatagatttgctgcacctgctcaacggtatagtagcgttcatcgttcacaaggtcagttctgcggagttcgttcaaatgtgatttggagtaataggtacgcccgtactctcttttagtgggtatcttatggcgataggtgtaggcacggagtgcggtcggcttcatgccgaacagttcctccacctcctcggtcagtagccagtcggtaatttcgctaatatcaactgccacaccgaaaaactcgtcaatatgcttcttgctgtaatagttctttcctgcgatacggcagatggggatatggttacgcttggcggaagtgtaaagccatgactgctttaccttaaaaagggacatcacctcctcgcccgaatagaagtccaacacttcttcgctttccttttcccttttttctcttttggcaggtaaggaagatgaagatgatttccttggtgtggaggtgttgccgggcaggatgcggtgatagggattgccctccaacatctgctcgatgtcggctctgcggatgaatgccatgcggttgctgatgcgtgaggctttcagcttgccgatggctacaagtttgtaaatgtactgtcgggaacagcccatgaggatggctgctttggaaaaggtgagatactcctgatgctgtatctccatcaagggttgggcgactttgaagaggttgttcttctgcatcactctggctcgtttggcttctgcctgacaagcctcactgcaatatctttgcataccgcttcgggttacaaaggacttgccgcaaaaactgcattttctggttgctttcataccgttttatcgtttaatggttcatttcttcaatcctatatctctgaaatggtaaacggatgtgaacggaagtcaaccattgtcgcttttctacacagtgtgactgtttccgcatatcggggcggttattgtcgcttgtcgtaaacggttgtaaacccttgtcaactgtctgcacggtgtgacaaaaaacaagccccgcaaattctccacgtcagaaatacgtctcaaaaatatgtggaaatttgggaagcgacaaatggcaaccgaaaagtgttaaattttagaatatgctggtaattaaagatttacactcggatatttctgattagttttggttgttctatggttataaatacaagagtagaaaagagacgacataagtataacacattaaataacaacaagttaagaaagtcgctcaaaattcgcgtatttgcgaccaactttgccgttggttgtttttacgcgagttatgagaggcactttgtaaagaaaattcagcattaattatccttcaatcctgcgtgttgtcaatcttactgtatgcggttttatggctgctttcattggaaaaatatcagtctacaatgatagagctgtggctgatttttatcataagaaaaccgttgcttgtctctctatctcacggaagatgaacaaatgtggcatgataaatattcgatacgaaaggagcagctacaagaagaaatacattgataaatatgttaaaatcgaagaaaaagctataattatggttattatttgcattattatggctaagaattgattgcatttacagatttattagtaattttgtaatgtttacaaacgaaacaaatcgtttgtccattacattacataatattaaaataaaaacaataaaaatggaaacaattatcaacgcacaagtacctgagtttaaggttcaggcattccaaaaaggagagtttaagacagtttcaaacgaagatatcaagggcaaatgggcaatcttcttcttctacccagccgactttacctttgtatgtcctacagagttggttgacttggcaggcaagtacgaagaattaaagaagatgggcgtagaggtgttctctgttagttgcgatacccactttgtacacaaagcatggtacgacacatctgacagcatcaagaagattaactacaccatgcttgccgacccattggcagtattggcaaagggctttggcgtttacaaagcagacgaaggtgtagcttatcgcggtactttcttggtagatccagagggcaagattaagattgcagagattcaagacaacagcattggtcgcaatgcagacgagttggtacgtaaggtatcagcagcacagttcgtagaatctcaccccggtgaagtttgtccagcgaagtggaagcagggcgaagagacattgaaaccaagtatcgacttggtaggaaaactataaaaagacacaagaaccaaacttgactggtagctgaaagaaaatacctacgaaccaagtatcgttgttgttttctccagctacctttttttattccttttgcatttccgcaagaaacgcaaagaaaaacaaactaccctcacataataagttatagcacaatgttagatacaaccatcctacaacaggttaaagatgtctttaaagacttaacccatcaatatatcttcaaagtaacggcgcatccgcaacatgaaaaagccacagaactaaaagaatttatcaacgactttatttccacatcccagctttttaaggcacaatttgtggagaccgatgacatgactattcagttctctctgctgaaagacaatgaagaaacaggagtaatgtttcgtggcattcccaacggtcatgagtttacgtcacttcttttggctgtcctaaacgccgatggcaagggcaaaaacctgcccgatgatgcgatttgcaagcgcatccaacgtctcaaaggaaacatcaaactgcaaacatacgtctcgttaacctgcaccaactgtcccgacatcgtacaggcgttgaacgtcatggcgctaatcagtccaaaaattacgcacgaaatgatagatggcgccttgtttcaagacgaggtagagcgcttgaatattcaagcggtgccaacggtatatgccaacggagagttattgcacattggacgaggcagcttgggagagctgctcaccaagttagaagacatgattggcagtgaagaggatgagaacgaagaaccggtggaacgccattacgatgtcgtcgttgtgggaggtggtcctgctggagcgtccgctgctatttattctgcacgcaagggtttgcatgtagctatcattgcaaataatatcggtggacagatgaaagatacggttggcatcgaaaacttcatctctgttcccaagacaacaggagcgaatatggctgacaatctcctaacacacctcaaggaataccctattgatgtgtttgacaacagaagggttgacaaggcatttttcgacgagaaactgaaaaaggtacacgtaaaaggcggtgaaatatttatctcacctgcggtcatcattgctacaggtgcaagttggagaaagctcaacgtacaagacgaagctaaatatatggggcatggcgtacacttctgtccccactgcgacggtcctttctataagaacaagcatgtggcagtggtcggaggaggcaactctggcgtggaagcggctatcgatttggcaggcatctgcaaacaggtaaccttgcttgaatttggcgagaccctacgagctgacaccgttttacaagacaaagcgaagagcttggataacgtggaaatattcaccatggcacaaactacagctatcgtgggcgacggacagaaagtaacagctattcgtgtgaagaaccgcaacaacgatgaagaacgagacatatcggtagacggtatctttgtacagataggattggctgccaatgccgaccctttccgtgaggcgcttccgttaaatcaacgccacgagatagaggtggacaactattgcagaacgtccgtgccaggtgtttatgccgctggagatgtgaccaacgtaccttacaaacaaatcatgattgccatgggcgaaggcgccaaagctgctctttcagcctttgacgacaggattaggggcgtaataccacgtcttcaaaaataacgtacgttatctctattcatgcaaattgacatgaatgctatggattgaacattgtgaacaagattgaaaagagcgattggtggcattgcacaaccccaatcgctcttcttgtttcgtcatatactttatgaaaaactgttcggttatatcaaagaaaaattattttggaatgaacttcccatacctatccatatatccctcttcattgccacgaatagcctcaaaataaggatattcatctcgcaaggaaatatcatcatactcaaaaggagcgacgatggtatcctttccatcgggaagtatcagtcccatcttgtcccctttttgcacaattacaggcatagtcatgaggtcatcgacataaacataacaagtacgaacaaaatcgtatatggggtgaaccatgatttctccctgataattcttgagaccaaacttgccttgctcctcaattacctcatgataccgaatgtatttactcttcacacgctccaaataaaacgccattttacgttcatcatgcatcaatgtgagtaaatagctgaatgtatcacagtaattagccatggcacgtgccaccactatttgccagtctaatccgctcaacaccttgcggtttaagtcaatataacgagcaatggcttcttctttttgcggaatagtcagcgtagacaaatttgcttcaaacttttccatcatggtctttgagccagacatcgccttgatatagcggtgtatctggcgtgacatctcatcacagacgaacttatctatttgtcgcaactcaatgctgtctacgtatttatctgataaattatcttgtgttttcttttccatggtttgctctcctttcggtccaaagatactcaaaagaattaaattgtaccacgaatgtcatattattttggtttttttgagcagataatcactaactttgcaatctataaaagtgaacatttaacaagccccattccgaaaaatggtatatgttcattgaacgaaaactcatattatcaaagttatgaagaaaatattaatcagttgtgttttatgtttatgtgccttgattagtcaggcacaagtagaaagacccaaattacttatcgggttagcagtagaccaaatgcgatgggactacctctattattattacaatgaatttggagaaggcggcttcaaaagacttctcaacgaaggttttagctgtgagaaaacgcttatcaactacacaccaacggtcacagcgattggacatacaagcatttatacaggaagtgttcccgcacttcacggtattgcaggcaacaatttcagactgaatggacaacccgtgtattgctgtcttgataaaaatgtaaagagtgtaggaagcaataatagtgcagggcagatgtcacctcataatctacttgccacaacgataggtgaccagttaaggattgccaccaactatcaatcaaaagtgattggcattgcattaaaagatcgtgcagcaatacttccagcaggacacactgcgaatgctgcctattggtgggacaagaaagctggacactttgttacaagctcgttttatatggataagttgcctaaatgggtgaccaaattcaacaaagacaatcagacagaaccaggattcgatatgcttgccgacacgaaaggcattaccatgacctttaagatggcagaagctgcactccaaaacgaacagcttggcaagggaaatacgacggatatgttatgcgttagtgtgtccccaacggatattatcagtcatatttatggcactcgacgccctgaagtaaaggctgcttatttgcaattagacaaagaattggcacaatttctaaagacattagatgcacaagttggtcgtggcaactatcttcttttcttatctgctgaccatggtggtgctcacaaccctaacgagatgaaggctcaacgcataccagcaggtggatacgatgcacaagccaccatggataagctaaacgctcatttacaacaaaagtttggtgtagacagcttatttaattggttttacgcttattccctgcacattaaccaaggagctatagcaaaagcaaatcttcaaattgacaaagttaagcaagaagctgtcaactttttaagcaaagattcacaattcgcatttgttgtagatatgcaaaatttgaatgctaccactctgccttccaaactaaaagaacaattagcaaacggttatcatcttcatcgtagcggagacattcaagttgtttgcaacccaaacgtagtggctgctaagatcgatgagaagtacattggcaccacacacagtgcttggaatccatacgatgcacacattcctctcatcttcatgggctggaaagtggagcatggacaaacagcaaagactacacacattatagatatagcccctacagtctgctccatgctccacatacaagagccgaatgcttgcattggagagacgattgaggaagttgccgacaatgattaaagcgcagaaaagaaaaactttgcgttacatagaacgccacattagcaccattatagcaaaaggcttgataaggaaatccttgtcaagccttttgctataagtattcatccatccacgaagggaaaagggattgagatgaaaagtagggttaatacctgaaggagctacctcctaagaactcccgaataagacttgtaggaggcaaatctctgtgagaaatcggcttgatgtacgctaagaacttccgcaatctgtaagcctccgcatattcttcgcaattctctggcacttgttctaacaatgggacagcttgcgacttgatgacggcaagctcgtaaagcatggcagtattaaacatgatgtcagcattctcctgataagggaaaatccattttgtctcgccagctcttacacttggccatcgttttatggtctcttgcgcgctcacgccacgatatttattatcccgaatgatacgcctcaacaatcgattgtctgtggttggaatataattatggtcatctaaaagaatcgttgtcaatgcagatatatatactttaaacttctgtttgtcgggaatttgagccgtcaattcaggattcaaagcatggattccctcaaccaccaatacctgtcgctcctccaaacgcattttctttccactcttttcgctttttcctgtcaggaaattgtatttgggtaattccacttcgtctccacggaaaagcgcactaaactgctcgttgatgagttgaagatccaaagcatagaggctttcataatcaaagtctccattgctgtctaacggcgttcgatgacgatctacaaaatagtcgtcaagcgaaatctgcacaggacgaatgccattggctaacaattggatgctcaatcgcttgcaaaatgttgtcttccctgaagaagaaggaccagcgatgagaaccattcggacatctggatgcatggcaatgcgatcggctatctgtgagattttcttttcctggagtgcctcactgatgtttatcatatcggtagcatgtccctgctgcacagcttcgttaaaatcgccgacggtacttacccctaatatgtgctgtcttcgatgctgctccaagaatacttcaaacattttgtcttgtcgtatcaattcgcctaacttcgctggattttctttagaaggaatacgcagcaacagtccttcgtaatatttttccagtccaaagagatagatgtctcccgtgttcggcaataaggaaccataataatagtccacatagtcatcaatctgatgatacactgtgtataacgatccgatgctccgcaacagtttcaccttagcttcatcccccttgctttcaaacatctttattgcctcttcggtaggaacttgatagcgcactatagggatttttgcatcaataatctgttgcatgcgctcacgtattcgtacagcatcctcttcactcacctcatgtcctatctttaggttaatgtaataaccattcgatacagggatgtcaatcaccacttccgaccctgcatacaagtcgtgtacagccttacaaagtataaaaaacaaagttcgcgtatagttacgttgcgcagaactactgtgcatgtccaagaattcaacatccttgttatgatatagacacaagttcatcccgcaaactttattattcacctttgcacagatgggtccaaagggcatttctaatttaaattcatcaaaaacttcagaaagtgtgcttccgatagctacgtctttaatttttttattatttttgcaacgtatatgcagcatctgtttcatttggtctactgatttaagttcgtgaaagttatacgatgtaaagttaatcatttttctcgaagtacaaaaatatatcgcattacaatacaattatgatgacaacgagtgagtacttagctattttttttaagattattggttctctttccttgctgatttatggcatgaaagtcatgagtgaggcattacaaaaaatggcgggcgcacagttacgtcacatcttaggagccatgaccaccaatcgattcactggaatgctcactggaacattcattacctgtgccgttcagtcgtcttcggctactacggtcatgacggtttcgtttgtaaatgcaggcttgctcaccttggcacaagctatatcggtcattatgggtgcgaatattggtaccacgctcaccgcatggattatgtcgttgggctactccgtagacttgacaagttttgtatttcctgcctttttggtcggcattatcctcatctacagccgcaagatgcgctatataggagatttcctctttggactttccttcatgtttttcagtcttgtactacttagtgttgctgggaaagaactacaattagagaacaatcctgcaatcattgatttcttcaagtcatttgatgtagattcatatcttaccattctttcctttttattgattggtactgttattacttgcttagtccaatcttcggctgcagtcatggcgattaccatcttattatgctctactggtgtgctaccgatttatctcggaatagccttggttatgggcgaaaacattggtactacagccactgccaaccttgcagccttaggggcaaacacacaagctcggcgtactgccttggcgcatttggtgtttaatgtcatcggagtgatttgggtactttgtattttctatccttttgtaaatggcgtttgcgatcttgtccattacgatcctgccaatcatgtcctgacacaagagcaattagccgtgaaacttcctattgttttggctgcttttcacacctcttttaatgtattaaacaccgctgttctcatttggttcattccacaaattgagaaattagtatgtgcgatgattaaaccaagcaaaaaagatgatgaagaagacttccgcttacgcttcattcagatgggcattatgaagactccagagctatctgttttggaagcacacaaagagattcagtcctttgccgaacgtatccagcgcatgttcaacatggtcagagagttgttaggaatagaggatgaaaacaagtttgcaaaactttttgacagaatagagaagtacgaaggcatcagtgacaacatggaaatagagattgccaattatttagatcagattggtacggcacatctcagcgatgacaccaagttgaaaatccgttccatgctgcgacaaattaccgagatagaaagcatcggggatagttgttacaatattgctcgttcgctaaagcgtaaacgtacaggtaaagaagagttcacggagaaacaatatgagcagatgcatcagatgtttgagttgacagatgacgcacttactcaaatgaatgtgttgttatctgggcgcaaatctaaccttgacgtcaatcgctctttcaatatcgaaaccgagattaacaactatcgcaatcaactcaaaacaaaaaatatcacagatatcaataaccacctatacacttatgctattggtactatctacatggatattatccaagagtgcgaaaaactcggtgactatatagtgaacgtggttgaagcgcgcatgggtattcgccagcacaatgtgtagtgattcaaggcaccttagctgtcgaatactcgtaaaagccaaaactacgagttgaaagtgaaactttaatccttgatttctcccatctccgcccatattttcaaaaagcgttgatggtctacctccttttcacaattcactttcacaccagcgtcttccagccatgcataagcctcttgactcatcacatcggcatagacttctaccacgcctccttcggtcatggcacgtgcggcagttttgcctactgcctttacagcaatcttagattttaagagagattcgggtgcttcgttcaaaaggtggtagagcgtccgaacaccacgccccttaaaagtgcgaatattcccctcgtgtagcaacaccattgagcaatcctcggtgtgtaacatatcaattaattcactcatcataagcattcctcctcctattgattgaactcttgagtcgtgtaatgaagtttgtttatctgcatcattatgatgtctatcgcaaatatactaattattttggagaacatcaaacttttcaccgttatttaacagactgttttggtaaggaaaacagtctgttttgcgctgtaaaatagactgttttaccaaactcatgcgtatctttaagcaaacgagaggatgcaaccagattgtacacttcatggtttgttccacttccactcgcccacagaaagtgactaatccaatatccgaagcaagtctttcatcccctcgctcgcccctttttgaatgtgttcgaggcgtgcaataccactggttccgacatgatcggggtcaattaaataaattgggcagcccggttttgtatatcccaccaatccagcagcaggataaacattaagagaggttcctataatcacaaagatatcggcttgttgaacatactgtgcagctacagaaatcatgggtacactctcaccaaagaaaacgatgaaaggacgtaaaagagaaccgtcatcagcctttgcaccaggagtaacttccgcattttctttcgtaagttcgcgaatgtaagcctcattataaggctcacgactggagcagacctttgtcaattcaccatgtagatgaacaacccgtgacgaaccagctcgctcatgcagattgtcgacattctgtgtgataacggttacatcatacttctcttccaactgttgtatcagtcgatgccctttgttgggctgagcatcatacagttttttacgaagcatgttgtaaaagttagttaccagcgtaggattggcttcccaaccttcatgagatgccacctgctctactggataattctcccaaagtccatcactgcctcgaaaggtcttaaacccactttccacggacattccagcgcctgtcaaaaacactatctttttcatgattatattgttgtctattgatttattttcctaaaagtagacatgattgtgccatttcatcatcataaaagtaaaccgaccgaacacaaacaagtttacttagtttgttgaggtgcagtttaatttttacaaaaatagtatttttttgataaataaatcccgtctatgatagttttttgttatctttgtccctgttttaaaactatacataccaactataattaattgaatatggacaaagtaagttacgctttggggctcggtatcggtcaacagttatctgatatgggtgccaaggggcttaatatagacgatttttcacaagccattaaggatgtaatcgcaggtacaaaaccacaaattagcaatgaggaagcacaatccttggtacaaactttcttccaagaacaagagaccaagcagcgtgcggctgccgcagaaaaaggaaaagtagccatggcagaaggacaaaacttccttaacgaaaatgcaaaaaaagagggagtgattactttaccttcaggcttacaatatcaagtgctttcagaaggtacaggtaaaaaaccgaaagctaccgaccaagtgaaatgtcattacgaaggaatgttggtagacggaactctttttgacagtagcattcagcgtggagagccagctacatttgggttaaaccaagtcattgcaggttggacagaaggcttacaactgatgaaagaaggtgccaaataccgtttcttcattccctaccacttaggttatggcgagcatggtgcaggttcttctattcctcctttcgcaacactcatatttgacgtagaactcatcgaagtaatttaataaaactataaacaatgaaaaaactgacttttgtagccgctttggctattgctgctgcaacatttacaggttgcggcaattcaactcctaaagcagatctaaagaccgatattgacaccctaagctatgccatgggtatgtcacagacacaaggtctgaaagatttcttggtagctcgtatgaacatcgatactacttatatggatcagttcatcaaaggcttaaacgagggtgctaatgcaggcgatgataaagctcgcgctgcttattatgcaggtatccaaattggacaacagattagcaaccagatgattactggtatcaatcaagaagtatttggcagcgactctaccaagagtatctctttgaaaaactttatggctggtttcattacagggacaacaggcaagaaaggtttgatgaccattgaacaggctggcgagacagctcaaaagaagatggttgccattcgcagcaagatgatggaaaaagaatacggtcccaacaaggcagctggtgagaaattccttgctgcaaacaagaataagaaagatgtaaagaccttaccaagcggtgtacagtacaaggttatcaaagctggtaacggtgcaatgccatcagatacctctatggtaaaggttcactatgaaggcagaaccttggatgggaaggtgtttgacagctcttacaagagtggaaaccctgtgaccttgcgtgctaatcaggtcatcaaaggttggacagaggcactcgttcacatgcctgtaggttctgtttgggaagtgtatatccctcaagacttagcttacggagagcgtgaacagggacagattaaaccattctctgtactcatctttaagattgaattactaagcattgaaaaataagttgctgttcgcaacattatcacatttacaaaggctcaccctgtatgtgctggtttctgatacaaataggaaacagagcaatccatataaggtgagtctttcttaattccactattaaattatgaagaaaataattctcttttcgctatgtttcttagccatatccatcaattcatggggtacaacggacaaaaagaagcatcaaaaaaaacagactaaaagcacagcacaagccatcttaactccgcaagattcgttgagctttgctacaggtatggcagcaaccaacggactacttccttttttacaacacgagtatggagttgatgaagcacacatgaacgagttcttaaccgcttttcaagaagcattagagcaggtagacacgcctgagtttaaggctcgtcatgctggtcaggccattgcacgaatggtaaaaagccgcattcttccacaaaccactgaagctttcaaaggaactcctgaagagataaataccaaaatctttgaacaaggatttatggcaggaatacagaacgatacaaccatatacactgtgaaccaagcctctgaactgttccgtgagcgtgcaactgctgccaaagaggctaaagagaaagcttataaggatgcaaacacggcatggttgaaaaataattcaacacaaccaggtgttaagacaacccaaagtggattgcaatacaaaatcatcactgcgggaacaggagaagtgccacagaaagaagataaggtaacggtgaagtacgaaggcaagaccattgacggaaagatattcgatagttcttaccaacgcaatccacaaaccacttcgtttcgctgcgatcaggtgattaaaggttggacagaagccctctctatgatgcctgtaggtagcaaatgggaattgtatattccacaagaattggcatatggcgctcgtcaagcaggacagatacagccatactccactttgattttcacggtagaacttatcagtgtggaaaaaacgacaaagcccgaaagtaagaaataacagtctttattcgtattcgccatacgcccctaggggtgcaacaacgatgaatacagaccatacatatgagcctattgtccaaaaattatcagtatttttggcaataggttttttgctttttataccaatagttcctacttaattcttctcatccacaggttataatgagcggtaagtgttatttttatagaccgattgttgattttttcaattaaaattcttatttttgctatcagattaacttaaacatgacaataagaaatgggaaaagattcagaaaaaattgataatcttgacaagaagattttaagcatcttgtcaaataacgcacgcatgccattcaaagatgtcgccgcagaatgtggtgtttctcgtgcggctgttcaccaacgtgtgcaacatctcatagagaatggagtcattactggtagtagtttcaacgtgaaccctaagagtttaggctattctacatgcacctatattggtctcaatttggaacgtggaagcatgtacaaaaaggtggttgagcaactccaaggaattccagaggtagtagaatgtcactttaccacaggttcttacacgatgctactcaagttgtatgctcgcgacaacgaacagctgatggacttactcaacaatcacatacagacgattgcaggtgtaatgagtaccgaaaccttgatttcattagatcaaagtattaaacgtgaagttcctgctaacgtggaagaactatgatagatttcgatcttcgtgctgatttagaccgtattcattcatcttttccacccgcaaagcatcttccagtcattggcattaccaccaattatgccgatggtgatgcttctatacgcgaacgttattaccagcaagtaaccgaggctggaggcacgccattgctcattccaccgatagagaatatcgatgtgatgatcaatacccttgaaaatatcgacgcgttgatactttcgggcggggctgaccacaaccctttgtggttgggaaaggagccagaaaaaggattggggcatatcaatgccaccagagatttacctgaattgcggcttgcagtgttggcttatcatcgacaaatcccaatgcttggcatttgcagaggaatgcaaacgcttgccattgccttgggaggagaggtgacacaagacatccatacgcaaattaaacacgatcaggatgccgataaaaacgaaccgacacacagcatttcgattgcaaaaaacagtacgctctatcatatctatccatctgaaaagctatttgttaactcttttcatcaccaagcggtaagcaatacgggagacagatttgttgccacagctactgctccagacggcattattgaagcaatggagagtactgaatataagtctatcttgggcgttcagtggcatccagaatggttggaaaaggcaagtcttcctcttttcgaatggcttgtcaagcgtgcaacagaatttgcaactgccaaagccctacaccaacgtatcctcaccctcgattcacactgcgacacacccatgttttttccacaaggcatacactttgagcagcgtgacagtcgtatccttgtagacctgcacaaaatgtctgaaggacaccaagatgctgtgaccatggtggcttacctgccgcaaaccatgcccggagagacatttgcagacatcgcaccttttaaggttgcaggtcctaaggaatacgctgaccttatctttgacaagatagaagaaatagtaaaatcaaacaacaagtaccttgcacttgctcgtcatcccgagcaactctatgaaaacaagcggcaggggaaaaagagtatcgtgcttggtattgagaatggtcttgccattgaaaacgatattcgcaacgtgcaacattttgcgcagcggggtattacctatattacactgtgccacaatggtgacaatgccatctgtgatagtgctcgtaagagcatcaacacacatcacggtgtgtccgatttcggtgagaaagtgattcaagaaatgaacaattgtggcattatggtagacctctcgcatggcggcgaacaaagtttttacgatgcgctggacatcagcaagtcgcctattgtgtgcagccacagcaactgcaaggctctctgtgatgtcccacgcaatctcaccgatgaccaactgcgtgccatcgccaaggtgggaggtgtggtacagacgactttctaccatggctttttgcgctctgacagtgttaaagccagtattctcgatggtatacgccatttggaacatgccattgaaatcatgggaattgaccacgttggcatcggaacagacttcgatggagacggtggggtgtgcggtatggctgattcatcgtatatgattaacttcaccattcagttgttgcatcgccgttacagcgatgaagatattgccaagatatggggtggcaactggctcagagtcatgcgacaggcacaagaactgaaaataaaatagatgcacaagctggcacatcacaacgaataaccaagcatagaaatgaagaaaaagaaaataatcatgggagtaggaacaggaatccttttggctgctgttgctttttggggatggcattccacacaagcaacttcgacagaaataacaaatgaaatggaaagcgccatgcacaacgagcctgttggtcctgcttttgaagccgattctgcataccattatattgaagcacaatgcagtttcggtcctcgcaccatgaacagcgaagcacacaaacaatgtgcggagtggattattgaaaaattcaaggcattcggttgtcatgtaagtactcaaaaagccgaactgaaaggctacgatggcactttgctaaaggctaccaacatcatggcacaatacaagccagaagcacaaaagcgcatcttgctatgtgcgcactgggacagtagaccatgggcggataacgacccagatagtaccaattggaacaaacctgtaatggctgctaacgacggagccagcggaatagcggtgatgttagaaatagcccgactacttaataaagagtctacgctggattacggggttgacttcgtttgctttgatgccgaagactggggtactccgcaatgggcagagcaacaggacggagaagacgcttgggcgttgggggcgcagtattggtcgaaaaacctccccgacaactatcaacccctctatggcattttgttggacatggtgggtggtcaaggagcaaagttctaccaagaattggcttccaaacgatatgcgcctgagattataaataaggtgtggtcggctgcaagtgctgctggctatggaagttattttatcaaacaagatggaggttatattaccgacgaccacatccctttgaacgaaaatgccaaaataccgaccattgacatcatcccctattatcccgactgtacgcaaagcagctttggtcccacttggcacaccatctacgacacgatagaacatattgacaagaatacgctcaaggctgtaggacaaaccattatccaagtactgtttagcgaagaatagatcataaagagatttggaggtcagataataacagcttgttgttatgttgttttgtcaacatttctgacactttttgggggtctccaaaagagctaaaatagaaaagaatagacggttttttgtcaagttttaagacttataaacagcaaaaatatggctccacgggcttaaagcatgcaaataacgctcctatcataaagagttaagggcactaacccatgcgaataagcaccttaacccattacttttgtggtgttatctcattgctttatcagcacacattcgcacccttttttcatacactattgtgtatcagggagatagaaacttcgccataactcgcgtatttgcaagcaatctataagttggtgaaaaatacgaggaatatgagaggggtcgtgtaaagatatttcagcattcagcgaaagcaaaaatagcatgcaaacagaaagtgtagagggatggaatatcgtgagaaaaatggacaataaagcacagagttcttcacaaaaatctgatacaagttgatagttgccctcgtttttatcaaatctttagagccaaaaatgaacattacagttgccccgcctccacttgcaacacaatacgttcggtgagacgatctactccctcggcatcgtatttcttagtaagacttgctccgaaagcccaggcaaatgcctgccaaaagccagcgcgaataggtcccataaacgcttgtatcagctggtaagaagacgagtcacactcacgatacaccaacttgatgagcagtttgccttgttggtaactgagttttttcatacgtggcgtgtactgctccttaataccctgttccactcgcttcatatgttcgtctcttgccttcttgttgggcaatgtctgaaggtagtcacctgtctcgataatgatgcgatttacttccttggcaatgggcaataccttcttgatattgcgcaccaatctgttatatgccatgcgttgctgtgcactcttgaacactggttgcggatacacatagatattattaaactccatgtattgaatagagtcacgcccacggagcacttttcctaccttgaccatcggttcaaaagttgggctgtccatatctacctcacgctcttcggggtgaaggggcgtactcgggagtggattctgtgcatgtgcttgcaaagctgccaacaacatgactatcaatataaccgtgatgtttctattcataaagcacagcaaatgtaatgataatttcggactgcaagaaataattttatttttatttgcgttattaagtttttcacattatttttgttgaactattggaaaacagccttcacccatgaaaaagaaattactctttggcttgttttggttttgctgtacatggctttacgcccaagatattccatcttggcaaacttatttagagcaacttagcgatgtagaaggtattgaatcgggtgacttggaagagatgtatgagatgttgagcgagcaagctgcacatcctattgacttgaatcacgccactcgagaggacttagcacagctgccattcttgaccaaacagcaaatagaggagctcgtggaatatatagaccaatacgccccactgcggagtgttggtgaattggcgatgattgaatcattggacttgactcggagaaagctgctttcctatttcgttaccatcaacccttcccccacttctgcctttccttcgatgaaagacctcttgcggtatgggcgcaacgaattgattgcaacgggcaagattcctttttatagacgcaaaggagatgacaatggctaccttggttacccatacaaacactggttgcgctaccaactgtcgtatggacggtatggcaaaatgggcatcgttgcctcgcaagatgctggcgagccatggtttgcagagcgcaacaaatggggttacgactactattctttctatgcgcaggctaataagttaggcaagataaagtcgttggtcatagggagataccgtgctaaatttggacttggcgtggctatgaatcgtgactttatgctcgggaagctcactaccttggcatcattgggcaaccagtacaatactattcgtgcgcactcgtcacgttcggaagccaattatctgcaaggagttgctgctacggtgcaggtagccaatggacttgacctcactggtttcgcatcctatcgatacatagacggcacactgaacaaagacagtaccaccatagccaccattgtcacatcgggctatcatcgcacaatgcgagagatgagccgcaaacacaacacttctgagcttgtagcaggaggacatttgcagtatttcagtcatggctttcatgtcggagcaaccgcattttcaacgactttggacaaggagttacagcccaatattaaacaaacttatcggcaatatgctcctcaaggcaaatcattttggaacgccagcatcgattatggatatattagccgacgactttccatacagggagaaaccgcaataggcaaccacaaagcactcgcaaccattaacagcattagctaccaatgcctacccaattggtcggtgatagccattcagcgattttattcctaccgatattacgctcttttggggcaaagttttagcgaaggtgggcattgtcaaaacgaaagtggcatctttctcggcaccaattggcagccttttcgccatttatcgatgatgacttacgttgatttttcctatttcccgtgggctcggtatcaaacctcacagtcgagtcatgcttgggatatgatgacacttgccacttatcaacacagacaatggaacttgcagatgcgctaccgatacaagatgaaacagaaagacaccgcagacaagtcggctctcctcaatacctacacgcaccgagcacgtatcgctgccatgttcacccacagcgcatggtttacaaaaacacagattgacggggtgtattatcaaggtgcaaaacacagtactggatacatggtgacagaaaatgtgggtggaaagttcaaacggttacaggcatttgccacactggcttatttccacaccgatgatttcaacagtcgtttgtacacttacgaacgtggtatgctctacacctttgcattccctatgtttgctggcaagggcgttcgtggggctttcaacacacgctttaacctcaacgaacagctaatggcggctgtcaagataggagtcacacattatttggatcgtcagaagatggacacagggtatcaagaaatcaacggcaacacgcagaccgacttggaaatgcagttgcgttggagattttaagacaaataaccagacggttttcgcaaaagaaataaataatttgttacttttgcaaatactatacgaaaaggcaatgtcatgatattattgagtttcgacaccgaagaatttgatgtacccaaagaacacggcgtgaacatctcgttagaagaaggaatgcgcatttctgttgaaggcacgaacaagatattagactgcttacaacaaaatggagtacacgctaccttcttttgtacggcaaactttgccgaacagtcgcctcaaaccattaggcgcattatgcaagaggggcacgaggtggcttgtcatggtgtggatcattggcaacctaaacctacagacgtgtttgaatccaaacgcatcgtagaaagcgtggcaggtacacaggtgcatggttatcgacaaccaaggatgtttcccgtgtcagacaaggacattgaaaaggcgggctatctgtacaactcttccctaaatcctgcctttattccaggcagatacatgcacctcacaacgcctcgtacatggtttatgcgcggagaagtgatgcaaataccagcatcggtaacgccttgggtacgctttccgctgttctggctgtcgttacatctattgccacagcggctctatcattggatgacaaggcgagtactgcgacacgatggttattttgtaacctattttcatccctgggaattctacgacctcaacgcacaccgtgaatacaagatgccgtatatcatccgcaaaaatagtggcgacaaaatggttgaacgattgagcaacctcatcaagatgctgaaaaaagaagaggaagcgtttgttacctttaccgaatttgcaaaaagtaaattgaacaaagcatgatgagattagccaccatatccccctgctataacgaagaagaggtgctggaaaactcggtagctcgattgtcaaccctttttaacgacctcatacaacagggacacatcagcgcagacagcatgatggtatttgtcaacgatggcagcaaagaccgcacttgggagcttatttgcaagttgcaacaaaccaacaagtttgtgagaggcatcaacttggcaagcaacgtgggacatcaaaacgccatgatggctggcatgatgacggctcgaacatgggcagatgcggtcgttacgattgatgccgacttgcaagacgacctgaatgccattccgctgatgattcacgaatacactcataataattgcgaagtggtgtatggcgtgaagacttcacggcaggcagacccactattaaaacgactgagtgccaccgccttttaccgattgcaggacaaactgggcgtgaaaagcgtgttcaatcatgcagatttccgcttaatgagccgccttgcccttgacatcttatccacctatcaggaacgcaatttgtatttgcgcggattgatacctatgctgggattgccatcgacatgtgtcgacgaccctatcagcgagcgacaggcaggtaaatccaaatacacactgcgcaaaatgctaagcttggcactcgatggcatcacctcgtttaccgtacatcccatatatttcatactgtatgctggtttacttttcatctttctaagcatcggcattggcatctatgtcattcatgcattagtcgtaggaacagcctatccgggttgggcatcaatcatgatgagcatttggctcgtaggaggattcatcttgctgtcaataggtattgtgggcgtttatatcggaaagatttataccgaagtaaaaaacagaccgctataccatgtaaccaaaattgttggagcggatgaaaaatagcttcaaagcatacggagaaagacaccccaaactgcgaaaagatgcaggacgcatcgttcgttttgggttggtaggaacggtctgttcgctgattcattatggcatttattgcctgttcttgatgtttaccaatgcgaatgtttcctatacggcaggctatggggtaggattggtgtgcaactatgtactcactacttattttactttccacaaaaagcccacaaagtccaatgctgcgggctttgtggggagtcatattgtcaactatctcatggagattggtttgctaaatgtctttctttggttggacgtgagcaaatggctttcgcccatattggtgatggttgtggctgttcctatcaacttcttgatgcttcactttgtgtatctacatcagcggaagcataattcttgaacatcatttcataacatagtttcagccaaaccaaggtgcatggcagggcttttaacgaatatacctgtatcaagtcgtgccgtatacaacgaggatagaggtcggacgagccaaatcctgatatcattaacaccaacaccatgaagactatatcccaacgattgcgttgccacggcgcagacagataccatatacaagccccactaatggcaataatgtatgaactactctcactacctgtgctgaaaagcacgacgaacagcaacaccgatgcaaggtaggtttggcgaaacatcgcatttctgtattgcgaaaagcgaaagtaagggatgaaaaacaataccaacgctggagcgatgagccacaaatcggaatataaaagattgcccgtaatgcgacgaaccatgcccaacaaggagatattttgggcaatagattggaggttttctccattcttttccaacaaggtgacataccattcgtgatattgccctatcacataatcggcactgcttatcagcataggcgcaacaaacagcacaacagcccacaataacaacgacaaaacgaaccgtcctttgtgcttggagaagaagaaaaaagccagtcccaccactccatatagcttgacaaatgtacctaacacgatgaggaatgctgcccaaaagtcacgctctcgctctatcaagaagtacgaagcaatgataatagcagcaatggcaatgttgaattgctgcatgaacaaggacgttagcaacgtctctgcacaaaaccaataaataaagatttgctgtttgtacttcagttgcgacctactaatggcaacatacaagcagagcgagagtgctacattccaaaacaacatgcctaaccatacgggcattacagcaaagggcgcaacgaccaacgcgaataaaggtccataatgatttacatcgaaatattcgtcagggtacgccccatacagtgatgtttggttcactgtatgccaaaaaacaccacggaatatcagataattattgttgcgatgcaacttgaaaacagtggcaataatgggcaaaagtgtccacagccacaacaatgttcgcttgtcgtgaaagaaaggtttggctaagaatgccctgcatttgcattggactgagttcttcatgcttaattattataacttataattgctgcaaaagtaaaaaaaatatattatagttttatatggtattactaaaaaaacatatctttgcaaatagatacatcatattcacattatgcaagcagaaaatcaatttatgtatccacaagacataagtagaagtaaaaaaatatggaatgggattgtaaatttcatacaacaacattttcgcttcatcatgcttatgctgtttatcaatattccatacctatttaatatttcttcatttgggcgtggcgtacatcatttcttatatatgtgctttgccattgtttgcttaactctcataatatcacttattccatataaaagagttatgcgtataaccaaaagcattattgaattattctcggttttgttgctatttctctttttgcattttctatattattatcgcagcttgcctgatagtgcaattttcgaaatccttttagctactaatcataatgaagtaatagaatatctgcaagccaacgtattaaattcacggttgtatggaagcatttgtgcagtcatctttgttttatcggcgtatagccttttaatactaaaattagaatataagcgttcagctattttattcgcatcagcatggcttacttttgcatcatttttcacagtagtcaaccttataaaagatgttataaaacagaaaacaactacacgagacaggttattacaccaatgctgttcagccgtttccactgtttttcttacacgtgacgctataaatgacatgcaagaattaaagcaaatgaaacaaaaagggaacacacaccctaagctattaaagaacaatagtactataccgtatgttgtctatatattaggagaaactactacaaggaatcatatggggatatacggataccatctccagacaacaccttatttaagtagccttgaaaagacaggcgatttagtcaaatttaccgatgtcatcagtccaaatggacacacaattaaggtattagaaaaattattcacattttacagacaaggtgcaaaggggaagtggtatgaatataccgacctatttagcatcttaaatcaagcaggttattataccacttggttgtcaaatcaagagtcttcaggcatatatggtaatcatggaaggttctacgcagagcgatgcaaatcaaattcttttgtgtgcgttagagattcaaaaagtgactttacaaagtcttgcgatgagcatttactacctttattagaccaaaccttaaagcaaactaagcccaaaagttttattgtattacaccttatgggtacacacatggaatacgaaaaccgctacccaaaaacatttaaggcttttagtataaatgtagaacaaggcgagaataacaaaataaaagagacaaaagcagcttacgataccgctgtgcgctacaatgatagtatcgtcaacgctattattaaccgttttaaggacaaaaacgcactgattatctacatctctgaccacggtgaagatgtgatggaaatcaacaaaaaaatagctggacatggtgacattgatatcaataatcacaaagtagaaatccctatgttggtgtatatgtctaaaactttccagaaaaactatccatatatcacaaatagaattcgtctatcggcacaccatccattcatgacagatgatatgatacatagcattcttgatcttatggagatacaaaccaaagaatatcgtccttcacttagcatttttaacaaacaatttaactataagagaaaacgtatttgtgcagaaagactttaccctataaagtagatttatgagccacactaatttggaaaagaaaatttccgttgtcatcaacacctataatgccgagaaacatttggcgcaagtaatagactctgtaaagcactttgacgagattattgtgtgcgacatggagagcactgacgatacaataacgatagcaaagtcaatgggttgtaaggttattacctttccaaaaggcaattacaacattgtagaaccagcccgacagtttgctattgaccacgcaactcacccttggattctggttgtagatgccgacgaactgattagcgagcagttaagagcgtacctttatcgccacattgccaccccaaattgtgcagatggcttatatattccgcgcaaaaattatttcatgggacagttcttgcatgcccattatcccgactatatcctccgtttctttcgcaaagaggtggctcattggcctgtggtcatccatgcagtaccgcagataaacggtactatcgcttatattcccaagcgcaaccacgctttggcaatagagcatttagccaacgacagcattgctaccttattcaagaagacagacacttactccgactacgaggtgccacgtcgtcgccataagaattatggagcaggcagtttgttaacacgtcctgcattcagatttttcaaaagttacattctcaagggtggttttcgtgatggtgcgcccggttttatccatgccgtatgggatgcgttctatcaatttgcggtcgttgctaaattgatagaagagcgaaaaaacaagtcataacagccctgcagttacttactttccaagagtttgcaaaaagcctctctgtttgcttcgaatgtaaataaacgtttgtgtgctgctcttccttcagcaaactgctgctgcatttttttatctgtcaatgcttcatgcatggctttggctaatgcttctatatcgccaacaggggttagaatacccgctttaccaccatttaagatttctcgaggaccagttggacaatcggtggctacaatcattttatccaacaacagcgcttctatcataactgttggtaatccttcgtactgagagctatgtacaaatatctcacaacgttttatataggggtagggattcgacataaaacctaagaaatgtacatggtcttgaacaccacactctattgttttttgttgaagttgctgtaaagacggacctttacctattatatacaattcttctgtgtgtccgtaatattttcgcaaaagtgcgtaagcagcaattaaagtagagaagtcttttggatattcctctaagcgtgaaatgctcaaaatataaggtttttccatacgctcatctgcaatcaactcttctgaagcgcgttgcaactcgtctgtatctaccgaattataaatcatacaaatacggtctttcacctcaggataaaatctacaagcctcctgatacatggctttagaaatagttacaatatgattgtacgtgggtatttttcgcttttgcttttctccttcctttggatcgcgcttgtaattttcttctatcgcactatgtatgaaaacaattttattggtttgtacctttcttaaaaaactaccttgtgaactaataaaatcaacaacagcatctgctttttttaccaatttatgtaaattgtgtgattgcacataacgcctaatgggattgatgaaaatctcatccgttagtttaattatcttattagcgggtttacggcacttgtattttagcaaaatgggattagtgaccaaatataccactttcacttctttgggtattctgttgtgatatacttctacctcatctatcttataagctattgctaacgttaaatcataagcttttgtctttaataaatttctaagatattctatcaatacggtttctactccaccatctaagaaataactaattacaaaaagtattttctttttcttcatctttttatatttcatacttgtccaaaccattcttacaccatgtcagtcgttctcgctgcacacgctccaactctgccaaatgtcgtccctcgttgctcttagacgcctctggatgatagagatgatacacattaccacccattttcaacgctcgcttgtgcacaccagcataatgcaatcggaaagccaactcgctgtcttcatgtccccattgcaacaggtcttcgttataaccatttaccttgaacaggtctgaacgccaaaaagccatgttgcatcctcgcaagtggtctatcttgcgtgcatacctatctgctaaaaaggcgcgcaagcgtcttgaccgaaaactattaagaacaaaactgaaaggcaacttccaaggactcaactcaaacttctgatgagacaagagccgccaagtcaagactattccaagcttcactcgagagccgcacacaaagcaattgggctggcagatctctaagtggtcgctcacaaagtaaggtgacagaataacatcaccatccacttgcaacaaatagtcgcccgaagcagccacaatggctttgttcatgatttctgttcgccgaaaccctttgtcttcatgccacacgtgtatcacaggcacactactttccttttgcagctgttctatcactgcccgcgtatcttctcctgacccatcatcggctataatgatttcatctggcagcacggtttgggcaaaaatgctgcgcacacataggttcaatgcttccttccaattataggtagaaacaaggagagatactttgggtttggttgtttccatgttgttgttcacaaagttattgataaaacatctttcatgaaggcttcacacgctcatatatacatcttcaaaatgcacgaagtcattgttttccagctttttattttcatccataatccaatatagggggatgtttcgatagaacgatgcccacagagagaaggtgctctttacgcccatgagataatcgcactggctaagcaactgcaaatcttcgataccagaaccttttgaaagatacacattcggacaagccttgcgatacctgttgatatccaaccgtgcatcgttggtacagataaacacattgattttctgttggggatgtaatgcttgaaattcttggataagtcgtacatatacctcatctccaaagaaatacttccctccctgccacgttttatagtcacctcgacgtatatggacacccaagttgatatcggcttttggatgtttttgcatccagttgttcactttctgctgaatggcaggcttgatacagaatagttgtgctatctccgaccgatacttccgaaacaattcgtcatacctacaaccccagccgccacacgcaatgagagggacttgtgcaaacttgcggtctatctcgggagtgttatcgcccatgatacagtctaccaaacgcagccgtatcagcagctttgccagcagataagtcatcggacggtgataccacttcttgcaaattgcaaaataacgatatttatacgagaaacgcatggatatgacttttaccccatgctcacgcccgaaagcatacaaatgcgcatattgcagaatgttattgcacatctgcccgtaaccttttatcaatatcatggttttgatcctttctctcttttttcagacataatcgtttctaaatcacgcaaatccaccctccctgtctgcgcatcgtaccgtaagttgaactcttctctggttcgcttccaacgattatgactccataaatagaggtctgagtcatgctctatactggcttgcaaacattcaaaatagcggtcggttagctggaaatcagcccatgtctgcggtgttgtggtgattaacttaaactcacaggtatagtatccacgccgtacacgtcgcacatcggcataaaatacggcttgtcccaatcgttttatcatgcgctccgtacctgtcagcacgggcgtatcctgatgcatgaagtcaacccaatggtgtatgttgttccagaaaggcacctgatcggagatatatcccaagacgagcggaatatttttctgtcgatattccaccacttttctcaacgattctgacatcgagatgcacacggctcctcgcttttcacgcatgtgcttcaccattttgtcaaaacatttattctctaagggatggtatatctgggcacattgtgcttcattagaaacccaaaaagggagtgaggtgatccattcccactgaccataatgccccaaatagatagccgcagactgcccttttgctatcactttgttgacttcctccgtaccgataaattgcattcttcgctgcatttgccgcttactcattgacatcatcttgagcgtctccacaaagtaatcacacaaccaatgataaaatcctcgtatcatagcctcttgttccgccgctgaagaatgtggaaacgatgccatgacattacgatgtaccacctcatacctataatgcatcaaacgatagagtatgagataaataatatcagatgccacataaagcaccctcaacggtagcatggacagcagataggagatgccaaagcctaacctgtaaagtagattcatgcaaagatatttggtgacaaatatacgcatttcacccctttcctccaagtttttgtttcgtttagttgtttcattggctattttcatctatctttgaagttcaaacagcttgtcatgaaccactcgaaattactacacataggctttgatgccaaacgaattgtacgcaacaaaacaggattgggtaactacagtagaaccttggtaaaaaaccttcttcacgcccaagaccttgacttggacatccgtctgtatgcgcccaacgaaggaaacgaagagttgcgcaaccaaattcctgcgcaaccatgcgtgcgctatgtttaccccacgggcaaaaaacatccactgtcgcaaacttggtggcggtttacaggcatcgttaatgacctgaagcgcgaccacatcgacctctatcatgggctttccaacgaactgccacgtggcatcaaggcatcgggagtgaagggtatcgtgaccatccacgaccttattttcctacgctttccaaaatattatcattggtgggatgtgctgatttatcgttataagtttcgcatgacctgttgcgaagccacacatattattgccattagcgagtgtaccaagcgagacatcgtgaaatatggacacgtttcgcccgacaagattacggtcatctatcaagactgtgacgaggttttcaaacacccttgtaccgaaagacaactgcaagaagttcgggagaagtaccatttgcccactcgtttcatcctcaacgtaggcagtattgaagagcgcaagaacgtactgctggcagtaaaggcactcaaggacatgcctaccgatattcatttggtggtggtgggcaagactacaccctacacagagaaggtgaaaaattacattacacaacaccatctgcaaagtcgcatcaccctgttgcaccatgttccctttgccgatttgcccgctatctatcaactggctgagtgctttgtctatccttctcgctacgaaggtttcggcattcctatcattgaggctatacacagtggactacctgtcgtggcttgtacagggtcgtgtctcgaagaagctggaggagcagactgcttatatgttcatcccgatgacgtccaagccatgcgagaagcattgctaactttgctgaacgatacagacaggaacggtcgcatagctcgagccaaggcatatgtgcaacgatttgacaccgaaaacgtaactcgtcagctcatcaatctatacaaaaagtgcatggaataaatgctcttttttgtcctaaaaaaataccaaaaaacggtcagaaaaaatcttcaaaatagacgaagacacgccccatttttgttcaaaaatgcagctaaaacagctcgaaatatgcgctgattttgttaaagcaatgggtgaacgcccttaaagtaatacttttggagtgctgaaaacatgggataaagagcttatcaacatgacttaacgcccttagagcattgctttagcaactaaaacaaaggaaagaaaggagacgttatctgtacttttcaagataagtaactcatattctgatacttataaaactcttcaaatactgcgatatttgcgagcaacttatcatctgcgtgaaaatattgcagttatagaaagccttttgttaagttttttgacagttttacagggtgtttttgggggtttcaatcaccatgcaaaacgtcaaaaaaaactcaattcttcatcgtctcacgactccatgcaaaaagtttgtacacatcaaatcacgaattacaggtacaaaactatggcatcagcttgtcgtgtaccattctgtacatatattgccaaatgatagcttttagctcatgctccatctgtgcttgctcttccacttttcccaagaggttgtgctgcatgagcttgtcgtctaatcgatagatggctttggtgtgttgcccatcaaattgcaacacgtagccatatttacaatactgataaataccgttgagatagttcacagcatacgtctctttcatgggggttgtcatgagatcgcagccaaaagagaggaaaggcttgttgtagcccaatatgctgagcactgttggcaggatgtctatttgctgcgcaatacctggataaatgccagactttacctcacccgaggggtcgaagatgacgataggtgagcaaaaaccgccaatatcggtctgatattgctgatgatcgctcaggttggtatggtcgctggtcagcacaaaaatcgtattcttgtaccaaggttgcttctttgcggtttcgaaaaacttaccgatagccatgtcggtatagcgaatacatttgtgtatcacaatgccctcttctggatataccttcttatatttctcgggaatcacataaggagtgtggcttgtcacagtaaagcaagccgtcatgaaaggctctttcagctcgccaatcttcgttgcccaatattgtaagaacggttcgtcccaaatgccccagtgtccatcaaagtcggcatctccgccaaatcgtttgtcggcagcatagtcttgtcgcccgaagtattgctggaatcctactttgttagcaaacgccataaatcccatgctaccacggtttgccccatggaagaaagcagtgtgatagccttccttgcccaaaagtcctgccatactggtgtaattgttcatcgaagcgggcgacaacacgaagggttctttgaacattggaatgccacaaagcaccgatggcattccgtcgatactcttacgaccgttacagtaagaatactgataggtggcactctgttgaatgagtttatccacatggggtgtatatcccttatagttgccattttctaaatccttgttcagggcaccaatgtactctcttccaaagctctcaacaatgagtaccaccacattcttcttttggaacggatgggtagagacaggacgatgaatgggtgaaaacactcgttcggctgcctcaaggttttcaaagtaaggtggcacctcgaatacgtcttttccaatggtgcggataagcgcaaagggcgtgttgagaacaatggcacattcggtgggtctgctgacatattggttggcattgttcacagttatggggcgaatacccgactcaagtccacctctgcatgcacctatggcaagcggtgtaatggcgagcaataagagcaactgcaccactccgaagccgatacgactgccgagcgtagcataataggtgtggtgggtgcgtggcatgagatagagtttccacatcaaccataccactgcaatggcgagcaataataagtaccaatgtccccatagttcgccccagaacacatccagcaagttgttttcgttgctgaactcacgaaatacgctcgtagtagtacggcgcaaggtgtacggaaaatacaccgcatcgcaaagattgatgaccaaagtaagcgtattgacgaccacaaagacccatttgcacaatagatgatagcctcgacgttctttcatccataaagggaagagcatcatgacgatgtacaaggagttggtgtaagtgatggcagaacggtcaaaaatatagccaccccaaaaccattcgcccacttgggagatggataaaccttcagagaaataactgaaattctctaaaaggaatgccacccgggcaataagatacaccacaaacgccataaaaatattcaccactaatgacacaaatggtgccaagtactgtttagctcctttgcttttagacgattcaacgctatatttcatcttttccatttcgctctttagctttcgtttttcattatatcatcgttcctgcatatcgtgcagtttcttgtaatagccatccttattcatgagttcttcatgcgtaccacgctctacaatgcacccttcgtgaagcacacatatttcattggcgtgcttgatagtagacagtctgtgtgctattcccaccgttgtgcgtgtgctcatgagcttctccagcgcatcttgcaccatgcgttcgctctcggtgtcaagcgcactggtagcctcgtcgagtatcaaaattggtggattcttcaagatagcacgtgcaatagacacacgctgacgctgcccaccactcaaccttccgcctcgatctccaatgcaggtatcgaatccatcttctgactccataatgaagtcataggcattggcaatacgagctgcttgctctacctctgcttgcgtggcatggtcgacaccaaaagagatgttgttataaaacgaatcgttaaatagaatcgcctcttggttcacattcccgatgagttgtcgcaagtcatgaatacccaaatcacgaacattgataccgtcaatcaacacctcgccctcttgtacatcatagtaacgtggtatcaaatccaccaaagtagactttccacttccactctgtcccaccaatgctaccgtctttcctttgggtatcaccaagttgatatgtcgtaacacccattgctctccatacctgaaagacacatcccgaaactcgatttgatgcttaaattccttgataggaacaggatgtggagaatcttgtatggtgactttcgcatttaatatcttgtctactcgctccatcgaagccaatcctttcatgatgctgtaactggcttttgatagttctttcaaaggattgatgatactatacagcatcaccaagtagtaaataaacgtaggaccactgagcgtttgttggttgagtactaaggtaccaccaaaccacaacacgatgacaatcatcactgtacctaagaactcgctcatcggatgcgccatttgctgccgcacattgactcgaagtatatgattgcgataatcactgttaatcttatcaaaccgcttattcatcttttcttcggcacaaaaggctttgatgatgcgtagtcctcccaacgtttcctcgacctgactcatggtgtcgctccagagactttgtgccttgatgctattttgtttaagtttacgaccgacaattcccattaaccatccgaagataggaacaaacacaatggtaaacagtgtaagttcccaagatattataagtaaggttgcaaaataggcaatgatgaggataggattcttgaagagcatgtctatcgaagccatgatagagttttctacctcctgtacatcaccactcatacgagcgaggatgtcacctttgcgctcttcggagaagaatcccagcgacaaactggtaatcttgcggtacaactgattgcggatatcacgcaccacacctgtacgtatcggcatgatagtggcagaagacagaaagtatgctgccgtctttagaaaggtcatgaaagccaaaaacaagcctatcagcagcaaggtggtcgtagaaccataggtatcaatcatcacctgaacgtaataattggcattattagctaacacacggggtaaatctttaatggcttcaggccaaggcatgagtgtggttacctgcacttgattcaccttaaacagaatgttaagaatgggaatgagcgccgcaaaagaaaatatattcaatactgctgacaagatattgaataagacggacgcccataaataacgtttgtagggtggcacgaagcgcctaaaaacttgtataaactctttcatgaaattgctaaaactaatgctgtgagaagtaaataatctctgcggtatcatgcaaaggtaagccatttattgaaaaacgacaactttaacgttatatttttggttaacaagcagtttatggatgcgtaccaacaaccattgtttgtgcgatttgtctaattaaattgcttttgctacctttgtatcatgaaaccatcaaatacgatgctaaagggaacaatccgcatataacggtttgtttcacagcgacgtatttacaacaaaagagcagtatatggaaaaagtaatcatcaattcttacgaagattttgccagttacttaggcaaagacttaggtgcatccgaatggttggaagtaacacaagaccgcatcaatctatttgcggacgctactttagaccaccaatggattcacgtagacgaagcacgtgcacaagtagaaagcccctacaagagtactattgcgcacggttatcttaccttgtctctattaccacacctttgggaacaaatcattaaggtgaacaacatcaagatgttagtcaactatggtatggataagatgcgttttggacagcctgttcttactggtagtcgtgtaaggatgactgccaagttgcacgctattagcaaccttcgtggcatttgcaaaacagaaattaacttcaaaattgaaatcgaaggacagcgaaaacctgccgtagagggaattgccacctttttatattactttatataagcaaataaagaaagggactttttcaacaaaagctacgaataaaatcactgcaaataaagagaagatgaacgatgaaagagatcaaagaaggaaacttgtcttttgacctgaaagttcatctctcgtatttcgcagttagttttttacgcctctcttccccaccaagaaagcctttgccgagccaaaacgcaagaacatgtctaaccgtacggggatatgattggtgtcatcggtaacgaaaaagtcgacaatcttcttatacgacttgtcttctttttccatatatgacaattgtaaacaacgatattttttcccatcatccgctttgacgtgggttttcccatgatatttcaacatggcaggcatcgacttttcaccgtcaaccatcgtaaagcgataagcgtagcctttcttccacttggacacatcgaacgatcttgcacgtaaaaagatattcaacatatcgaacacacattcgttcttgtagccctgtctccatagatgctcaccactactggttatctgatgttgcttgacatagactttcttattgggataagtataaaaaacttcatctatataataacgtgaaccttcttgtgctgctttgcgatagtactgcggtgccaagttaagcgaggtataagcttgtaacgtatcacgcaatacaaagagatgatccgccttacgatttcctctggtaattaatgaagcgcgataacttggctgtcctttatagttggaacgtaccacggacatggaagcatttcccaccttcacccatacgaatttccaattaaaataaagattgtaggtaagaagctcaccggaagtaaaagccgtgttcttcatatcacactgtgcttgtacagcgactgatgagaccaataatagtaataataatgtgatttttttcaataatttcatattcgtttgttccttatttttgtaccaatacgatgtatttgcaacgtcgtgattcttcatcagaataacacttcgtggtattatttcaacatacctggtacatattttttacctaagtcgagggcacgcttggcatttctattctgaattttgcgttgctgctcgcctttttgctttgttatttgtgcaggcttttgctgatacagaggcgtctgggtgagattccaagtttcattaaagtcccattttgcacgacatgtaatcttctttggataataataaacttcttcaggctgcctattctcatcgtaatttcccgtatcccagcgaccatttccattcgtgtctacaaacaaacgcgcataataatcacccggttttacatagaagaattgtgcttcaccattgactacaggcgcctgcttcactggtttatccgaagtgtcaagcaactgaaccaccatgggggactgttttgcaccgacaatggttaatagaatagtgcttaactcatcattcgattgaacagaaaatccttgtttcttcttcgttgatgccactccatagatatcaataaaggcagcactatcaagttcaagactatactctatccctggacgccactcgcctcgcaagacatagttgcgcgtatgttctaaataagccttattgagagccttcacggtagtatctcgttgttgctcaaattcatacggagagacgtaccaaagcgtgtcatgtttggcataaagatgtatcttagacgtatcaatctttgccaaaggggtttcaaaatgaaagcttacattcttatcagccgtcattgccgagccagcggtaacttgtacatccaagttttcttttggcataatagagtcgtaaggctcgcctctttttttagctttctcttgtttttttgtccactcgtctatctttttctgttccaattttaatcgctttgcatacggaatcttagacaataacgaaacagtatccacttgttgatgcagttgtcccacagaatcggtggcttgatagcttaactgaacctctaatgtgtcttgatgaatgagcgttgtgtcgcgtaaccaatacgtcaaggtgtcccctcgaggggtcgattccatgatgaaagcgtccttatcattaaaattaagaccttttatttgtgggagttggtcactgccatagctaaaaaacagcgagaagaagttaggctctttacgctccgtcttaatgagatagcgatttgtctgtatctcggtgaaagccctcaacgtaatatcatctggtaagaaatgcgtataattcacttgcagaatattcttgatatggagcgaatctgcccaaatcgtgtcttgtcgaatatcaggtttagagcttggagtaatcaggtcatgcgtgaaagccaacttctcacttttctgattatagaagtaatttccatctacatcctgcaaagcgtaaatacgataagtgcctggagcaatgccacgaatggtgaatttgccacgactatcggttcgagacacgcgcaacatgggcttatgtcggaagatagagtcgctatgattggcataaagccccaccaagattcccttaatgggttctaagttttcggcttccagcacataaccacttacctccatggtatcaatcttcgaacctgttgaaaaactataagtataatttcccaatgggtttccctcgttgttgtccgagattgcatcgctaaagtcgaccgtataagtgaggtctggcttcaaagaatctttcagttccaccacgattcgctttccttgcgacttgatttctggcgcttctatctgtggaggagagatgacaaccttctctgttggattgtcaatcttaataaattcgtcaaactgtatgtatattttcttatccgtgacatgtacagaaccctccttaggtgacgtactgaccacttttggaggagtctcatcgtaccatcctccatcgggacttcccatgcgagcgcacgacatcatcatggaagaggaaagccacaaaaggagaacataccacactgcgctaagcgagaacaccttgcctgcattgcaatgaagtgactttaggtaattgaaaaagtacaaatgacgcattttcattcagtataaatgagaattatcccttaacaagattttgttcagaggtattgagttcgagcaattcctcaataatctttctactattagacaaacgtggaaccttatgctgtccacccattttccctttcattttcaaccaatcattaaacaaattggtgcgtgccatgatgatatccaaatgttgcagtgtgacattgtgaaagcgtttggcttcgtagtcactatttaattcctgcaaacgcttgtctaagatagacgcaaattgttgtaaactctttggttttttgacaaactcaatcagccattggtgtctacatttggcattactgtccatatatacgggtgctgcggtgtattctgaaatctctgcacccgtttgctcgcacgcataagccaaccctttttctgcattgtccataattaattcctcaccaaaggcattgatgaagtactttgtacgaccagtaataatgaatttatagggattctttgaggtaaacttcacagtatcaccaatcatataacgccacaatccagaagatgtagagatgagcatggcgtagtttttatccagttcaacgccctccaatggtacgactgtgggggcttcctttactccaaattcatccatcggaataaattcatagaacacatcataatccgtcattaagagcatggaagagtcatctaagtcgctttgtatgccaaagaatccttcgctggcattataggtttccatgtaacacatctgcggagaggtgatgagctgctcatattgtggacgataaggcgtgaaaggaatgcctccatgaaagaaaacttcaaggtgaggccacacctcttccaaatgcgtcttgccgcttaattccatcactctcaccaacacagacagcatccaagagggaactcctgagatattcgttacatttttatgtaatgtttcctttgcaattcgatctcgttttacttcaaaatcctgcaaaagtgccgtagacttcttcggcacacgcatcacattaacaagaggattgatattttctatcaggattgcactaaggtctcccactaaagagttgtgtacattataatttggagagtggcttcctcctaatattaaggctttcccgtcgaaaatccgactatcaggacgattgagaagatagagtgccaccgtgtcttttcctccttgataatggatgtgatgaagtgcctcgttagacacgggaatgaatttactcttatcattagtagtacctgacgatttggcaaaccacttcacttgaccgggccacaacacattttcttccccatgtcgcatgcggtcaatgtcacttttcagttcttcataagtacagacaggcacattttttacatattcctcatacgaccttatactcccaaagagatggctacgcccatactctgtatctttagcctgttccaacaggttcatcagtacctgctgttgcattgattcagtgtgtctggcgcatcgttcaatctctttttgacgcgacagaaagaattggcttgctatacttgttagccccattttattatcgtgcagtttatcagtttaatatgcaaaaataacctaatcttttgtaacaaacgcacaattcacgtattttaagacacatggcacacaggggctttcctattataataggtggttgaggatgaaaaaccagtttttcgttttgtttcaacaacagcctttaggactgaaacgcaatgcacggcttacctcatgcgtttcttttgcttttcttcttgtaacaagcatgacgcttgaataaaagcgctgtagcgtttcatttttatcatttttagagaaagaaatgcgatgtttttgtcctgttaatttaccaaaaaacggtcatctaaaatcttcaaaatagaaaaaatcaataggcaaacgcacaacaaaaatgggctgattttcacaaaacaaacgccttttcaggctgaaatattgacttaacagtcttggaaacatgctttagaggtgttatctacatgtaataaccgcattaaagcatgcaaacagcaggcttatctcaatgcttcagcggcaaaaaagtggtaaatttacgaatgaaaaacgacgttacaaccataacattctcaataacaacagattacaaacattactcataactcgcgtatttgcgaccaacttcaaagttgttcgcaaatacgcgagttatgagaggcactttgtaaagataattcagcattgatgcgtctccgaaactgcacaccaataattttatttccgctatctgataagagccttttcgctgtaaaaatatgagtcttcaacgtaagaattgtgttcaggctggttctataaattaccaccgcatatagtcattaaatttttatgaaatacgttttgttatcttttggcttctttttggttcaaaatgtaagattgttcagtcgtgtagctcgctacactccttcacgctcttgcattttgacctcaaaaataagctcaaaatctaacaaagctaatttatagaaccagcctacacgaaaaagtagcgtaacaacgcttatccttcccatttgtttttccatttttatcaactactcgcctgaagatagccgtattttgattatctttgtgcttcaatttaacaaaacaaacatgcacttaaaagctattattctcgattttgacggtactttggcggacaccaagacactgattaccaatacgatgttagaagttattgagcaacttcacttagaaccgcgcacccgagagcaatgcgccaaaatgattggactgcccttaaaacagacttttaccgacctaatccctatgacagacgaaatgggtgagcaatgtgttgcaacatatgacaaggtgtttcatgaaaacaacgttcccggtgctgtgccacttttcccaaatgtacttgagactttgcgagaattgcaccgcttaggatacgttcttaccattgccagtagtcgctccaagcactctcttcttaactttatagacacctttgaattgaaagacatcattccctttgtagtgagtgccaatgatgtttcgaatgcgaagcctcatccagagtccgtgctaatgaccctaacacatctaaacattcaacctcaagaggcaatggtggttggagatacggtgtatgacatccaaatgggacaaaacgccaatgtatttacttgcggtgttacctacggtaatggcacgcgtgaacaaatgacgtcacttcacaccgactttattattgacgatttcaaggagctactgaagattgtaaaaaggtagcaaaaacaaaaaataaaaccaccgaacagcatacattctcacaaaaacatctcttcaaaagcaagtgagtacgtatgctgcttcaacaggaaaaataatcaataaaaaccctatgtcagtgggctaacgactatggttacagcttatttccataacaaaggtcaccagcatcgccaaaaccgggcacaatatacttgtgttcgttaagacctgggtcgattgctccacaccagatagtagtttcctccgtgggaaaagttttcttgatgtggtcgataccctctggtgtcgcaatgacgcaagcaacatgaattcgcttaggcgttccctttgtgaggaaagcttgataacccaactccatggaagcccccgtagccaacatagggtcggcaatgataagggttttaccttcaatactcggcgtagccaaatattccacatgcacacccacctcatgctgctcttcgtcaatatattgacgataagcagacacgaaagcattgcccgcatggtcgaagatatttagaaaaccgttatggaacggaaggcctgcacgaaagatcgtagccaatacaacctcgtcggcaggaatattcacctgtgcaactcccaaaggcgtagtgacatccttcttctcataatcaagggtcttggatatctcataggcttccaattcacctattcgctgaatattattacgaaacaataaacggtttttctggtagtcaacatctcttatttccattaaatactggttcataatcgagttcgactcactaaagttgataatcttcattgttttcaatgtgttatgttttcatcctgcaaaagtagccatttccatttatttttgcaaagtgaaaattgcaaatatcaaagcaatgctttcttttttcaattctttaacctaaaacagaaacgatatatatattttttataacctaaaatttgtcgacggatatattttctgtaactttgtagtcgaattagaaattcattgatcaagaataattattcacacttaaatacatttttatataatggcaaagtttgataaatcagtactcgaaaagtacggaattacaggtacaacagaggtagtttacaatccttcttacgaattgttgttcgaagaagagaccaaagaaggccttgaaggctttgagaaaggtcaggagacagaactgggtgcagtttgtgtacaaacaggtatttacacgggtcgttcacctaaggacaagttcattgttgacgacgctaattctcacgacaccgtttggtggactactgacgaatataagaacgacaaccacaagatgacagagtctacttggaaggtcgttaatgagttggctaagaaagaactttctaacaagcgtttgttcgtagtagatggtttctgcggtgctaacaaagacacacgtatgaagattcgcttcatcgttgaggtagcatggcaggctcacttcgtaaccaacatgttcatccgtcctgttaatcaagaagaactcgaccaagatccagacttcattgtttacaatgcttctaaggctaaggtagagaactacaaagaactgggtttgaattctgaaacttgcgttgctttcaacgttacaaccaaagagcaagttatcttgaacacatggtatggaggtgaaatgaagaagggtatgttctcaatgatgaactacttcttgccactgaaaggtatggcttcaatgcactgctctgcaaacactgacaagaacggtgagaacaccgctatcttcttcggattgtcaggaactggtaagacaaccttgtctaccgacccaaaacgtttgttgattggtgatgatgaacacggatgggatgacaatggtgtattcaactttgaaggtggttgctatgctaaggtgatcaaccttgacaaagagtcagagcctgatatctatggagctattaagcgcgacgctctcttggagaacgtaattgttgacgaaaacggtaagattgactttacagataagagccgcacagagaacactcgtgtatcttatcctatctaccacatcaagaatatcgtaaagcctatctctgctggtcctgctgctaagcaagtgattttcttgtctgcagacgcattcggcgtattgcctccagtatctatcttgaacgaggagcaaaccaagtactacttcctctctggtttcactgctaaattggcaggtacagagcgtggtattaccgaacctactcctacattctcagcttgtttcggtcaggcattccttgaattgcaccccacaaaatatgctgaagagttggtaaagaagatgaagaagaatggcgctaaggcttacttagtaaacacaggttggaacggtacaggcaagcgtatctctatccgtgacactcgtggtatcattgatgctatcttgaatcactctattgatgaggctcctaccaagactatcccttacttcaacttcgtagttcctaccaagttggaaggtgttgctaccgaaatcctcgatccacgcgacacttacagtgacgcatcacagtgggacgagaaagcaaaagacttggctcaacgcttcatcaagaacttcgacaagtacactacaaacgaagctggtaaggctcttgtagctgctggtcctcagttataatacatttttcgcatcatagcgattaaagctggggcttatccatccatcgatgtgataagcccctttttttgttactgtcatttgcaaaccgtacaaaatacacaccatggacaaaacatccttgatgattcatccaagaatgatggcagccatcatcgttacaccagccgtttctagtgctgtctgcgcacaaaaaagccaagcaagtccatcacccaacgtcattgttatcgtcgcagacgacttgggatacggcgacttgcagtgctatggtgcacagcgagtgagtacacctcatgtggacagcctggcgcaaagcggtatcaggttcaccaatgcacatgccgtagcagccaccagtacgccatctcgctactcacttctcacgggtcagtatgcttggcgacgcaaagacaccgatgtggcagcgggcaatgcgggcatgattatccgtccaggacagttcactctggcagacttattcaagagcaaaggctacgttaccagtgctattggcaagtggcatctgggacttggcgaccaaacagcggagcaagattggaatgcaccattggctcaatcattgggagacttgggctttgactatcattatatcatggcagccaccagtgatcgtgttccttgcgtattcattgaaaacggaaaagtggctaactacgatccttcagcacctattgaggtgagctacaaaaagccttttccaggcgaaccgacgggtcagacaaaccccgaactgatgtacaatctcaagcccagtcatggtcacaacatgacgattgtaaacggaatagggcgcattggatatatgaaagggggtggaaaagctttgtggaaagacgaaaacattgctgactccatcacagtacatgcggtaaatttcatacgcgaaaactgcaacaaaccgttcttcatgtactttgcaaccaacgatgtgcatgtgccgagatttccacaccaacgcattaggggcaaaagtcctatgggattgcgaggcgatgccattgtgcaattcgactggtcggtaggaaaaatcatgcaagttctcgatgagttgggactgcgagaaaacacccttatcatcctaaccagcgacaacggtcctgtgatagatgacggttaccaagaccaagctgaagagaaattgggtggacaccgcccatctggtccttttcgtggctacaaatacagcgccttcgagggaggaactgccgtgccgttcatcgtgagttggcctgccaaggtaaaagccaaacaagaatctcaggctttggtaggccaaatagatcttatggcaaccctcgccaacctgctacaagcgcgccttcccaaaggcagtgcacccgacagccaaaatggattatccgcgctgttaggtacggacaagacaggaagaccgtatgtcattgagcagtcaagcgcacatgtactgtcggtgcgaacagcaaaatggaaatacatagagccgagcaatggaaacccgatgattacttggggacccaaaatagagacaggcaactgcccaaacgcacaactcttcgacatgagtaaagaactatatgagcgagaaaacgtggctaccaactaccctgacgtaactgacaagctggctcgcatcttacagacagagcgagaaaaaggtttcataccaaagcattaatcgttgagaatggacgcatcaaactatcgcttaaaaaaagaagggtacacactgtcacgactttcagtttttttgtaattttgcaactgctaacttgtttgtaccattagcggtatcttttcaagatggagttctaaagatttacaccacaaatagtataaaaatggataattttagatttcgcgttgttgcagaagcatcgaaaaaagcgcccttaaaaatagtaacaccgaaagagcgaccttctgcatattttggcaaatatgtctttaatcgcgcaaaaatgcaaaaatatctgcccgaaaatgtattccaacaactatctgatgtgattgataatggggctcacttcaatagagccatcgccgatgcagtggcaacaggcatgaaacagtgggcacaagaaaacggggttacacattatacacactggtttcaacctctcactgaaggcaccgccgagaaacatgatgcctttgtagagtttgacggcaagggaggaatgatagaagagtttagtggcaaacttttgatacaacaagaagcagattcctcttctttcccgaatggtggcattcgcaataccttcgaggcacgaggctattcggcatgggatcctacttcacctgtattcatcgttgatgacaccctgtgtattcctaccattttcatttcttacacaggcgaagcgttagactacaaagctccccttttgcggtcgttgcatgctgttgacgtagctgcaactgcggtgtgtcagtattttgatacacagataaaaaaggtacacactaacttgggctgggaacaagaatatttcttggtggatgaagatttataccatgctcgtcccgacttgatgctaacagggagaacccttatgggacacgatgctgcaaagaaccaacaaatggacgatcactatttgggaacgattccagaacgtgtgcaagcctacatgaaagacttggagattcgtgctctcgaattggggataccctgcaagacgcgtcataacgaggtggctcctaaccaatttgagttggcacctatctttgaagaatgtaacttggcgaacgatcataacatgctgttgatgtcgctcatgaagcgagtagcacgcaaacacgggttccgtgtactgctacacgagaagccatttgcaggcatcaatggtagcggaaagcacaacaactggagcttgagcacagatacgggcgtactcctccacgctccgggtaaaaccgccgaggacaatttgcgcttcgtggtgttcttggtagaaacgctgatgtgtgtatatcggcataacggattgctcaaagcctcgatcatgagtgctaccaatgcgcatcgactgggtgccaatgaagctccacctgctatcatttcctcctttttgggaaagcaactctctgatttattacatcatattgaggtagccgataaagacgatctctttaccttaaatggcaaacaagggatgatgctcgatattccagaaattccagagttattccttgacaacaccgaccgcaaccgtaccagtccttttgcatttacaggaaatcgctttgagtttcgtgctgtcggttcagaagccaactgtgcttgtgcgttgattgtgctaaatactgccatggcagaggcacttaatgactttaagcaacgcgttgatgaactcatcgtaaagggcgaagacaaaacatcggctatcattgacgttctgcgcaaagatataaaaacctgcaaacctattcacttcgatggcaacggctatagcgacgaatgggtagaggaagccaaacgccgtggattagactgtgaaaacagctgtcctatcgtgtttgacagatacttagacgaagagagtatcgagatgtttgaaagcactggggtcatggcacgcaatgagttggtggcacgcaatgaagtaaaatgggagatgtacaccaagaaaattcaaattgaggcacgtgtgatgggcgacctcacgatgaatcatgtcatccctgttgccacgcattaccaaagtcaaattgcggagaatgtaagccacatgttcaacatagtcgatcgaactgaagcagaacagctcacttgccgtaacaaaaagattattagagaaattgccgagcgtacgcaacgcattgagacaggtgtggaagaactgataaatgcacgtaagatagccaacaaaataacctctgaacgcgagaaagcgattgcctatcacgataccgttgcgccaaagatggaagagatacgttatcaaattgacaaactcgaactcatcgttagcgacgagttatggacactgcctaaatatcgtgaattgctatttattagataaaaagacacataccttattataataagaaaagaaacagaggggtttgcggctcgtatcgcaatccctctgttgttgtattgaggctggttctataaattaccaccgcacttagtcattaaatgtttatgaaatacgttttgttatcttttggcttctttttggttcaaaatgtaagttcgttcagtcgtgtagctcgctacactccttcactctcttgcattttgacctcaaaaataagctcaaaatctaacaaagctaatttatagaaccagccttgaagcaatcgcaaccccgtaggtatcaccgcaaatcctatcaatccagaaaattatccttgctttctccccataaaaacgtcttgaaaaatagcaggtggttgggcatgtagcgtgaggagttgtcccgaaatgggatgctcaaaggtaatagaagtggcatgcaggtaaagtcgattggcatgatgaccatagagtgggtcgcccaagataggacagttgagcccttctgcatatgcacagtgcatgcgtaactggtgcgtcctgcctgtctcgggaaacaaagctacccaagttttaccttgtcgtacacctaacacacgataggaagtcacagcctttttgccatgctcccaatcaactacctgccgcggacggtcaaaagggtcaggacgaaggggcaacgtaacaacgccgttccgctgagataacgctccttccaagatggcaatatattccttttgtatatgatgtgtcctaaattggcgttgcagatgacggtaaaccaagctgttttttgccaatatcagcaaacccgatgttgccatatcgaggcggtggacggaaaacaactcaaccgacgagggcatctgacttcgcaaaatggagtagacagaagggcgctgagaacgtcccgggacagaaagaatacctgctggtttgtccacaacaatgagggcatcgtcttcataaacgacatgaagttgactgtgttgctcttcgacagactgctccgcatccaccttcaaaccttgcaacataaaagaaagaatgggcaggcacttgcctcgacaagcagggtaaaactgcccgtgatgacgtacagaagtcttaggagaagcgccccaccaaaattcagcaatgcagacaggcttcaaacggtgtagataagcatactgcaaaagcttgggcgcacaacactcccctgcacccgctggcggcacaccttgcgctgtttgggcaaagatggcaaggaggttacgttgctcccccttcgcattcaacatgacgaaatgtgagaaaagccagcgttgtaagtcgtccgataaggttcggcgtagtgcttttgcatcttccatttgttgctcgtgttcgactaataattgcagaagcggtgtccgttctatgcgcaaccgctctttgagtcgtttatattctgctttcataaactggctctccttgataagggcggcttgttgttctacactcagagttaattctctacgcagttggtcacgcctttttttggcgactttcatttcttcttgaaacaatgtcagttgggcagctgccttttggtcatattcctttaactttgttttcaacttttggtagtcctcatcaacctctaaacacttaacccttgcattgatttgggtaatgaaagcctcttgtttcttaaaatacccttgtggctcaagataatcaaacaccgcaggcacaaatccatgccaattgctacgtccaccgatttgccccgagtaagcagctaaatagcccaatgaatgttgggtatcttctaccaccaaaacgccaaacatctttcctaatgcaatctcttcctgccataccggttgcgatgagacataccgctgcaactgctccgttgccaaaagagcaagcggatgcggacaataattgaacggattgttcaattgctggggacgctccacggtggtgctaagtggatgaaagcaatgagcttcaaaacctttgtctacggagttatcacgttgaatcatggaagtgtgcataaaaggcggttgatcaaaagccatgactgtgaagcgaaacaaactcaaagtaacggctgaaattttctaacccgctacaaaagtacggactttatacgagataccaccgcattcacgctttattttagggttcaccgcacggccctttcagttgagaaagggacttaaatatgaaaaaatctttgttctttggctcccactataaatttatcgcatccaacgaatcgcattgcttgcttcgggcatggcagatggctattgaacaacgaacaaacaccaaagagacaaaaatatcgcttgtacaaggatgttgggacactcgactacgattgcacagtgttataagggatgaagttaaggactaacgatagcactcgcgaaatcatgtttttgtcctgttattttaccaaaaaacggtcatctaaaatctgcgaaatagaaaaaatcaataggcaaacgacctgcaaaaatgggctgattttaacaaataaaacgtcgattgaagctaaaacgttgagtttacgctcttggaaacatgtattagaggtgttattcacatgcttcaacggcattaaagcatgcaaatagcaggcttatctcaatgctttagtcgcaaaaaaacggtaaaaatggggatgaaaagaggactataaatcgtaaccatctcaataacaacaaattacgaacatcgctcataactcgcgtatttgcgaccaactttgccgttggatgatttcacgcgagttatgagaggcactttgtaaagaaaattcagcattaattaccctctcatgcagcacatcaccaattttacaaatgcggcagggttggtggtttttattataaaaatctcgctcttcaatgaaagattggtacctcaaaacgaggtgcagaagaaagcatgtaaaactattcaaaatttacaatcacaaatattttgataataggttttcttcatctatctttgcaaagcaaagactcatcaaagacaactccctataaggaagttgagaaaacggagaacgaagttttgcaaaaacaaatcaatgatcaatgacagacatgaaaaaaacgggtttaaagaatccttttagcgcaaatgagctaaaagattacgtattcatcaccatcgcgatgatgttttattgtatcgggtggacaattttcttgttacctaatgacattgcaacaggtggcgtaccgggtatttcttcagtattatactggggattaggaataccagtacagtatagttattttgctgtgaatgccatccttattatttttgctttacgcatattgggactgcgtttttgtatcaaaacgatttacggcatcatcatcttgacagcccttacttcgctggtacaaacgtatatgaaagacgtctccttattgagcgaccaaccttttatggcaagtgtcatcggcgccgtattctgcggctcgggagtaggcttaggattatcagccaatggtagtactggaggaacagatattgtggctgccatcgtgaacaaatatcgcgacatctcattgggacgcgttattttactttgtgatgtagtgattatctcttccagtttcttggcattacacgattgggagaaagtgatttacggatatgttgtgttgttcatcacctcgttttgtgtagaccaagtggtgaacagtatgcgcaggtcggtacagttcttcattatctctgacaaatatgaagagataggtcgacaaatcaatgaaaatccacaccgtgggtgtacggtcatcaatgcacaaggattcttttcgggtaaaaacatgaaaatgctgtttgtattggcaaagaagtctgaatcaaacaagattttttatctcatcaacgaaatcgaccccgcagcatttgtatctcagagtgccgtgattggcgtttatggagagggcttcgaccggttcaaagtgaaacacaaaaaaacaaaccaccacaagggcatcgaaccaactgcagtagacgtaagccccacgccaatcgaagaagtgaacggataaacaaggtggggacgaccatagcaataaaacgatatgatgtagatttagaaaaagaagtaatgaaataaatacaatttttgttgcaatgcaaggataaaaatagtatctttgtagagtagtgccttctgctaacgttatcaacaccgaaaagtagggacacaagcgtagagacgcataaaatacgaaaacgtttacgattatacaaaaacattatgaagaagaaatttatttgtaccgtatgtggatacgcatacgcaggagaagctgcaccaaaagagtgcccagtatgtcacgctaaaactgagaagttcaaagctttcgatccagaagctattaagggaacaaagactgaagagaatctcaaggctgcatttgcaggcgagagccaggctcacaccaagtacctctactttgcatctaaggcaaagaaagaaggctatgagcaattggctgctatctttgaagaaacagcacgcaacgagaaagagcatgcaaaggtttggtataagttcttgcacggtggtgacatccctaccacaacagacaacatcaaagaagctgccgacggtgaaaactatgagtggacagacatgtatgtgaacatggcgaaagtagcagaggaagagggcttcccagagattgcagtgaagttccgtgctgttggtgcagttgagaagcaccacgaagagcgttatcgcaagatgttgaagaacatcgaagacgagattgtcttctcacgcgatggtagctgcgtatggcagtgccgcaactgtggacacatcgttatcggtaagaaagctcctgctgtatgtccagtttgtgaccatccacagagctacttccagattgaaccagacaatctgtaagtcgacagacataagacaaacgtcaacgagagatactgctttttaagtatctctcgtttcttttgttgcgtacgcatatggtgaacggaacaaatgatcaaagctaaccaaaagaaagatatctgcgagaaaacatgacagaggacaatgcatgagagaagaaatcaagcagataatgcagacatcatcgtaaaagggtgcatcataattcgtttttacgatgcacccttttgatataaataagtaatctatcaaatttacttcaatttgcagtagccatatttagccgagcagcaaagttcttcctcgatgcggatgagctggttgtacttcgcaatacggtcggtacggctcatagaaccagtcttaatctgacctgagttagtagcaacggcaatatcagcaatcgttgtgtcttcggtctctcctgaacggtgagaagtaactgtggtgtaaccagcacggtgagccatttcaatagcctccaatgtttcggtcaacgaaccaatctggttaaccttgatcaagatagagttagcagcacccatcttgatacccttctccaagaacttcgtgttggttacaaacaagtcgtcaccaaccaactggcaacggtcgccaatcttctcggtcagcttcacccagttgtcccagtcgttctcatccaaaccgtcctcgatagagtcgataggatattttgtaatcagttcttccaagtatgcaatctgctcttctgcggtcagtttcttaccattaggatcctttggcatgccactcttcaactgacgatagtcgtagaaccactcaccattctcctgaacagcaaactcagaagcagcgcagtccatggcaatcttcacatccttacctggctcataacctgcatccttgatagcctgaatgatagaatccaaggcatcttcaataccatcgaacttaggagcgaaaccaccctcgtcacctacggcggtagacaagccgcgcttcttcaacagctttgccaaagcgtggaatacttctgcacccatacgaatgccttctttgatagaaggagcacccacaggacgaatcataaactcttggaaagcaataggagcatcagagtgtgcaccaccgttgatgatgttcatcattggaacgggcaacgtataagtgttcacaccaccgatataacgatatagtggcatgtgaagagctttggctgccgtgtgtgcaactgccaagctaacacccaagatagcgttagcacccaacttgctcttagtaggcgtaccatccaagtcaagcatcttataatctatcttgcgctgttctaacacgcagcaacctttcaaggctggagcaatgatgttgttcacattctctacggcttttaatacacccttgccaccatagcgagctttgtcgccatcgcgcatctccaaagcctcgttctcacccgtagatgcaccagatggtacgctggcacgacccatcacaccattttccaatgttacctcaacctctactgtaggattaccacgagagtcaataatctctcttgcgtgaactttttcaattaccataattaattatttattttgaatgaataatatctctgaattcattgcaaagataacgataattaaggaattcaccaatacagagatatgaaataatgtgaaatgaacaacattgagctttgaactttgagctttgaacattgaactgtcaacttacaaacttaaaaactcatcaacttgtcaactcgtcaactcgtaaccttgtcaactaaacaatagctttatgctattaactcgtgaactcgtaaacttgtcaactcgtcaactaaacaatagctttatgctattaacttgtgaactcgtgaacttgtcaacttgtcaactaaaaacttaatctatcacctcgtgaacttgtgaacttgtcaactcgtcaactaataactaaaaacttaagctatcaacttgtgaacttgtcaactcgtcaactatacaaacacacttgctcccgcagaacttcacatgaagtctgcgggagcaaagtaatatatgtttgttcaattgagcttactcaatgacaatctttgaggtctgcacattcgtgccgtcggtagccttgatgaggtacacacctgaaggaacttgtcctttcagcttcttcgcatcaagaggcaagctgaaggtacctatcttcgcaccagagaggttgaagagttctgcctcacccttggtcaaggtaatagaaacgttatcaatgcctgtcacagcacccatcaccttcttaaagtcagtctctggtgtgtcggcgaacataaagcgatcatgctcgatgccgtcaaccgttgctgtgaagaagtaacgtgccttaccgttgtcgaacggaatcacagttttattcttcaagtcaaccaacttcaagttctgatagttcagactccatgcgttcagctccatgttataggtgtcacccttagcggtttcaacgctaaacttgcttcctatcaacgaaggcaaactggatatctgtacattcttaccgtcagaggttgtggcaaatacagaaggttcacccatgttcagcttctcaccctccaattgagagtcgtaagctggtgtggcatcctcttcctggtatgtccagaacttgtcaaccaccttaccgttatccattgttaccataacactaccgcggttaaagtcatcttccataacaaatgacttggcgcgcaatggttcagcctcagacttcaatcccgcgtaaggaatggtgagtttacctgttgttgtgctgaacttcgggttgttgtatttcaccatgaacccttgcataggtgacagtgttctggtaacaccattctcacctgccttgccaatgttcacagcttcatagccacccttgccttttacagactgtccattctggttcttccattcatcccagctacctgtggtgtagatgtaaaccgtgttgtccatgtccacaccagtctcgccggattctaacttgattttattgatgtctacaccagccatgaacgagttaccaacaatgttgtaacctaatccgtaacgcttggcgttttcttctgttgccttagaagcagtaacgacagatgcctgacgtgtcaactcgatagtttgctcgcaaagattcagtttaccttgaatcttgtgaacaccgttgctgccatcttttaccggagctacttcgtagcctatgaaggctttcatcttgtcagtgttcttcactgctgtccacttcctgtagtagtggtcagcatcgttcagcttctcatcgtatgctcgaacccacattccttcgaaacttggattcttggtagtctctaccactggcaagcctatatactgccagtcaaactcattcaataccggcttgttgtagtctggagaggtagtgtccttgtcatctgtggttttgcgtccagcgacataatcacccaacggtttgaactcaacagtagcaaatacagtagaagcgcatgggtcggtgttgttcaagatgaacgtacccaccttcttgccgtcgtcggatgtcttcatcacgagtttgtccttgtcaccgtctgtggtgaagccttccacgctcttcacggtcaaaccaccatcagcgggaactaccacagctgggtgaccagcggtcttggtagtagcatccttctcgaacttctcgtttggagcattgttctccaacttgtttgcagagataaacttaccagctggcaagtgcaggtcgcgtacagctaccttacccttggcatcaggttggttgttagcaaagatgatgttctggccgtccttaggaacgtcgttagtccagttctctttcttgttgaagtcgttgtccacgtctccagtccaatagttgttgccgcaggcattcacgttggaatcgtaagcagaaccagaaccctgtccttgcgcaccatccttgtcggccttgccaccggcattcacagctacaggtacaccgtttgcgtctacttcgcctgtgatgcgtccttgctcgtcaaccatatcctcggttacgttgtcgccaccttcaatggcatccaaacatccgtcgccgtcgctgtcttcatcaaagaagttaggaataccatccatgtcatcgtcgcaaggcaacataatggtaacgagtgtgctcaccataccactttgatctggactttgcgtaaagttaaagtacttggtgttaggctctgcattaaggtgcgatagtcccactatattcgtcaggttggcatcttcgttgttgaagattaccttcttcgttccctcattctcgaacaccgtataacggtggtctgtgaggtcagtatatagttctgtctgcgactgtgtgtcagagttggtcagaacattgattgcaaagtagttgtcggcatggaatgttgctttcggtgtactttgcatcagcacgtatggcttcattgtaccgccaatctcccaatagctagtgagcctgttttgtgatgatgccgtcatgaatctgtcctcgtctatcaagcagtcagctatcttcactacaacagcacctgagttggcagcatatccaaacttatctgagatatcgaaagtcttctcgcctgtgaagccttgagttacccctagtacagaaggtaacagtgtgagtacacggcgattggtctctggcttgtcgttgaggtagttggggtcgttcaccattgtagcaaacaacttctgcgtcttcacgttctcacgatagcgcacccacttgccattggtcgacttgagctcgttctcagtaagtgccgtgaggttgttaggagccaaatcgttacactctgtggtattcaagataccatccttatcccagtcaaggtcatcactgggcgcatcgcatccctcgaagaaaatctgcgcacccaagttctgcgagaactttcgctgctcgttgtagtcgccatagcagtcgtagtgatattccatgccaaagtggtcggtgagtttcttcacgatgatggtgaaggtagctccctcctcaatgtatttgctttcaatgagctttggacctctaagaataacgctgtcgggatattcccatgtaccctcaatcttcttctcacctgtcttcacatatccaatggtgtcaccattctcgatgatgggttgatcgtagtcgtagataggcagaacgtagtctggtgtcctgtacttttcttttgacgtctctactgtagcatcttttacgattctcttgatgtcacgacctttctgtttccatatgtcataggtaaactgatatggaccttcaccaccgatactttggaactctgcccatatctgcttctcagggtctttctcatccttcaccttggtgcagtaagtggcaaatgtggttggacgttccttgttggtaatgatatctgcgtgcggtttagttacgtcaatatcctgacgctcatgaatttccttacagtccaccttcatcccggggttctgttcagtaccctgctctgcatcagtaggggctgtgtagccctgtcctgctatcggtgcaggtgtggtgggaacattggggttgtaagttgaggaatactgtacgtctggttctgctttccatctggctttaccagctattcctatataaacactctcggcacattgaagtttgcttttttgagcgcacataatgctataattattcttgagagcacctatatctgcaccctgtgtggttgttgaaagcttgccagcatcatccaaacattggttgttgtagaacgtacaattatagatagagtctacaagaaagtaatcgcctgtcactaatgctgatgacgatcccgcatagatacaacctccagcctttttcgcatatgaaatgttattaacaaacgagccattcttgaatgacacgttttgatgctggttggtgaagatgtcagccacacctccctgtgctgaacccttgcctgttgtgtcctttgcttcgttaccatagaaaatatccttgtctgaaacaagacctctgcgcgcagattgtgcaatatttgtcacatcttgtacttggaacacacctccaacttcggctttgttactgtagtaacggttattctctgaatgaacataaccagagtgataccaaactacgccaccacctccaaaagaggtattgttaataatggtattgttcctaagctctacaccagcgcagccaacgttcatggaaattactccaccaccattaccaccagtcttataaccttcgcaagaattgttcttgaatatgctgttgctgatacgtaccaaacaaccattggtgtccattccgatgacaccaccgttcattttcgatgtattatcctcaaatagacagttgtcaaagtcgattgtcttgtctgggttgccaccattgtgatacatacttacagcaccaccgatagaacctgtcttgttgccaaagaacttacaattgacaaactttccatagcctttaaagatagcaactgcaccaccgccagcattagttattgcttgcggacagtcgcattgattatccttaaagacacaattgcggaactcaaactctttttgtgatcttatctcgatagcaccgccatccttcttattgctattttctccaaaatagctaccttccacggtgaatttggaagcatcagccaaacagatggcaccaccagcacctgtaccactgtcgcctttggtgttggctttgttgccacagaagatagagttcttgatatttaccttaccggcaactccaagccaaagggcaccaccctcaaatgcggttgtattgttgttcttaaagttacaattctctatggtcacatcgcagggcattttatcgtttgcagccttgatagccacggcgccaccatcgccttttgccgatgtctttcctgcattattgccgtagaactcatcgttcttgaacacgatgctgcgcttcttgcttgggtttgtcttgtctattttagatgcagcttgcgaaccatcgtagatatagatcgcaccgccaacatcaccaccgaagttattgtaaaagctgttgttctcagaatagaagttcacgaaacttgctatacggaacaatccgccatctccacctttagagttgtggaagttggagttggtcacacgaatatccttaaatccttcgaagaagaatgtaccatgctgcgaagaggcagttcctccactggcacggttcacctgcatgtggtctatctttacataggcattggggttctcatcccatgtgccagcgttggtccatccgatgactgcaccctcttgtgtcacacctacatgttggatgtcgtgaagcgtgatatagctgatgtcaatctgcgagtttaccttgttgccagtggtagatgctgtaagaaatccaccaccatgcccaccgaaactctcacctcgtatcacctccacacggtgcatgcgaatctttgggttcttgatgtttccatatacgaagatggcacccgcacccgatgaacgatagtacgatatgcgacagtcttccaaggagaaagtcacgttgtcaaggttattgttgtcgagcgtgatgagcgagccattgtaggcattgcccacgaagtttggcgaattgaagctcactccctgcaacgcaagtttctggttggcattattggttcggaacaccgattgggtaatcttcttggtggctaccaattctgtgacataagctttggggttgttgctacaagtgtcctgcggcagcgtctgtgaacctggtgtggggaatccaccatagatacgcagactctggcccttgcgagtaagtgtgtagtagccagcctgtcctttcccacctacgggattagtgtctacgttgtacttaccttctgccatatagattacggcatccaggttggcgctgctgttcaccgccctaagtgccgcatcgagtgtcttgaaggctgcgtgccacgacgtaccattgcgggagtcgttgcctcgtttctgcgacacatagaacttaatcggatctgcctgtgcacccagtgccatgaagcacgtgaggagcagcgtcagcagatgccgggttggtaataaatgtttcatgtttttgtttaattttagttttttcttttttttgttttctacttgcttgccgtgtgccgcctgcgccatttgttgggcatagggaggcatcgcgaccttgaggtttaccactgcatggtgaactcgtcgtcgtcgaaatcgtcaaaatcgtcgaactgtcctggctttgccaactcgtcttcatgattttcactggcgaaaggaagatttcctcctgttccaggatctcctcctgcttgcagtagcaaaattcccggacttacatacgttttttttgccatattcaaatttttgttttaataaataaataagttttctatgttttgctgccaaatatagctggcacattcttctctttttacatacgtctatagccgaataaccgcccaaagtatctgtcgcacattgcgttgtctattcagcattaccgtcatcctattttgcatataggtgtcatgggtgttccatttctatgctttgtgcattatatatataataaggtagaatgacgtgagcgcctcatcacctgatagttacaaaaagctcgtattttgaacaatacaaaagtaatcaatacaaatggcgtaaacgcacgaaaaaatatcaaaacgacaaatatgtctatcttactcctttcattttgttaatctttattaaatattcacccaagttgttaatatttataggtatttatcaaatatacactttaattttttataactttacaaaaactaaagctgttctgctacaggctacaggcttaaaacatttggcgtatgaaattttataatctgaataaacaccgccaatgtcccaactacatagggtcaaaggccatgggttttgccttgttcaccggcatgcgaggtgaacgtgtaggcgatattctccccgtacccgtgatgatattcgtcataagtggtaaaataaaactttggttcaaaaaggacatcgaaacagttgtcaaagctggtgaaatggtgactgctgttttcggaaaggagtcgtatgtcaccgccatggaagatagtgtatgcatgcgactgtacgttcagggcgacggactggatttttgtcaccgcattgtcaattcggacttgttgctgaacggaagtgaacaaaaaggcgaacaaggcaaggtgttgcccatgatacccgagatacaagccattatgcgacaaatgacgggctacatcaccgacggactgatgtgctgtaatgtgcatgccatgaaacaacaggagttagctgcggtactgcaagcttattaccgttcggaggatttgctgccctttattgctcctatctacgatccgaatgcgcatttctacaatgacgtgatgaagttggcgggcgattatctccctgtgaaagaaatggcagcaagactcaacatgagctacccctcgtttgtccgacactttcgcaaggtgtttaaggagactccacaagcatggttatcgaaaactcgcatgaacgatttgagaaatctgatgcgcaataccgctcgcacagaacaagaggtggcggatcaactgaagtttgcatcggtgcaaagcatgcgctctttttgtaaaacacgctgtggcatgaatccctcgcagttgcgagagcaatagtgttttctcgccttttcacaccatcaccttgtagattgggtgaacaacgaaagacacaaaaataattaaaacgtgagtttatcttgcaaaaaattgtctcgcaaatttcgcaaataacgcaaatatgattgtaaagcagcaaagacaaataacacaaaaatacattgaactttgaacgaggtaacagcaaagataacaaataaatacaaaaaaaaccgctaatcattttgcggtatcaatataatttgccacctttgcaggaactaaatctaaacgaaaaaaacattatggaagaaggtttacgagtgaaagaactcgaaaatgtagtagtccgcttttccggtgactctggagacggaatgcaactggcaggtaacatcttctctacagtatcggcaacagtgggcaatcaaatctccacattccccgattatcctgcagacattagagctccgcaaggttcattaacaggcgtgagtggttaccaagtcaatgtaggagagaacgtttacactcccggagacaagtgtgatgtattagttgccatgaatgccgctgccctgaaaacacaacgacagtttgccaaaccaacagcaacgtatattattgacacggacaactttaagccttttgacttacaaaaggcaaagtttgcaacacccgactacttaaaagaattgggtattgatgtagacagcgtgatagcatgccctttgacaacgctggtaaaagcatgcttaaaggattcgggcatggacaacaagtcaattctcaagtgccgaaacatgtttgcattgggtatggtatgctggttgttcgaccgcgacttgcaactcgtgaacaactttttacagcagaaattccacaagaaacccgctgtcttagaagccaatatcaaagtggtaagagcaggatatgactacggagccaatacccatgcgagtgtgcccaacacctatcgtattgagactcgtaacaaagtgccaggccgctatatggacattacgggaaataaagctaccgcttacggtcttatggctgccacagagaaggcaggtgtgaaactctttttgggttcttatcctattacacctgcatccgacatcttgcacgaattggctaagcacaagtcgatgggcgtcatcacgatgcagtgcgaggacgaaatctcaggttgtgcaacatccatcggagcctcgtttgcaggagcattgggcgttacttctacctctggtcccggtatctgtctgaaatcagaaggcatgaacttggctgtgatggacgaacttccattggtaattattgatgttcagcgtggtggtccctctacaggactccctacaaagaccgaacaaaccgacctactgcaagtgctttatggtcgcaacggtgaatcaccaatgccggttatcaccccaacgagtcccaccaactgcttccatgcagcctatatggcttgtaagatagcattggaacacgtcacacccgtggtggttttgagcgatgcttacattgccaatggctcatcggcatggcctattccacaaatggataagctgcctgcaatcactcctcaccgtgtcacccccgaacaaaaaggaaactatactccttatcaacgcgacccagaaaccttggttcgctactgggctactcctggaatggagggttacgaacacattataggtggattggaaaaggactcggaaacaggacaaatctccaataatccctctaaccaccagcagatggtgaacaacagagcagaaaaagtggctcgcatcccagtgccagacctgaaagtattgggcgaggcagacgatgccgacttattggttgtgggctttggtggtacctttggacacctatacactgccgttgaagaattagtgaaaagtggcaagaaggtggctttggcacattttgaatttatcaatcctctgcctgccaacaccgaagaagtactgaaacgctacccaaaggtagttgtggcagaacagaacatgggacagtttgccagctatctacgtaccaagatagacggttttgtgccttatcaatttaaccaagtaaagggtcagcccttcgttgtggctgaactcatcaacgcatttgaacaaattttggagggaaaagcatgacagcgtttacagcaaatcaatataaaataggacaacctcgctggtgtcctggttgtggcgaccatttctttttagccaacttacacaaggcaatggcagaaattggcgttccaccccatgaaatcgccgtaatatcgggtattggctgctccagtcgtctaccttattatatgaatacgtatgccatgcaaaccattcatggtagggcggcatcaatagcatcgggagcaaaggtagtaaatccagacttaaccatctggcagattagtggtgacggtgacggtcttgccattggcggcaaccactttatccacgccttgcgccgtaacatcaatatcaatatggtgttgttaaacaaccgcatctatggtcttacgaaaggacaatattcgcctacatcgcctcgtgggtttgtttctaaatcgtctccttacggtacggtagaagatccgttccagcctgccgagctttgttttggcgcacgtggacgcttctttgctcgtgctgtagccaacgatggtccaagtgtgatagccgttctacaagctgcctatcaccataaaggggctgcactgtgcgagatactgcaaaactgtgtcatctttaacaacggtgcttacgaccctatttacactcgcgacggcaggaaacagaatgctatctacgtggaacatggcaagcctttgctattcggtgagaacaatgaatacggactcatgcaagagggattcggactgaaggtggtgaaactgggcgaaaatggcattaccgaaaaagatattttggtacataatgcccacgaagaggatagcacgctgcacgcaaagttagccatgatggacaacgaacatggtttccctgttgccttgggcgtgattcgtgatgtggaagcacctacctatgatgatatggtgaacaaacagatagaagaggtaaaggaaaagaaagcttatcacaactttaccgaactgctggaaacaaatgatatctgggaagtgaaataacatccacctttttgcgttatcgcaaagagataaatgaagaaaacagactgttttggaagacaaaataaactattttgcctcacaaaacagtctgtttttcgttgctactctctccacttaatgattataattcgtgcgcacaaccatgaaatctgtgtcatctgcggagtttgcatggacgatttctcgcataaattgcttctcttcaaaaataggttcgcatgcattatttttctaaaaaatgcgctcgcaaatgacgtagatggcgcaaatagcgtgccttcatactctatgcgatataggaatgaaggcacatcgcttttatttgaacaacgtacaaaagaaatgaaacaccacagagagggcaacgattacttcctttgcgggaagaaagtagcgcagatatgctgcaaataagcttgagctgccttgagatgagccgccttagcgtttccttgactgacggccacccacttacggttgatatcatacgtcaccagattcgcttcatccaataagcctaacgtatgaggcgccgtgaagaatgcaaaatgaggtgagttaggattgaacatgtctttactgtattggaacatctgatgcgataatcccaactgaccacataaggtggcaactaaatcagtttgtgaaccgtagatatctatgtttccaggacctttgagcgcacccccgaggaataataaaggtatatgatagcgatgtgtggacagaggattgctctctgttgggttgccacccacatgagaagatgtaatgacaaccaacatctccttccactgaggcaattgcttgagctcggtaatgaattgtcctacacaactatccgtgtaagcataacgattgagcttcttgttggttaagcgttgggacggaatagcagccgactcatccaaatgagcggtttgtatcaccttcaaccaaggctttacacctttgtcctgtcgcaggttgtcaaggaaataacggaacagatgctggtcgtaaactccaccctttttcgcacattgttgcttgtcaaactgtgccttagtggtgacagattgaaaaccaagggcacttaaatacgcttccttttgctgaatattcgctgctcctccatcaaggaaggcagaggtatatccttgcttgtgcagttcacgaatcaacgaaggagcgtgttgtccgccttcatcatgactcacagctattgcaggtgtgctggtaagcaaggcagagataccttcgtgagatgtcgttccactggcataaaactgtcggaacagcatgccctcggaagacagttgatccaactgtggcattacgtcttgcattccacccaacgaactcatgagctgagaatctataccatttaacaccaacagtaagatattcggacgtgcagtatttaagatccaaaacttgggcgcatggtattgttgatgaatcacatcagggtcgagcattctttgtgccaacttattcgcctcatccgcatccatgaagtggtaagaaggaatgctgcttggctgttcttcgcacggagcaatggttggtgtagagtcgaacatacagcgcaaggggttaagagaggcttgatacagttgtgggtggttttgaaaatcatcctgccgatttgctgtcaaggaatcatgagatgccaattgtcggacgggaagaataaaaacacctatcagcaacacaaaaagaagagtgaaaaaaggtttgttgagcggtaacagttttttctcaaaacggtcgttccgtagcatggaataaaacaaggcataaacaaaaatagccatgagaacaatgcccacgccaccgcctaaaattgcccatgcattcatgtcggagaacatcgattgaggcgagtgaaggaaagccagccattgagaagcccccaaatgtccacctaccgaacgaaagaaagccaaatccgtgatatagaccacggcgatgagtaaagagatgaagacaaaataaaactttgccaaacgacgccatatccggtttcgtgaccaaatggtgatgagtaaaaggatagcaggtatgagtgtaagagcagcagccacggataaatcttgcatcaacccatgccaagaaacctgccaccaatcgcgccatgtcatttctctaaacaggagccaatgatatagaatgaaaacaggtttttgtaccaaaaataaaagtacaaacaagaaataggtcaaaaacaaatacttaaaacgtgtgcgcatatcggtgtcagacaaaaaacatgattaaaacttgtgcaatgatgacacggatgaacatcccaatgggataaacagtggcataactaatactgggagtatcgccatcaatcgtatcattcgcataagccagagccatggggttcgccatcgccccacagagaataccgcaaatagtaccgtaatcgaacttctttgaacgcagtgcgaacaagccgatgataagcacaggtactaatgtgaggacgaagcccacaccaacccacaataagccttctggtcgaataaccgtatcaagaaaattctttcccgcatccaatcctaaacaagccaaatacatcgcaagtcccatgcgtcgcaacataagggatgccgaacgtgtggtataggaaataaaatgcatgtgcggtcccaatgcaccgaccaaaatacccatgataatgggacctcctgcgattcctaatcgaatgggagaatccatgccaggcaatgaaataggaatgctccctaacatcagacctaaaatcataccaaagaagatgctgccgacattaggctcgttgagggtttttaccgagttgcccaaaaagcgttctgcgttctctactgcctttggttcgcccacaacagtgagccggtcaccatattgcagacgcaaatcgttcgtagccaacaactttacatcaccacgaatgacacgactaacattcactccataggtctctcggagatgaattctacccaatcgtttgccattgagtacaggacgagtgagaacgatgacacgcgattcgacattagaatcgatataattccaatctatctgttcttgacccgttggcggaattaaaataatagataaatttatatgaaagaaaagttgtacatacaagaatttatttgtaacttagtgttgctcaatacattaagttataaaatcagtatgcacaacttatatacaaatttcgtaaaaatccttgatatatgcaagctattctcaaaagatttagtaaatgagcaaggtaatattccacgcccaggcgtcgttccgagatttagcgaccttgaaatagtatcgctttccatagtaagcgaggcaatgggcattgatagcgaatgcctgttgtttgctaagttgaaagagtatgtaaaggaaatgccgaaccttatctcacgccgccaatacaatgaccgtaggaaactaaccagcaatctgtgtgataccataagaaaacgtatggcactggaaatagatggtacagaggactacttctgtattgactccaagccaatcgaggtgtgcagactatcccgctccaagcgttgtaagatgggcaaagatgaatacagaacagcccctgcatatggttactgtgcatcgcaaggcgcatactactatggttataagttgcacgctgtctgtggattaagtggcgtgatacattcttttgacctaacaaaggctaatgtccacgatattcgttatttacaagacgtaaaatatgaatatcatgactgttgcatttttggagatagaggctacatcagtgcaacggcgcaactggacttatttgaaaccgcaaatatcagattggaagttccttatcggcacaatcaaaagaattggaaacctacttttattccttttgcgaaggcgagaaaaaggattgaaacagacttctcgcagatgtgcgaccaatttatgatttgccgcaactatgcaaaggaaacagtaggattgtttacaagaattatcggtaaaatcagtgcctttacggcaatgcaatatttaaatcacattaataatagacccattggaagagtcaagtatgcactggcttaattccgccaacgggttattatattttagcccacgcttcggctatgttagccttggcgtggacgattatacacaatatattttcatcaatcattgattatcagatgaaattgttagctttgagtatccctatcgtctgacatttgttcttgaatagtcttcccgtaaatataagggtgaacagaggacaggcgtatcccgttttcttttgcgagttccacaattcgcaatccacactgatcccaccaattctttacaaaattgccttcctgccgtttcgttttgcagaagccccatttctttccgatttggactatattgtaatcgcaaaattcgacggaacaacacgaaggtaagcctcgcagccactcaccaatttcatgtggcagttctcttattctgtgaagctcctttgtcctgctccagttaagaaattctgcaagtatcagccatatcttctccttatcagttttaaaagagcctgtgtaatcggaagtttcgatacactcctccaaaatatactgatattgtacctttttattcatgattaatcctcctctgcatactgttcctccaatttccatccgccgcaggcttctgacagttcctttaagcgtaggtatttccagcacttcctgcccttcctatcttcctccgggatattctctatttcggagtccaaccgctttttaagttcctcaagcaggtcagggattccgataccccttgaggcaaactcttcgtcccaatttacatcactcgtatcgtaagacgtggtcctgcagccacaaacatcatcatagtcgtcttctggaatataattgttagtggaaacggatgttcttatcgtgagggtctgtgtcacattacagtcaaactccacttccgggagctcaacctcgttatagggggctcttggatcattggcagcccccggtggataattgtcccaactcatattctctttttgtatattagttacaagtttttcagctctcgatgatttcgttaagggagtcaaccagactttcgaggtcgctgattccattatccatatcgtcgatatagccatacataagctcccccctttctgattcttgaagaccttccggcatattgtcgtaggcttcttgctcttcgtccctggtggtttcgagcctttctttcagggcttccagttctgcggagatactctccagttcttttctgcgatttttattcatcacttttttgttttaagttgttttctatctgtagttttatggccatggacaactctatgcctttatctccaaaagcttgggcctcgctgaactttcccgacttcagattgtatgtaaggcaacagaagtcgaaatctttggttctgatattgatacgtggattcccgaagtgcatatcaatatctacttttggaatgccatgcttttccaccgcctcatcgccctcaaacgccggcaaaatatactttacatagggaaacgcaagccgttcccctgtttcatgtttgtatcctatggaagctgcaacatttccccaaaaccgagactttgctgcatcaagttctccttttccaacgaggatatagccatgcaagcgaccatattcgtttgcagttttaattattgcttctgtaatcttcatgatttatttctttaaatattctggaacataacgcttgtgataggtacgagtatcgcgcttcttaattctcacgagctgcccgtcaagttcgcttcttctatatacccaacctgtcttttcagagatataccatttttcaggcgcagactgttgcttatgatattcgttgatctcctcaacgacttgtgctatgtctttcatcttgtcttgaacacttgttttacgatgttaatgaagcattcccgacgatcagaatggctgaacggcagttggcagcagtcatcttcttctgtgagctgaataaggaactccgctttgtctgtgtggcgtaactcattgaacagttctacaacctgattgaaattaccgttgatctggctttcgacaatataatcaaagaatctctgcccatttgcatcatcaaaatatatctgggcgagtttactgagacttttcttcattttattgctttttaaatgtgaactttatttctgggaagagaacgcttccgtatttctctacatactcttgaaaggccttctcgctgatggtctcatcgctgttactccagttgaacacgacttcattcttaaagccatagtagatatagtttcgggagagaatacctgcgtcgaggatacttaccgcaagttccttttctctcatggcagacgctatcttcgtgtcaaactctttgattgtgtcagctttcttttcggcaaccttttttgcatgcagttcgttcttccggcttagtatattttcttcagaataatacccttgagcaatcttctcctcgatagctgctgcctgttcctttgtcaagactgtgctatcaaagggtaccgacttaccctcatacggatttacccaaatatagccagtcattctctcaagcaatgcgataaactcgtctgcgtgtttcttccaacgctttaagattccgagagaattgagctgatatgcaaagaattctttttcctctgaagctatcaagagctgatgatattcttcttcgctaatatggaatatttccatgacctttgagcgatctaagttcttcaggtaatacacaccattctcaacagtgtgatggaatttaccctcaaaattgcaattgtcgaggtctaaaaatggaacaacagcaggaaaaaatttcctaacaaaatcaacatcatcgccactgtaataaaacacccagcgtccgttggctctgcattcctgctccactcgataatgaaaatcacatactccgtttttgcactcgtcatcaagcctcagatagagtttggtacgatagtttggcttatcagtttctgtaatccagtctgatataaatactaatttgttactttccatattaaaattggattatcgtcttatttgcatgaattgttaataatgtatagccagagttattgcggggatcggggctgttctttccccgtccgtgtaaagttcaggaatctctcttattcctgtgattatacatcctgcattgcagaattcccataatgtatattgcaatgtaggcgaagtaaaacttaaggaaaattccccgataccgaacctctgcattaaatcaaccaactttggaacttctggaagattgacatccttatagaagttcagaatgggactcccagaagaaacagagctttcgtaggcatcaaagatggtccactcttcgctcacgacttcctttcttttgttaggatttgaatgtatcaaatcaaagtattcgatatgctccatgcctatccgaagaaaaagattcctaagacgagttcgagagcgaacaggatgctaagcgtccagtcgttcataataaaatcataaagtttctgtttcatagtgtaaagtattaatacaattataactttttatctgccttacagttcatagaacgccaccttgcaatcctcaatctcaaaaaccgcattgggactttctgcgaagttatcctctccgtagataaacagccctgcttggatattgtcatccggacgaaaacttccttctgatttccttgcaccgatgtattctctgaacgtgatgtttttaggttcagtgaagaagtctatctcaatgtttgtcaaaccttggttgattgcatattcaagcgccttcagtgcccttttacttgcattactgtcttggatttgtgttcttacttgcatttttcttatattttatagttctactgccaattccttgacctctccatagcgtccttgatactcaaataactgatagaacctttcgcttccttcctgaattcccttctctgtgtaggtatgcttcttcaagtcttcagctttcagttgcttctcgttctcttttttatagtattcctgtgcgctgctgaggctcatctgccatgttctgaattcgtagtcttcatctggtgtcaatcccatgtcctgaagctctgcgcaaacctgactctctttctttcctttgagaaccagctttcctttgctttgagacaggatctctattccgagtttctttacgacactcttaatgactgggatgtagagcctgctccttacttctgttctccatggcatgtagctcgttggattccattttccttcttccttggctttctgttccttgagagcttttacttctgtcattttctcactcagcactccgaatgattccctgttcggatattcctcgtaaacccgcattgctttcgcttcggcttcttctgcttgatgtatttggaggtctattcctttgagttcctctactcgggcttctttctttatttctttcttgttctttttcatttccttttctgttttgattggtttactaatcttatttgcatatacaaagataatcaaatataatcatatctgcaaatatttacaggtattattttaatcttatttgttaataaatcataatcaaataaacaaatcaggggacgaaaaatgggcactcatcacgagtacccacattcctgaaattctaataccttaacttctaaaacctattgaaattactaattaataaattaatatatttctactctattttatagactacttcaaaacctgatattgtcgttttcggattgagagaatgaacttccacttttttattttctctccattttatcaatccgaacagcaggctgtgtttcttctgaaaactgatgataacaaggctgtcacgaattgaataatctataatgctttcccttacactatctatttctacattgatggtagcaaacttatctgcatagtgaatctccatcccaccgaaagcattatcttcagccttggcttgcactgtgtcatgggaatcagtcgcaactttctcaaccccggtaatatctttcgctttcacgccaatacttctgacgggggttatttcgtctgcgaatcggtctttgatgtttcgctgagtcaatccactgggcactgcaatgcgcccttcgacaatcccatttttggttttaaccgcaactttttcaggaaccgttccgatactgcttaccgtctttgccagtgccttggacgtactctctacttttctacttctctcataaccgcgatagagagcaacggactctgcagctatggctaccagcagaaccggcaccagcaaatccgatatgtgcctgtccttctgacctaacttcgaccagaaccaagcacctaaagtttgcaacaacttaaatatcactttcatcatcattatttcttttcttccttccaaaaatgccctttactgctccaaagaaggtcttgaacaactccttaacatactctatatatgcggatttgtcctttccatccagtaccgcctcattctccatgatgctcgtcgtattctctatgacgaacagaatcatgaacagtagtttgagaacatcgaagaataagaagccaagttgctccacaaaggtactcgggctctcaaattcgtttctgaagctttgggcacaatgaaagagagcaaaccatatagcgatcttgataacacaacggctgaacttgaaactttcaaaagcctttccctgcttcgcacttgccctaattccagtccaaatttcggtcacgataattattgctattgcaggtattaaagctggagaaatacccaaatagtgtacaaagagggcagatatagccgaaaggcttacactccctccaatcattccgtacttggcggatggaaatagtgacagcataaattccttattagaaacccatccgtatgtggacaggaaccttcgtatcgagttcaatagagatgacatagtgcgcggttttctacaaaaatacatttattggaaagaacacaataaaaggggtgcatagaaaagactgaaaatcactttcagtgcagtccgccgcgcccctacttttgtttaattaattttattttcgtatgatatttacacgcctgtaaaattctaaatatagtgctttgagaatacaaccgacagctcctcaagaagatccgtctcttcccatgggaacaatttcacctcaacctccttaatattgccaaagttatcctcaaatgttttgcgaacacacttcggttcatgtccgaagtgtccgtaacaggaggtctcctcgtaaataggattctccagattgagcatgcttgttattccccgcggactcaaatcgaacagcttaacgacctcatcggcaatttcctcgtctgtcatatcaacagatttcccctttgtctgaacaaatatgctgacaggcttagatattccgattgcatacgcaagctgtacagtcacttcatctgcaacacctgccgctacgagattctttgcaatatagcgagcagcataagctgcggaacggtcaaccttcgacggatcttttcccgagaaggcaccaccaccgtgcggagcgtatccaccgtaagtatcaacgattattttgcgtcctgtcagacctgcatctccatgtggcccgcctatgacaaaccgccctgtaggattcacatgcagagtaaagtcgcttccaaggagttcttttgctatttccttgcatgagccctctggaatttttgcgacaacgcgtggaaatacgaactcacgaatatcagactcaatcacagccctttcttcgtcatcgagttccttaccactatacttttctgagaggaagtcatcgtgctgcgttgatataacgactgtatcaattcggattgtacgcatatcttcatcagtctcaaccgttacttgactttttgagtctggacggagataagtcatgacgctgccctcttttcttatctctgcaagaacctccaatatgagatttgaaagatataatgggaacggcaggaaagctggggtttcactggttgcataaccgaacatcatgccttggtctccagctccttggtccgccttgtcaactccctgcgcaatatcctgagactgtctgtgcagtccattaaggacacctacgctctgtgaggagaatccatagtcagctttcgtataaccggctttttttacggcactccgcaccacgtcaggtatggaaatctcagcattagaacggacctcaccggctaatactacttgccctgttgttaccaatgtctcgcaaccgacatgcgattttgggtcaaatgcgagataactgtcgagaatcttgtctgagattctgtctgcgattttgtctggatgtccctctgacacagactcgcttgtaaaaagtcttttcattgtctttattttggatagtttaaatttcttattcctggattgatcaggatttcgttgaaaaaattgtgtgcgattttcctcgcacgcctaaggtcatgaaaatagcagtttccacattcttgttcagttccgcccggcaatgctccctcgaagttcgcaatatacttgaacatttctttgattgcgggaagcacttcgtgagaggtgaaagcaccactcaagacaagatagaatcctgtctgacaccccataggtccaaagtaaatgatatttttatcaagagatgacatttgccttaggaatgtagccccaagatgttctattgtatgtattgccggggctggcattgtcgcatcttcataaggacgacagacgcgtatgtcaatcgtcgttaccttgtgaccaccataatcgtcaaatcttgaaacatacacgcccctatgtaaatccagatggttgaccttgaaactttcaatcttttccattgatatctttgattaactgcatgcacaggtcgaaggaccgctctgccatatttttccaaaaatcttcgtatttcgctttgtgaccagtagctccgacgagatcgctaatgacccgtatagggacaaatggtacaccaaacttgttgcatacttgagcaatggcaccggattccatatcaactgctttagccctaccacaagcgtgtaacgcgcgaagtctgtttgctccagtttccatgaaccagtcccctgacactatgggggcaaagaacacgttaaaataactcttcttgtcgctgtgcttcctttgaactcggcaaattcccttggcgatactttttacatccatgcacagaaaccattccggctccccttgtatttgtcctctttcattaggcttgccacaccaaacatcatgatacttcacctttgtgccgataactacattcattggctctacacgctcgtcgagactccctgccactcctgtgttaataatataatcaggatgttcttgggtgatgagcttataagtcgccaatgccgcattaacctttcctataccagccttgcataggacagcaggagtatttcctatatgtcctatgcaaaagccggtcgctgaatcgacactaatattttcaaaaacaccttggaccagttcatattccgcgtccatggcaacaattattccaacctttcccattattcgcaaccaaatacttctttctcgcttatagagagacgtgttacaggaacatttctcttagcagacatcatacagacaaaaattctaccggtgaaaagtaatttcaccctttcccaaaacgtaggtttccagcaggaaaccaccaatcctacactttcgtcaacaaatacagaaacggggagtccccctttttctaccaatctgttgttcgtctgtttgaaatctacctgttccattgtttttaaatatttggtctgacaataagtttaataggcacaaatataatcatttataaccatatattatcaatattgattagttttaacaatttattgcctcattttgttgctctgatatgaggtgtggtatcattcatggaacctgctacaagatttgtcccatataattatcgcattagaacctaatgattttatcattattatatttcaggcttccatattgaatgcccctcagtcttcggagccagccagaaagaaatactttctgtaatggattattcgcaacaagacgctccagatactgctttcgtctcagccatagctttttgaacagaacatgtgcgtcctgcccatttatggcgtttattgtcattgcaccaacaatgccgtcaggtttaacaccaagtagcctttggggaattgtaatgccgtactttccgctaccccaaacccagtccacaagcagatttgcaatgctctggtcttctatctcgtcagcgttccacctgttccaaaagtttagacgcataatcctcgttgcgtccgcgtccgtaatgagcttcaaatccctcacatcgatgcgtccgtcaccattcttgtcatatccctgacgctgccatgttctgatggtaacacctttatttgtcgccccgcccctgtctctggggtcattgacgaagccgccctcccaacttaggatgaacggagccaacacttctattcttgccatttttatgtattttagtttcttagaaatattccttccatgaaaaggtttttctatttaacaaataatttgaatcccattgattgtcataagcttctcgttcaaagactatcatgcgataggctttatgccatttcttatattttgccaatttgcatagaaaatcacctacatacagaattaggaaacccacatacagaagttctttccattgagctgtgtgtatcgcttcgtggttgtagtccacgtctcgcataaccgctcctttccggacaaagagcagcccgcaaacattcatcgctttatatccttttggtggtaataagtggttttcaataatcttcatactcatcttcgttttcaaaaataattgttgttttacgttgtacaggaaatacatttgattcaacatactggtaaacagtcaggtctggattagcaatgcccccaagaatattctcgtctttgaggtgcgccatggcatagcggtgtatgcttctacggatttggtctatagtaggcttgtgagggtactcggatgacgcaaatgtaacaagttcttttccatctggcgtatggccggcaggtacgataccgtacctcaccagccaattgccattgggaagttgctctatatactttagatcctctttcagacaaatattcatcacaaaaaaatcaaaagagcaccgataactccacctacgctcgtaaatagggcgtctctgaagtcgaaatttttcccaaggaagatatctattacttccttgataattccaacgacgattaccgctatcagagctaccacaaatgcgattgccgtttctctatggaacaatgccatatcgcccctgccgacaagataggccagtaacagaccgacaatcaggtgaacatacctgtccgccgtaaaagaacatatccattcggcgaacttctcataacactcataaatcttcttcataaattaatcttttaagatcatgcatttcaatttacagagccagtgatgacagtagaacgccgatgacagaagccacaatgccaatggcaatattggtaaatgagtaacgatgccctttgtcagcattaataagggtgtagataccctctccaaatccaacagcaaagactgaatagatggctgttgccaacataatgaaaccagttgttgcctcgtttttgtggttgagccagcaacacaagccgaacagtagtccagcgatggcgaacacgacggtcgccaaattctcctttttcttcataatttgtgaatttaaaagattaaacatataactaatatagaataggctgttacctcagcccagaaggtctcgtcttcacgcttgttcttagtcagcagtcccgaaatgacatagcagactacgggcagccatcccagcagcaggaacggctggttgaaggtaactatcacctgcgctgccacacagaacaggtatcctccgaaatagtgcagcaccttagcctcggtatggaagtacggagaggctgcgacagcccacagcccaaagaggctgataaacccaatgaactgccagtcctccggcatgtgctcgaagatgctcggagcaagcagtatgctctccagcccgaagaatgccgtgaacatccacgaggggaggatatacgatattgaggataccgacacggggttatcccctatcttcttccttgctaatccagcgtagaccaccgcaaggacaatggccataatcaacattacctttatcatagttcgagtttctttggataatcctttgtgaaatcatagccgacaatctcgtcgagggttttcagtccctctacggctgccttatggctggccgttacatcgaaacaagccgatgcgtaatactccaatgcgtacagcattttccttccattctcaatgctcagcccgataggggttattcctgcccacagagtcgtgtttgttttccccatctcctcctctgcattgaaacggacgataagccctgcacgcgtctgctgatcgagccaaagcggaataccgccataggtaaacgaattgacagcctccgaagtgtcgtatgcggttatctcccttacgatctgcttcttggcaaaggcgagaatgtccttggggaagaagcatacgtccccgacctcctgcaagtccccgacaacctgggctatctctttctgtgggataaagccgtctcccatcttttcaagcaatgccgacagcgtaatgtctttatccagcgtcaccgaagaaggcgtctcgctattcagattgtaccttacgataaacacgtcatgcggactcttgccgtagatgtggctcttaatcacatagtctgatgttttcatctctgtatctggttttgatttttacctttctgctgttctcaatatagaaataccgatagaagtcatgcgtgagcatggccatgatgcgcttcctgatgcgccacgagtttgtctgcacaaggaagccgaagtaagagttgaggacggtagcccaatgctctgccctcagtagcgttatgctgcccgacttgcactcatgcaggcactcgttcaccctgtctgtcattctgccgatggtcctgttgatggtgtaacgcctcccgtgcttgataatctgaccgaggaacttcacaccgtgtgagactggctggaagtatatcttgtcacggtggcactccaccttcagctcatcgtgagtgaactgcataatctcccttatcgcctgcttgaggaaaagcctgtcatcgcagataatcacgaaatcgtccacgcttcgggtatagctgtagttctttccgtcgaacagcttttccacaaactcatcaagaaagctcatgtaatagcccgcgaacagctgggtggtgaggttgccgataggctcgccgataccatcgccgttgtagaacagcgatttgtcagggttaatcttcttccacatctcgaatggggacttgatatagcaatccttctccggagaatggaagacggtaattttggtgagatacaagaggtgctccttatcgattccaccgtacttctcgtttatcagcttctccagcatgtcgaacattttctgtttgtcaatgtgcatgaagaaacctacaatgtctcccttgtgtatccacgcctgtctctgcatgttttgtgagacacgctccattccctcctctacctgcctgattgccgacgtggtaccgaagcctttcctgcaagcatggcttacatttccgagcctgatattcctctcctcaaagagagggtttagccgcatgcaaatccagtggtggataatcctgtccctgaagtttgcggcaaagacttctcgcagcttcgggaaagtaaccatgaaacacgtagacgtggctggcttgtaggcaaaggtataggcctcccacgcaagtctgcacacatccacggaagcggacggcatatattcgagagcctgtggggaactgcgcttacccacaaggcaattctcataagcttcaaacataccttcctgaaaggtacggaaatctatagacgctgtgcaaggacgcacatagttactgttgtacttgttgttgttgttcaagttaccattgccaaagttcaatatccaactgttatgctggccgctctcgcttaaaaaaggctttgcatcatcgtaactcacatgagctttacccatgtcagtaagcctcccatttatagaaatcccacgcactctcatacctcaccctcctttcgttgggcggcctgaccctgacgtgatacggaatctctccaacctatagcctgtgcaagaatacgaagcgtcagcttcttcatgtccttcacctcacccttggagaaaccacacggtgtttttgtcccaccatcaccgaggtgaccatcagccctgcccttcttggaggcaacaccgataatctgaaatgaggagagcatgttgttcagaacgtgaatgttcgctattgcgacactcaggtaataggcacgctcttcaccacggaactcattcgccatagctatcgccgtggctatctcgtccgcatggtggattgcagtgtctatcgttctgaccatcttgccgggcacgtggtacattcgcttcatcagcaggaacaacaaattcgatgagtcgcgaaagataggcagctgtgcagttgtctttaccactttcttcttgttgttggaggcacctttcagaatgtcgtccgttatttcattcatttttccctattttatcctgccgtaatcaaagcggcagggatattactttttccaaaccctctgaacggtcgccccgagacggcgaccttaaaaaaggttaaagaataaagttaaatgctgtgcaaggacgcacatagtaactgccgtacttgttgtagttgcccaagttaccattgccaaagaacaacatccaactgtaatgctggccgctctcgcttgtactccaataccaatcgttaatgaatgtaaacacaacgctgttcgctttcgcattgccattagccatgataggagtaacggcttcgctcacgggattgtagttcgccttagccttagctacaccctgtctgtagaagttatagagcctgcacagctcacctgctgaagggcaataccagttctttgccctgtaatgctcgtcgagagacccttcaacggtgggttcatacagatagcagccatagacggcaggatagtagtattcgtcatagcgccacgagttggtagctcctgaattgtcatctatcatcttctgcatggcgtccgcaagttcctgcaaggttgtcggcagctttctctccagataatagctgatgagcttgttggcatgctccactacccgtatggtcttttccttgcccctgtaatcagattccgcgaaaccgctgtcgagcttcttatatccgtcttcctgcaatgggtcaaggtacgtctcgtcattgacatagctgtatttgctgccgtcggctttcttcaggttatggtcaacatttacaatcgtcggaatatcgaatacctcggtatccgagttgaagcctgtagcgttctttatggccgctctttcgtcccaatgcccattgccactgtcagggtacattccgaacctgaattttgtcttggtctgctcaacaccagctggggtcatcgtgaggttgtccttggaatagacatgcacatcgtaccctatgaccttcgtttttaccacttcgtcataaatcgggttgcgcatgaacacctgtcccacgatttcacgtgtaccgtcgaagtcatcatcaaatgtcccgtcagcgtaggcgaagtctcctatttctgggatatgcctgtagaagcctaccgatttcgtggcttcgagcggttctccgctgatcggagtcacttctaccttcaggatatgtttctgcttcagcgtagcctcactctgccccttgatatgaatgatacccacattgtcatctatgagctccgcataaggtgtcgcggtgttggcaaggctccatttcagggcgagcttcccgtcacggatagcaatattattgccgttctgcggtgctggcagaacgctgaacgcataatccttgcctacctctgtcatatagttctgtccgctgatagatattctcacaatctctttcaggtcgtacttgacgtgcaagccgttgctttgctcatcaatatttccatacagggccaccaatgccagcttctcggacagggtaagatacctgtcggaagtggcggcaaccatgaagatgacacctttcagggctgccttcagctgtgcgtagtacatcagcatgtctatcgagcaccgtgtgccgtcagtgttccatgcgatattgtctattctcacgtcacgaagccccgtcggctttacctgatagatacttgcagcaagtgcatacgtgtctatcaacctgttattctccacgacaaacctcttcagattgccatagccctccagcgtcagcgtcctcaacgactgctgattgatgatattgacaccattcaccgaagctgggagctgtacgctcgtaatgatattcgtctccggtatcgtcacgtccgtcagtccagtctgtctcaaatctactgtctgcaaccgctttagtcctgataagtctatggctcccgaagtggaagtaagtcccttcaacgacagcttcttgatgttggaggcggaaataacaatgccacctggacggaacgcagggacattcttccccgtgtccgcatcgatataagtctttgtcggttccgcgacaaattccgtcagacggactcccttgatggtgagcgtattggctggcgtggtactgaggtcaccgatgttaccgatggaacggtaatagttgatacccagcacggccatacccgtatcgtttgatgtggtgtcgccgaggttgagggcgaacgtctgtcccggagcgacccttacatgcgggtcgatgttcgtctgtcccatcatgccgacaggatagatatactggtgaggcgtcacattgaaggtgtagttgttattcgacgtgtcgctgtcgggcaggtggtatgcctgcatggagaaggagtccgttgcctccgcaatgccgaggttgcctcttttgccgtcaaagaacggcccccatgccgcatagctgcccatcagcacgagcctgcgccgcatgaactggagctcgcactgtagaagcgaaccgttgctctgcgtgataggttttacgccacgtgcacccgagccgttggagacaaagccgagcatttcggggtattcatagcgtattctcgctgcctcgttataggctgcctctgggaaataatgatgcacatagtagaaatacttgtacatacagccccatacagaaacctttgagcctccagtccaaccgtcgatgtggtctgtttctttgacgaggctttccatgacggttaagatgcgcttgagcattgcctgtatctccttggtgtcctcccacatggcttcgcagaggttgaacagcacattgttcataccctcatacttggccgtggcagcgtcctcatcattgtacgggtgcatgcggtcgatataatacttctttgtagcacgtccgttgttgtcgactggaagcagggtgtccacgtcatcagtgtgcatctcaaacagacagcaagagcgtgtctcgccgtctatcgtcacctgtacgggcttagggtcgaggacatagtaggtgttcttcgagcagctgtcggtgccggccatgaggtgtatgatgaacgtgtagtacagcttcacggagtccactccgaaatagaatcccatgtacttcttgcagtgagccacaatagcggcacggaactccccgttgagtgcggaatactggctctggttggaggaaatctcaaaggtatgcttcgtaatgccgtccgtgcgaaggtcaaccacggaccacttcttcatggcatcgtcccacagccctgcgtcaacccactttccgttcacgtggtcgtatcttttcagtctgtaggccttgtcgccgtcggtacaccaatacttcttgaacacgtcctttgcctgatcggaattctggaaggcatcgaacgtgcccttgtaataggctatcatcggggagtgcaggtacaggaagttccacgcttcctgtatggccttgatgatgttgtccttcggtgtctcctccgcatcgttccccgtggctccagcgtcgaagtcgaggcactgcttcccgttgtagaagaagccctcatagtcgccacccttgtaggtgatgttctccgggcagtcttgcatgttccatgtgaacggaacacgcatgtccgtgaggtcgtagttattgtcgcttccctctatcatgcagaagttcgggtgcagcttcttcacgtacccccatgtgggcttatccatctttcccgcaccgaaagtacatggaccgttatagacagggcctgcctgtccctcttcctgcgtgaagaaaaggaacggctcggtgtatttcgacactcgggcggtagggcaggcttcctgtaagctgttcttgcccacgatggccgtatgcaggtcgttgtagagattgtttgctcccgtgaggtggctctgcatggaagaggcatagttgattttgttcaccagtttggaagccataggcgtgttctccgccacctgatagcccatgccacggtacttgccgttgccgtctatccaaccatctggaacggacacggtaccgtcctcgttgtagtcgtattccttggctccgtcctttaccgggtcgtacttgccgagattacctccatagatacataccaccttcttcttggtagcacctccgtcggaagctacctccacctcgtaaggctcggataccgtgacggacgaatggaagtccgctatgcgcacacggataagagcagtaacgtctccgcacttcgtctgtaggttcgaccagaaataggtgtttgccgttgagccctgacgcgacgccttcagcgacttcgtttccttgcagatggttcccgaatactcaggcaggtagttgccctccttgtcgaattgtacgacctcccaccagccgccctgcttggacgtggactcgtggtagggcagcttgccgtgccatacaagacaccgtttgccgagctgcttcaccttctcgatgtcaacctttcccgaggtgaggatgtcgttggctttccggcgtgctatcttctctgacgtggtaggcagggtggagatatagttgttcagcacctcggtagcttccagtgccgtgttctggtaacagcgtatggagtagatgtcgaggacggctccgtcctgtcccaatgtaaaaccatcgttgcccatggcggacgttccgaactcctccgtatctgtgatgttgaacttcagctcacgctcgcagtctccgttgatgaacacacgcacgagggctatcttcgttgctgtcacggcaaggcctgtggacgcttctggaaccaccacgtcacccttgttgggtgccaccgcattatggatattaatgacaatatgcgtgcgcgtaccctcactccagctgaaatccgtctcgctgtcaacggcgttgctcttcgtgtatacgttgcccgtcatgggtttcaggcgcagtccgcggaacagcaagccgacagcctcgcagacggagatgatggggctgtcctcgtcggtgatgttcctcacggcaaaatcaagctccagcgtcatggaggagtccgccgttgtcaggaactgtgcgaacgggttgtatttgaagttcagccttgcgcccgcaggaatacggaggattttctgtttgtcgtattctgatgttatccagccgtcgttgacgaagccgaagccctcccatgcgctctccaccacggcattgttgttgcgggcgttgagtatctgcgctgggttgctttccgagttgttgcgcaccttcggattgaggagaaagtcggcaccgctcttgggggcatagctctctgagttgtcaacggtgatgacgatgttgttggtgttctggctctcctgaaggaagttcacctcattcctgcctgcgtcctttctgtacacgcggaagtatgcaggcacgctctttgcgtccccagcctcaatctctatcgtggtgttcagggtgttcacttcaccgggtgctacactgttctccatcttgaagtattccgtggggtggtcggcagggaaattctctgcgtagtcggtcaggtagaagatgacgggcaccttatcgcccgtgttggagatagtgccatcaggagccacggagggagagaatacggaatactggcagatgtctgcctgcgcatagttgtctgccttgctgatgacgttctgaagcatgaggtacggcttacctgcgttccctcctgcgtcctcaccgtttaccatcatgaagcggtttacgagcacgtcgctgctgatggtgccgccgagcccgtcttcacaggtgagccatgccttgacggttctcacaccatgcttaaacagcttgtaggtgtccgtagcgtcaatgatgttcttcctgatgttcgtagagtcatcggaggctgacagcggataggtaatctccgacatggtcgtattgttgccacctgtgatgaggacatgcagcgtctttggcacggcaccgaacaccatgtaggagacagggaagcctctgtccttatagacgggagccagcagcggggtctgccagttgagctggcaggtaagggagaggttcgtcttggtgacggtattcccgacggccacataggtggaggtggctgtcttcgtgctgccgtcctctgccgtgtagctgaactgtgctctgatacggagtttctgtgagccggaaacaagacagctgcccacatctaccttggtgtacgtgttcgtgtcggcatactccgttgaaggtattgcggcacttctcgtgtccaccgtcgaccatgtctcgccgttgttcgtgctgcgctgaatgacgagcagcgcggacgtacccatgttcaggcgctcgccgttggaggtgcgtacggcatggaagcgaagcggtatctccagcttgccgcccgatacgacgatgttgctcgtggtctgcatcgacgtgaagaggtatgcgccgtagctgtcaccctgcacggtggagatgggcagaggttcatctataagcaaaagactggcttccgcttctgggtccgccacatattttgcataatcctctttttttgcaaatccccacagatgatagtaattggaagcgtcaggagacgtactccagcactggtatcccactttagaagcaataccattatcatgctccttaagtttcttctgaagagcgacctctatatcaaatccgtcatggtcatcgaagttgccgttgataatatcaaagtcaaccgcgtctgctttcgttttttttgccatattcctttatttatttgttcctttccatttatctgtcccaatccatgggcgcgagcctatccagtgaccactaccaaagcagctccttatggcttgccacacaagtcttgttccccggcgtatctccgctacagccctgccgttgaacatgaaccctataatgtccctgccttggtactgtatcattcctcttcctcccagattgaatagtaacaatcgctatgtatgagtccgttgtttttgagctggtcatactcctcttgcgtaaacggaccaagaaagactccgagatcagtaaacttagccacggtttcccatgacaatcctttgtccttggaatactcaattccatctacgcctcgtcttagtatgggggtaattccttccacctttgaagcagacttattccctccaatcacaaggtatccatcttcgctgactgatacctcgaaccctttgttaaggtaggctctgaataactctgccgtgattttccctgcagcatttccttcagccatttgcaggagtatctggtcggagttggtaattgcccccactgtattgaacagtgtcagcacttgctgtggtgtcaagttatccatggatttctatttatgggagagtgtctcgtttatcgcatctataaatgccggagtgagaacgcaatccgcacactgtttgataagaccacattcccgttcagaatattcttcctcccctgaggagttgtagattttgtatgccaatgcatgagccgagagccccggaatgttcgtatagatggcattcgcaaactcatttttgatgtcgtggactacacatgttgtctttgatatatcagtgtaaacttccacatttgtaaaatcgatcttcatatactgtgttttaatcaaatcttgcaagtagttgataataaaatcccgtggagagagaatagcaagccgcaaatttggtaacatccccagatgaactttctatatttgagccattccattcgtttccattattatctacgataattccggaccttgaagcatcaatgtgatttgacgatttgttttttgttgcaatccatattttgttggagtcttttcgtactactaccgtgaaaggggtacagaatatctgtaaagaatcctttatccccagttgtgctcttatttcgctcagctccgggaggaagaactgtcttttgttaccagatgaatataccagtatagttgtaccgaaactcaagtctataacatttgttccaccagagtccgatatttcgagatggtatcctctttcgatgacacctccccatacctgtagtcctccctcgcatcttaatgctatgtcgcgatttattacattgtcagatattatttttgcagccggatagtacatattatccgcgccactgttcatatttctgtaaatgtacattgcagaggaacaataagcgtattgattgccctcagttgttggatccgatccttttccaaatccaacctttatattggctatatctccggaatggaaatatcctacggactgctgcatcaacaacgatgaagtgttgagatacacaaaattggattttacgccgttccaccagtcatctggtgttcctgtgtataatccttcgtctgaaattgtaaatggacctatctttcctttgagtgctgtaatatcgcctgatattttcgcaccagtggcagacaatatgccctctcttgtcacatgaaaaggtgccgaagagggattactgcccccaacccacaatggaatgtcgctgttgcccattcctgcaactatcgtgttgtctggattagtcacaacaaacctggatgatgacaacatttggattgtagcgtttttcgcaatgagatacgtgaagaaagctgactgcgcgtttacactcacttccttccaaaggttgatatccgacagttctccatcggtgcctccctcatgcgtcatcacgcactggtagattttccacccactcgccatactgttatccgccacagccatgaaatcaaggtagcggattccggaggaatctatctcattttcatcagcgtctgtatcgtccctgtagatttgcccttccgtgaaagtctgccatactctctgaatacagccgttggatcctttctttcccgattggttgtactcaacgggagagtcccagtttccataggtattgtcggcttcattatacccataaacccattctctttcttttttactccagatggctttggcgaagctgtaatatagctttctttcgatctgctggaatacaccgacgatacgataatacccgcagtcgccgaacttgtctctcgatccatccttgcaatagagcaactctaccgtatgcgttcccgcctttctgaaagtgacatcgacgacagacacgacaccgtccccacttgttctgagtgaataagtggatgggtgtgccttatatttgcgatcaggttttccgacatagaatgaatcatagtctttctcacttgatgctaccacgcatatacgcacacaatccccgttatgcgtcgtctttatcgtaaccgtctcttttgtgagcccatttccaacgatagctgctgacttacgaaaggtctgtgttattctcgcagacaacgcattatagccggcactatcccctactacagcccagacatacggtgttgtagatacagccgtaggcgtaaagatggccgtagccatttcaacggaattttctacagaagacgagttcaccacagctatctttgcgtggttcatggtcttaaccaccaccttttccgcatttgtgtataacttggtcgttccatcagtccatgtgatggttgcgtttacagcattatttgtatttggggctactctcacaccgacattactgaaagacatggtgtttccgccagcggtgatagacaccgttgcataaacgaaggtgtcatcacctcccttgtagtctatatctacattagagaagacgccatcattggaacactccgcttcgtagtaggtgagttgcggagtgactttcaaaggctcttttgcccatccctgtgccttgacagccgcatcatcttttgctgttggcgtgggaggaacggctgtcgcaagtttgaaaatatcctgcctgaatgttccgtcctgaccatcatctcctttttcaccatctgagacacagtttacccgctccctatcaacaatttcgccccctttcatgaggacaaacgtagcatactgagcagagccgcatacatttcttgtggaaatggtagcgggattggtaacgggatacttggtatttcctaagagatagttaagcacaagtccctcactggtaatctcatctttcgtagaaagaatggtcgtggtctctccagcagtcttttttacttgtacagacattgacgtatctacgaaattgccgtctgcatatttatgtatgacattgacactcggaaggagtgagtatattacccctgtcttgccggcataagctttgttgaccttatatactgttgtcagtacgatatttgtattggtcttcagtgtagccgtgacgacgatagtcgcactgtcagctgtaagattgcttggttttattgtatgagttcctggtacatacgaatagcttatgttgtgtgcctcaatgctaatgtcgaacaactcccatgcgtactccgttcccttgaacagctgtatggtagtatcttcgtatgcgctcaagatggtacctttctcgtcacaattcataaagctctggtcattggtgaggtcaagtacatagttggacttcccatcaatcgtatacttgttccacaacttcacctcaccgaaaggctgccatacaccattcaccttcttgcgcatagcgtagaactcatacctattattcattccgacaccgcttggctcatcggtccatttgtccgtcttgccaatatcgtatggacaatggttgtcttcttgaaatgcagtggtagtggaatcatcgaggattgtcggcgtactgaggtcggagatattatcactgtcctccctccatgattcttgtagccagaagatgaattctactcctttgccatcaaccccatcgagtatgacgggaacagtctcctgatcccatgtgaagtttccttgtgtcagataaaatatgacactgctgatgtccgagtctatggctatacctgtactgtaatcatgccttgtggagccattgtcaacagagtattgcacctttagaccagcctttacaatttcatcatctgtgagtatataatgtttgtcatcactactgtcgcaatgtactgcacaagtgacgatttctgcatcaagaactctgttaccgtccttgaacttcgacagtatttggtcggtagatggtacgagctgatatacattcacatccgaagacttcctaacagtatgtaggaaagtacgctcgtaggagacaccggcataaacggcttctcctacgatatacagattcgatatgctggctgtatctttcgggaacgcagttatttcaatatgccctatcctaccttcctctgttgtaccgtccgtcaatgacaaaatgctgttaacaatggacgccgttatggaaagtcctggtacatgaatcaccgtgtcatcattgtctgatgacgctatgagctttccatcctccgtcttaacgcagattttgacggtatcgagcaacgagttgttatgccacatcctcatgtccgacataataggcaggccaacatacctctgtgccttggtgttccagcttacggcagaactctcatttgttatgtccgctccaatgaaaggatcgctctggtgcttgattgttattgggaaactttttgtgattgtcccatatccctcacagtccacaagaatatctacagagcacgcctctgtcctccgcatcttgtcgtaatcgaaagactcgtcatcggcagttccggcaaccccgtccttgaggttgtctatattcgtaatatacaatgtagagtcctttatgatacaggaacatccatgaggctgagcaaaaagcttgtaagtccccggacctgcggtttcgtcttccccgcaggctgtgagaatccgattgttgttcctgaccgtaatggcggagtggattctgtattggtggtatgtatttccagtggaatccacttcctttgtatacagcccaccaatgacattacctacatcgtcaacagtgatcacatctacatgctcggaaaagttgacattatagtttttgattttctccttgatgtccactatggcctcttcgttcacctgagcaatctttccgctgaaatagatattgttcaggtatgcagaatagccggaaagttccgggcacccctcatccttataggattcatacaatccgtccaactcgcccatctgcatggcaatgttcttgaaggtgtattcccagtcgtcgacaccacgcaggaactgaatatagctcttggttatacaggtagaggcctgtctcgtcttgttggtaaaattgccataaccggcaaacttcatgaaacgatgaggatggttgccgtaatatgtttcacgctctgtttttcctgtatcaggatccgtcacttcccttacatacgggcgcagggaatacgatacaatttcattgtgctttcctgacacactcatgatacgaaaatagcatgtcgtaaagccggcacgtgtcatattacccttgaggtcatctgtatcttctgtcgcgtcgcctccgtcgccaaactgatacatgcccatgcagatgtcgtctttctggcatgttcctccctcgccgtcctcaagcttcaacttgaaaacgcctgtcgattctgaaagaacctgaacggtctctatagtgccattacaccatgactgtcttaaatctccggctatatatacagttctgttgaggcgcatttctggtacctcgagccactttctcagtgaaaggctgtcaagttccgcagctccaaaggagttgataaatccaccagtgccttgcaatccatgcacgaacttcggtccgaagtatgttcctccgataagattggatattccgttcacattctggtctccagtcaccacttgcgagccgagaatagacgaaattatctctgccttatcgttatttccagttcctataagctgcgagccagcaacggtaaggacagataatacctgaagctcatcagctgtgagcttatggtccgtggtatcgtctcctgtcttagacaaaaaagagctgacgatttcgtaaagcaagtgaccaacacgctgagctgtattaagcccctgttcggtttcctcacggacgattgtcgccagctccaagagtttttctctcgtaagcattgctaatctcctattttacgtattacaatggaattagtgggggttattcccggctggcggctgcgtctgtaatattgcgggaatttctccttcagaaagtccttgacttcattcaagaatccattcgctgccgtcagcgcattgttatagcagtcggacctctcttttgacgacacgtgtgacgaataggcattgtcttttataactacgcctgcacgggtaagctgaaaatcgccgtccatgacatactgggcatagacaaaatagctgatagccattttgagaccactgagcatgtggtaatctccacgcttatctgtatattcacctccattgatgagaatatacatattgtcctcagtgttctgttcgttttctgaatatttcagcacctctgaaaacagcttatcaccaagggtcggtttgatattcagccgttccgtctcatagatatatgagagcagcttatcttcgtctaccttatcgctgataggtctccccaagtcacggatttcttctgtggttatgatatgctccattatgctttactgttcttgtccttgtcatctgtactttcgttggatatgtgcttcacagggaggattgagtaatcctcggacgggcatactggcttcccgtcgttatactgcattgcccattttgagaaaacctttgagaatactcgtgagatttccttgcgctccttctctacataggagttgtaaaacgaaaaggcatcgttgatggtggtaccactgaaaccgagctttccgattctgatacaatagaacggctcctgcccgaatgcagcatatatccgctctaccgtcgatgtctccgtcaccgtgaacttcgagtcaaagttttgagcctctaacttctcgaatttcggaatatcctcgtcagcattcacagtcacatccataatggaacaggcgttggtatcaccctgaaacacatcgaggttctgcgtgaactcttcctcaccattcgtatttttgttaatctccataccagtggtcgggtcgataccaagggagacggccttcttgtgtatgagcatacctgccacaaggaaattattgcgcacattgcggtatttcacattatcaatgccatcgtctgttgagagagccgttactatcttgtcgtatttaggctttggataaacaaaacgcccgtccatggagtaccacagtatctgtcccggatacttgtttattcctccacattcctcgatttggtcaagtattacggcctgattggtattgaatacgaagaaatttcttacgttgtcttcagtaacctctatgcgctttccgttccttgtctttctgccggtccagtccgggtgatacttgatatgtgccacccttccaagatcgtcttcctcttcgagcctgcaaccctcaaagagaatatgctgtatctcgacaatttgccccatcatgttgtagttaacatgcaaggcaaatccatggaagtgggcaaggtcaacggctacgaggtggagaatatcagcgacagtatcgcccttcctgttacagacgaaatcgccgaaaaacttatccttcagtccatcgccttctatgaatcgttcgtaaagctcacagcacgttcctccagtagggctattaagtatcaatgaaagcatacgttgaggatacaggttgtcctttccgtatgactgaatattcatcgacgacatatagtgcgtgtcgaagcgtcgttgtgcgtgtttaacgttatttatattcataccagcgcgttcccttgtgataaagttttccggcgttcacataccgcttatttcgcggtatcgtcagtcttggtagtcttggaggtcttcttagcggaagacgcctcatccaccttcttcgcattggcaagctctttctgtaaagactctatttcttttgcgagagaatccttagcttccgacagagcttctttttctgaagaaagcgactctatttgcgcggtcagctcgacaattttgtcattgagttccttggtggagctttcggctacaatcttctcctcggcaaaagctgcaaccttggcttccagttcctcgtttttcttttgcgtattcgcaaggtccgcagtggcagtggcaagggcggatttgaggctttcaacatttgtctgcagctcttcattgctcttgggttctttacctgcagcttcctctttcagagtcttgcgtgcttcgcaaagctccttgtagttgtccggatacttggagaacaagtcaaggcggttggggttttcattcaatgcgtccatcgcaatctcgtccgtgagattggaattagtgaacacctgcccattgagagcatggagaaggacaccattcaacagaataaatttcttttctttcggcatagtaccatcttttttaagtttcgtataaatcaggatataagcgtcacggtagcagttactgcatgcagtgtttttgattggcttgccgtacaacaactcatatacttccttaataaaaagtctgtcagaggatgaaaagccgtcgtcatgacgacctttcatctccaacagcgtagccattgtttcactgtatgtcaacattggcagagaatttaacctcccggattgagtttctccgtggtgccacccaacgaggcaagtatctttcttgtcttatcctcgtcagtatcccagaggaacaaaccagaagacggtgcctgctgctcctgcaatgtgacactccatccaccatcggtgtcatcggagttcaagtcacgtgtagaggcggtcagcttgagtccctgctcgaagccataaacctcgaagaggttctttttgtcggcaccagcaaacttattttcaagtacaacaacgaacttgccattcgcaagcttgtcaatgatgtcatgggtcacatcaggaccgctgttgaggataacaaaggcgacagtcttgttccatttcgtcctgtatgttcctacaacagcttcaatcgttgtaccattgaagggagaaccctccggcacaatgatcttgtaccccttagcaccactggcgagagcgagtgcggatatagagttgccactgcgattgcacttactcttttccacatcggcgtagttgacgacatagccggtggtctggactcccttttcggacatgttcgtgcaatcgaactcaatatcctttgctaatttgaaatcgcattcagccatcttacaaactttttaatgggttaataggcaacctgcacgagcgcgtcctcacctacaagggtaccaagcgttgagcttgcgtagatgaagttcttgcgtttcacatcatcgaacttgacgctcagagaggcaatcttgtcattgtcctccgtacctacgaacaggttgttcggagagcaaacgatagcgcggtgaggattgttcagcttggtacctgtatcctcatacttcttgatcattctatcccaaatgtcaagaacgatcatcttcacgccgtcgtattcagtgagcttgataccagaggcaatctgcttgacgctcatggtgtacttgccgtacttatcaacgaggtcattacgcagagccttgaacagagagttggttgtcatgatgcaggccttcttatcatcgaagatacgagagtctgcatcagaaaggaggtcgtcaaaaagctgtacggcatagccggaagcctttgctgcctgtttctgagcatcatatgaagcctccgcgtttgccgtgactttcgttctctggcttgcattggcagcaccgatactgaacagagccttccacaaaccgtcattggctgtgaacaggttcgtattgataccattggtgatgacaccgccaccggtaacatccttcgctgcggtatcaccgaaccagatgagtcgccagtacatgttgttcagggcctctttcaggagagggatgagcacgaggtcccaatacggggtatcctgaaggtcagccttgtcagtgccgcccttcattccgttcttgccaatggtatcctcgatgtccttgtaacagatttccagaggagcttcccactcaccgagcttccacgtcttctcgatgccagtgatagaaactttctcgtaaacagggtcgcaaccagttcctttgcgacctacatcctgaagcttgtctacatagccgagcttctttccatcctccagattcgtcttggtggtcaccacggtatcaaggtcgggatcctgaaacgtggaggtgaacatcaactcgcggaggtcggtaatcgcaccgttatctacggtaaattgttcccaattaatcatattgaatatttctaatttaaattaaactttgactttgcaaggtggttattccatcttacggttacgtttcttcgcgtttgcttcctttgcctcacggatcatccgctgggtcttggtctctccgccatcaccctgcccaggcgtcttgtgagccacgaactggcggttcttcggagtgaatgttgacttcatggaagtaaccttgtcaagccacttcttgccgccagcctttgcaatgatagtgaggatgtcacgctgctcttcagtgggctggctgcccttcagggcggtaatctcctcatccttctttgcaatctgcgccttgaagtcatcaatctgcgcctgcaggttgtcgatgatagcctgcttctgttcaagcgtaggctcatcaccggatggctcgacaggttccacgtcatcatcagtcctcgtgatgtctgtgatgacaccattctgcacgataacatgagagccgtcgtccataacatagtcaccgtcgggataagcgatgtcgcctacctgcggatctccctcctcacgctcgacagtaaagccctctccagaagaagagacgatgtactggtcgaggattttcatgtcgttgagatcttcaatcttttcaacgccgaacagcgagcacacacgctttactgcggaggcatcgcactcaatctttccttttgccatttttttgatgtttttaaaagtgaactttttcttgctgtcattcatttcagggaggatggacccgataaaaccgagagccaccgctgtctgcatatcaatgtaaatatccttgttcataaggtcgctgagaacctgtctatccgaacctgtacgctccacatagaggtcaagcagtttacccgtttctacacgaagctgtgaggcgaggtcattcatcttctttgcctgctgttccagctcgtcgtatgtaaggcggtcactgtttacttcgtagccggcgagagcgggattgtgaatacagatactcgcattacgatatgcgaacctgcgctcgcgcggagccgcaaggaggattatcgttgcgattgaggaacacttcccctccaccgtagcggaaatcttcttgtttgtctgtctaagtgcatcatagatggaccagccttccacacaatcaccaccatcgcaatggaggcggatgtctatatccgggtcttctgctgacagattgctgataaaatcacgaatatctgagaatgtcgtcgcatctgcacctatctcctgcaggatcagtttctcctgatcgtcaacaatgtcattgtatattttaagtacagccataaaaagataattttgtatcaaaagtacaataacagaaaatggctttgtctaaaaaccaaacaaaacaactgaaacgctatttcagtaaatacttgcatgtttgattaaaaaagattatttttgccaagtaaaccataaaatgtacatgcatgaatactgaaaagacatcttccccctacttaaaatggggctgtttgagtacgataattcttttagtagtcgtcgctgtctctcaaaatatatcatgcgaagggggtaagtcctctgcctcgaaagctgatatagaaagctacatcagtgaggcgcagcaagactctgctaaactctgcactatgaaagctgagcataaggaatatacaaacatgaaagaaattgcaaaggaagcagatgctatttatgctcacgacatgagtacaaaacaccccgaagactccgcaattttcaacatagacaagcatttaatgagtctggtgaaatataacaggaacaaatgcgattctatttcttcttttcacagagtgcagttcgggcgcgcattaggacatgaacttagtaatagggcagtttacccaattaaagatatcgctgttaatattaccgggaaattcaataatattttgacactttattcaagtgaatttgtgaagcaaggcaaaattgaaaccaactacagcacatacgaagaactttttgatagaatgggctttaaagaggtcaggtttgctacagacaaaaattcagactttacaagctatgaaattcttagttagcaaaaaggcaggccgacaccactaacgatgccagtccgccttggaaatgaactaaacaagaatattatttcagatccgtccccagtctttttatgagggcatagaccgttctgtccgttattttgtactcatccgataggacggaggtaacataagccactttctcacctcgtgcaatcatttcctttgccttgttgaaaagaggaacgaatttcacatcatgcgtgagaatgtggttgtcgtccatgaatttgacgactgcttcgtatttctccaaaaattctgctattgtcatagtgtatctatattattaataacttccacacgcctctgtccctcgtttatgtcctctacggctacgactggagccggcatgttttcaactccctgtactattctgtctgcaaattctccctgtcgggaaacattatcattgattctgcttgcttcaaacggcgcattaccgcctatttctccgaaagccgatgttattggatagaaatccgacttacctgtggtaatagttccgttcgccagtccgaacaattctttctgatcccctttggtgaaggcaccaggtttccctgtcagctgcttgtgcatgtttgcctgctgctgctcattgagaatcatctcgccatcgtttacgcgtaccgttacctggtccatgccattcttcttaccatggccgtcaacaataccaccagtagcgaacttggctgaattcacagttgagatagccgtcgctatatttgcaagcaccgtggcaactgtcgtggcaatggctgcaaggttggctgggaaaggaagcgatgatgctgaagccacaccagcagagattgccttacccgtgtcaatggctatttgagcaagcgtcaggattttgctcatcttggcaaacgcagaattgctctcaccaattgctcccgttagcttaatcaacgaattcgcaaccgttgcttccgcctccatcttaatcttggagcactcgacttcatagtcatcgatagccttcttgtcatcagcatatttctgtttagcttcaaggagttccgtataatactcctcctgggtctgggattccatctgcccacgcgcctccagctgttcgatatattcttcgtctgcatctctccgagcctcaaggatagccacctgctcttctctcgtccggtctaccttcaggctcatttcggcaatttcattctcggctatctggcgattcttttccatcttttcattttggtaatcgtcctctgcctgcgcatcttcctgtcgttgccgctctgctatttcagtcttttccttgttgtagtcatcgaggattgccatttcgacatctttacgctggttgatagaatcaagctcaagctccgttgcgttattcgcacgtgctttttgatactcgttctctatggcggcaatatgctgttgctgctcctctattttggcgtctatatcatcattctgcttctgatagttctcatcacgctgctgcttttcgagcttgtattgctcctcggtgcccttatgcgcgttcttgatacgcatttcaagcactttggaatcttcctcgaccatcttgttatagcgatccatatagagagcctccatcttctcgttcctctcatgctcaagggcaagaatcttgttgttaagggctgtctttgcggctaccgtcagtttcttgtcggtatcaagcttctttctgaggtcgtcgatttggtttttgtactggttaagggtttcagcccgctgtctttcgagattatcggcgatgagtttggtaagagcctcctccccttcacggacaatcttctgaatttcctcttgatggcgcttctcctcattctctcccgccttattggacctattcttggcaccctttgccccagtcgttccagcaggagtccctccttcaattttaccgtctcccaagtcggtacttacattcgcaccattggcagctttcttggtaactgtcttccgcttcgttgctttctgcttttccggttgtcccagtgacttagcctcacttttgaatgtatcagcaacattccctgctccttgcttcacattttcccatgtctgcttgaaataattacctacggctttggcaagctgactcataccgttcttcattgccgagaagtcaagagtgaataagcctttcaatgccgtggcagcaccgcctataatgcccccaagcaatttgaaagagtttccaatgttcttcacaacaactttcacgacttcccagacagaagtaaaagctactttcaaggcagaaatagcacctcttgccatcagtgagttgttatacaggtttaccatccactttatagctccggcaatagcattcaccagaaactggagacccgacttgacaagatcaccgatagtgctcttgaacgaacggaactccgcactgcttgatgtgagcatgtcatcgagctgcatgaacaattccaacgcaagagaaatgattgccgtgaggataaatgtcttcatggctgcatttgctgttctcacgaagccctgaatggcgactctcgccgttatcattcctttttgccaagcagacccggaggcataggctgcggcagcctctgtagccttgatttccgcggtctttgccttgtgcagggctttttccgtctctccaagctgcgctttctggatagtgagcttgttttctatgagagagcgctcgtcagccgaggccgtctctacctgtctttttagagcctcaacattctttctttgcgctacctcttgctgtgcaaggctgttcacattcgccgtagctttttccgcattggcaataacagatgaacttgaaaggcttgcagactcacggatatgctgcactatcttcacaagggagaatgaggcaaggatagtccccaccatttcggataacgattcaaaattgacgcgcacataggtgattccctccgtgatagcatccaagggacttaccattttgtctgatgcgctgtcgaatatggttatcagcaagctctcaaaggcagatttaagagaatcgatggaaaccgttacattggaataactctgttggaacattctatctgtcgttcctgccgcatcagatacggtggagagtttcttctgtagtccgtcgagactgttcatcaatgtcatggccgatggcgcggcaagacgcccgaacacatcaccaaggtccttgacggatgttttggacttcataatgccactgtcccgcaatttcagtaatgtctttgtcagcccttctgtccttaccgtattctggtctatctgtataccgtacttcgcaaacacagcagcctgagcctgtgtaggcgaagtgaggcccatgataatctgcttcaacatagtaccggcctgagcacctttcacattattgtccgcaaggacaccgagtgcggcattcgtctcctcaaacgacactccaagggtgtaggcaataggagccgtattctgcatggcttcattcaaaccgagaatatccgttgccgatgaagaagccgtctttgacatgacatcatttaccctgttcacctgatcaacgccaagatggaacgaattgagcatattggtcgtaatatcagccgcgtcacccaaaccgatgacatttgcctgtgcaagatgcagcgtaccttccaacacagaagtggcatcagctgccgacagcccgtttctcgtcaggttctccatggcctcgccagcttccgttgccgtatatctggtagagcctccaagacggagagcttcttcgcgcatcatcttgaaatcaccagtcgtggcattggtcacagcctgcaccttagccatttggtcattgaatgatcgccctacctccgttatctgctgggagagacctgcgaagctgagtccgccaaaagctccggctataattccaccaaggttgcggactcttactcccaaagcgtcgagggagtttgccgcatctttatagttacctacattacggtagaaccgctgcgtggcaaattccgcctccttaagctccgtggttacggagtttattttattcttcagctccacaccggaagcacttgcgcgttctgccttgccaaggctgtcatactcctgcgtaagggaagaaagtctcgctctaagttgaacgagagaaccgttctgttcctgctgcactttcatctgattcgtcatctgtcttgtcaggagaaggctcgcattttgctgcatacggatatactgttgggatgcggacaaggacttgttatactcctccctgctgacaagaccttccttgagctgctgcttcagcgacttctctgcttcccttgcatcctggatattcttttggtactcggccatctttttgatggcatcgtcatatctgacttttatttcgagtatcttagttactgcttcgttactcattgttgttcgacttaattaggctgtttggtattttgagaagctggacggtgcatttgccgtctgacttcctctttatgctctggattccgaaatagctgccgtattgacggagatagatgggaatactcatatcgaggtttgaaagggtaaactcgtcgagctccatcatatctgtcaccacatagaggtggcgcagcatttcagcaaatatcttgtaccgtgtatccatcagtcctcccttgcttctgaacgaaagctcgtcaaacgtcaggacgtccaacgaggactggtccgtggtatccgttgtgttctccacaaccttgtcattatggcgtactccgatacgcggcttgcaatccttgaacacaaacccctccacctcttttgcgaaagatacatactcaaagattttcacacccttcaacttgacatagttgacgacttttccagactcatacagcggtatcttcgccatacctctgtcactgtcacatccctcaaacggcaatgtgaacacgtcatcttctgtactcagatatgggttctctatctcgaaatagcccgaatacttgggattatcgtcatcgtcagacttccatttcaaccagttaatctgactccagtcgtccatcacgaagtcaatggaggacggcatatcatagtcgttggtaacaaagtcagaccagtcaacagctttctccacattgtcaacgagatccttgtagaggataaggcggagcttaccatcagttattaccggatagccaccaacgatatagaatactcccttgaggaagtctataggcttcatttccgggaagttcggctcaaaatagatgggacttgcatactggaaataacctacctcctgtgtgctttcctgataagggtgtgcttcggtaatacaaggaatgacatctatatagctgctgtagttcacaggttccctcccagtctttgagcttttcagtatgatcttgttgccatacgtatcagcacaaggaactgtgccgtcccctatgtatgccctgtcggcaccatctatccaaacacgccttccttggcgaatctctatgacatcctcatacttatactcacctatatgcagtccctcccagtcgctattggccgggttgtcatttgcggaaacatcctcccagtcattcagatattcgtatctgacctcgtaccatttctttcctctattgtcaacccattcgccgctgatatatgtcgcagccaaagcaaggagcttagaagcatcgtctttcccatttccgttgacaatggttagcttcacatcagagaaaatctcagcctcagttttgtctattcgttccgaatgaaggaaaacgcgaatgtgggccttcactttgtacttcatattgagatagtagccataccatgcccggatatgcttcggatttttcacctgcactacccagcctatccgttgattcccgaattctggcgtatatgactccagttttgtatgaccgctaccgaactccgtggctttcggctcaaacgtccacctgaactgattctgcttctggaaatactcactgtcattcatcgtggtcatgggacagtacagcgaatccagcagtttctcggtcttcctcacttttgagccgtcaggatttgtgtactcccttgtgaaatcataggcaattccatactttttcaggatacgatcaagaagatatgtaaccttgaagctcgggaggtaatagagatacccatagaaatcatcgcctatcacgccgtttgagtagcgcaggcaaagaatattatccttgaacaggttctttgagaattgcgattgcttccattgctcccatatcacataattcggaattgtattctcgtcggaaaatatctcagggagagtttcatccacgtctatgatatcctggattgcagacaaagttccccatgtaagaacaatcttatagaagctggagtctgtcccgatcaagtaagcattggcaggtccaaggacatctactccgttgcaataatatctcgcactcatcctcctgccaagagaggaacgcatttttctgtcaaagacataggaattatgctccgctgactccggagactcgaatatctgcctgtttgtggcagtcatcggcaatttgatggtataggagtgggaacacttcatcttgcttatgttggaaagcatgacagacttccattccagcgatatgttcgtatcgccgatgttcaccgccttgccatcaatgtaaagcatctcaaactgtttcataacatctgtgcgtttgtgttcggtaacaatatcttgaactcaaagtcctgcaggacttcaactttccgcttattggtagaagtgtcaatcactaccggctcccagcctacacttgtatccttgtgatacaagtctatgacgggagaagtgagaatactctccagcatattatactcctcctcattcacattaggcgcacagaggttcagcgtgttctctgaaaagaaatactgctgtctttttatggaccggaagctgtttcctttcttatcgacataattcatcgtcagctcctgcccgccatcatcgttcttgatttccttgacacctttctcaaacagccagtattggagccttccgtgcctgtctatccagcgcaagaagaccccttcggaggaataatcttctacacatgtgactatctgcgcacttgcagggtggaaagtatagtcgaatgtgtagtcccatggcgtgagagttgccacagtacccgtcaccggcggtatttcctgaaaggaggctccgtcaaagatagttacattcatcgggtaattcttgaaccaacggacggttctcgccccattgaaacgctcccccggagctatattgccccatattgctatggtagtgaacgagaatatactggcgccatctgaaacatcaacactcaccttcatggaacgcttgtcaacaatgctgtacacatcgaacagcagctgcaaagctcttgatatgtttacaatggtagtcttctcaaaacacatcgtctccaaagagaatgatttctctccattgctcaccgtcgtcgtcaaggatatggcagagcattccgacaccttgatataagtcggattaaatgcgaaacatatctcgtccggatatgcaacgcttcctaagctgttacttactgtcctcattcttcttgaatttattgtttattgtgtctatttccaaagcgagggagtcgccgactctcgtggctattctgccaagggtgtctccaatggcttttccgtatatatcccttgtaattccctttcgatgcaggagagttcctcttttcataatcgagtgagctattgctccagcaagtccctgcagcttcatttcctgactgataacggcaccactcttgggcatatagtccgaatagttaacccctttctcctgtatccagtccttaatgatttccacgaagttcttaggaacagctcccggagcacgccctttctggatatttaggaatacagagcttccaaataggattccaccaaactggtccacctgtatggtcagagatttcatcgtgcgccctgaggcattcactttctcctcagtcatccgggtctggatattctttttcagaatctccatttcctcttgtacaatgctcttgataggatccattaccgtcgaggattagtcatacacaatgcctgccccgtcgtttctttcaagactggctcgataataatgccagaattgatactatctgtagtatcaataggcacttgatacttcacattcccatggataggttcaaaatagccagatttattgacggcatctatgaatctcagcgcaagccttttcatgcgctccaccacacaatcctcagacaccgcatcgtcatcatgcacggttctgtcaaggaacgctattgcgcagtccggcatatccctcgcctttccgttatgcacatcaaagtttccgcttgacggctgtatgaaaacgacacacggggtcggaaccttgtccagatcaatattggctttcgtccagtcgttatagatgtagttcaccccctctatcattctgacaacggcgcgtaccttaccctctaccgttcccagctgcctgtcattatccacgacaatggattctgtgacggcctttacctttgtctctttactcgatctcatcacttaccacttttatgtttatatacttcacggagcctgcggtcatattccctaagctcattgtcattcttcatgcacttgtaaattcttatccatgggacactacgaacctcgttctgatccgtcatacccattcttcttgcataccagtcaagaataccgaaagagccgaatttcaacctatccactccagcctgcttctcttccctgtcgaaatgaggcttgatagattcaaagagcttattgatacgggcaacctccttattgcagaagctgacgaaccacagaacacgctctgcactttcacgcataacctcgtcctcgtcaactccaagtatcaccttgcagcagtttacgattgcagacatgccatcggggttgtcatgaaggtcatcgagctgcccgtaagaaatcatattcaagttctttggtacatcttttccacatacagaaacaggacgtggcagacccttgattgcagcatactgttcctccctctctttctctccggcacaggagaatatgagtgcatagcgatagaatggcaggtataaatgccgtttctccctcgctcttcgtattatcttcaataaagacttcataatcttcatgttcccaatgtgttatgattaattgtttgaataaactgttacactcgcttttatcccctgtccctgtggtttaacacggcggaaatacatcgccattataagtgcgtccagatagtcaggagagtgcccgagaattatcttcataacctccttcttgataatacccagcctgccggtatcgcggtcaatgtaagcctgcttcagcgcacccagctcgtccattatattcaccctctgatcaggggtacatataatccttatggctctcttattgataagttccgccagcttaaatgcacactcgctcttcagacaatcgtagcgagggtccataggaggagcacctccatgaaactctttgataccttccagataagactcaaggaacgaacccataccgtccgcatcgacaatggtaagggaacggggaatagaatcccgtatcatgagattcttcagctgagactccacctccttgccaggagagtatgtcatatcaacaggaatcctgaacacattccctacagcagacacagcaacaaagcggtcatgtcctttcccggcaatatccgcagaacagctatgcgcaccaacttcctgtatgtgctcattatggaacagatcacttattgcatcaaagtcgcacaaggtcgcagggtcatcgtcatactcgaaattaccgaaatacaacctctgtacggtgactggatccgcttgaagaaggttgtcaagataagctttctcaagatgaggattgtccgtcggaagagatttgataaatttcctcgtcttcctgatggttccctccttgtccggcttcacaaattcgttgtaaatccagttcctcttcgggttacaggtataaagggatttaggaattgtgtgccaaactgttccgtcggggttcttccccctgagaagggagaagcgcccgcgtaatactgatactgccttttcgcaaatctgctgagcctcgtcaagaaaagcgtcggtgatttccagagagcctatacggtcaaactccgggtccgaaggtttcaacttaaggtcgaaaaaaaagatttgactgccatttgcgaagttggcaatcatatctgtcttattgtaggtgacataatcccgcaagccaagcagcttgagtaccttgaagaaagtaacaagcgtggtggtcttcaatcgaacagactcctctcgggctatcaacccaacgcttccggccatcgtcacacgcctcaatatctgccacaggcaaccgaggaagctctttccaccgcgcgcaccacctccgaacatcacctcattcacggcggtgtcattagcagaaaggtacttcattgcgagtgcctgttttctgaaaagctttacggttacagagtcttgagacattgatatttccaactttaaaagcagggcctcgcgcgtgcgcacacgaggaaagcaatacgcttagcgtgggacaggacagatacagtgtaaaaaaagtaaaactgtccacccttccccacagccttattctatttggctgctcactttccttatcctctgaaatgcaaacccctctttcgggaccaacgccaagtccagaacctcaagcaacttctccacatgctcgatgttcagcccccgcttccctgtgagatacgaagacaaactgtgcatatttacacctgcacttgcagcaaccttattcaatggctgctccgtctcgttcaccctgagccggattttctgtcgaatcagtgtgtactttgcactaaggtcaataggtgagttccccgcttttgccaaatccgtcctctctggtttgtagtccttcggacgcacggtgagaccaagatacatcaccagtctttctacatcgtcaataggacatccccgcttccctgtgaggaatgtcgagaaattctgctgtaccagccccagatcctcacatactatcttcttcgatatacccagctccttgattcggagcgcaatcttttctctaattggtgtcatagcttatattctgttgtttttctctttctttatgtcgaaatggcggaacaatatatccacctcattgtcaataatagcgtcatctcttgcccctacaacctgttttgacacctcacgctcctgttctattatctcgttgatgtcttcgtcaatagtatttcttccaatgagataataacagttcactgcgttcttttgtccgtttctgtgagcccttgcttcggattgttcgcagtctgaacaggtccaagggagttctatgaacagttcatgcgaggcagcagtaagagttaccccacatcctccgcttctgtagtttactacgatgagcttacacgaaggattgttctgaaaggagtcgatggagagctgcttctcctctgcggagtctgaacctgttacggtaacaagggaagggaaatgcttctttaactccgatactacttccttgtggaatacgaatacgatgagtttctgccctccgtctatgacatcatggataaacgggatggcaactctcatctttcccaatgcggagagccggcggagatatgataccctcaccatcatctcccctcgcatggacttctttatcttcttattcgacagacttgcatattccttcaagaacttcacaaggttgccttccgcaagagaatattcctttcggttcgatatatccacaggaatatactgcctcatcttctccggaaggtctttcaagaccaaagacttgtcgcgtctgaagaaacaggtattccataacttcatattcaattcagcgttattgctcgagcctgaagccccttgacagtaccgacggcggaatttagccacaccgccgaaatcgtctatcctacgcataatcttcaactgctgaataaggtccgcattgccaaggacaatcggtgtcccactaagcatgaagatatattcaggtgtctgacaaatcttctccagatactttgcatactggcaatcgggagatttcgtgtgatgacactcgtctacgattaccgtattgaacagcgacacatgggagtcgggaatgatattcctcatcgtatgggaattgttcaccacacgggaaataaagtatttcctgatactctcatagttcacgattatgacggaatagcttcctgtctccacataacgccaccagtcataacgatggtcgtcatcaatgataagacagtttttcttcgtccatttctcaaactccctcttccatgtctctttcatcgccaaaggacaagccacgagtaccggatacgatttggccagccagcatgctcctactgcctgaagcgtcttaccgagtcccatgtcatcgcagaagaaggtacgcttcttttccaaggcatagcgcatacccttgatttgatagtcatacggtttgaaaggtattctcgcaggtagtttcatcagcggcatacggtcggcaaaactgtggtgaatcccttcgtcactatccatttcgataacttccgatgcgaggtgcctcttgacacagaacaggccaaagtcccttacgaaagataactgattccggggacatatccacatgctctcactttcagagaataccattcctggtatcttccgaatataatgtgagagcaactgtgtcgtctccatactgacacagacatcatcttttctttttatgatatatacaggtgtcatcaatcattttcgtcaggatcgccgaccttgaactcctgcggcgattccaaatcatccgtgatgaggttgattaccttcgggaacaaaggttgcccgtctccagtgatctccttgcgctccgtaaagccctcattctttccgagggtggagagaatgtagcgtaccatatttccgtcaggacgctctatccatcctataagacgcccgtcagcccctatcttcggtattcctacggtaagggcacgggcagcgtcaagcgcgctgtcaaacaagcgcattttgcaatctgtagcaatctccttgaagtcagggtcttccttacaccagttatatactgtctgcctcgtgactccaaacgcatcggctatgcgtgagtaattcccatggcaagcctctgcaacttctctgaatttctttagttctggtaacataattcttactcaaaaagattgccttgaacaggtggtctgcgcgttcccgggtttcgggctatcatgttggcaaaccaccagttccggcaagtgttgaaataaacatttcgtgattgagggaggctccagtctatgaacctgttgctgatttccattctccttgcattgatgatacggcagcggataaattcgttatccacctccagaacctcgccgcagctatatctgaatgcaagatgcaagttcttcttccagtcgaaattcaggtcaacaccgcacagatagtaatacggagcatccttcaattcaagattccaaacctgcttcatgaaaggatatactctgcgatcattatatccaaggagagatttcatacaatgctggctaagattcacgccacttacatagcgcaaccaaaggattttgtagatacctttaaactctgcgaattcaatttttaccatttctaaattcctttttttgttctgattataatcttatttgcatcctcaaagatacaaaaaaataaccagatatgcaatgttttagccctcttgtttaatcatatttgcaacctcccgaggcacgctcttacttgatgtttccttcctcatcttcaaagccgaacaccttcaaggcttcgtgctgtcttccgtatctttggttattgggcagctgcatattgaactcgtactccaatgccttgatatatgtctcacgaggaagctctctgaccttctcacaaccaaaaccgaaatacccggacttcttataagacatgaagggtttcagtccgaaacgctcggggagtgcctgaagctgatcctcagttaggtacttttggaagaaccactgaccttgtgagataacggcggtcaaccccttgtcgtcaaggaacatcacactcatggcatcatctgtcgtgttacgcttggcattcatggttttctcagcaacctctcgcatgcgaccgctgaagaacaccttcccccccatttcacagaaaagattgagacacgcaagaacaccgtcctctccctcctggcatgttacggaattgataacggcatcgcagatgacatactgaaactttcctttcttcctgacgaagtcaaagaacttatctatcatgtcgttacccttctgtatggaaatacccacacgattatgattgaagaattccagaccgatggcattgtagtagttatgctgaatgcgtactttgtcgatacacatagccttaccacaaccgaagtcaagaatcttcgtgtttttcggctcctccagcaaatatttcactacctcacgatagaggatggaccagtctatatcctgatgacgaggaggctgggctaacccctgtacaaactccggacgctcaaggttatcgtagcagaatacgccgtagtctttcttgaaataatagtcgaatactttccgcttgcccgcttcaaggatatagcaatgaactggaatatcaagcttctgacaagcatagacgtagttgttgccaaatacaacttcacctccacagacaatcgcacacaacgcgtcaccatagcgtagaatcaggcggcacatgtccttcactatcgaaggttggttggcagaatgtacatcaaacttatcgttagccactcccgtatagaactcaccctccttcaacgaggtatcaagacattttccaagttcttccggttcgtactccactccattgtgaatgaggttgaatgacatttcatcttgcatcttcacatcatgaacgaagaaacacggggccttctctatgccgacctttccagcagcctttgtacgctgatgccctgctacgatggtcattgtgtccttattaacgatgatcgggagaatgaatcccagcgttttaagactcccctgcaactcaacgaaagcctcatcgctcagcttgcgcgggttgtaatcagcaggatgaatgtctttgaaattaacgtattccataaattatctgattattgattttcaagtccaagattgtttttcgtcataagctccttgatgaaaccgaagtcaaccccagcctcgtcaacatactcttcatatagttcacgcagaagatcgtactcctcgcgtgttacaggaacgctatacttgccgaatgaaagcatatcgatctttctcggcttactgcctttcgtgaaagcgattgccgtagggtcatcatcaggattgtagaatattccctcatcgaagcccattcctaccagggctacctcatcgtatatgtcctccaatttgtcatagtcatactccccatactccttgttgtccttgacaataagctctttcttctgttcctcgtcaagattctcctcgtaatcaataggaacgacaggggcttcacaccattttgcccagaagtctatgacagcttctttctcatgctcggacattgtcgcatactcctcattttcctgcaacacgactttccacgagaacggctccttccccaagatttcttcctgaagaattcgagtccgctgatttccgcacaaaacgacatatttctcatcagtagttatcaacttagcctcaaagagcattttaggaaacaacataacactgcactgaagttttttccgtgcctccggcgtaatctttcgcggattgatgggatttatcttcaattccccaacattaattctcttgatcattttcgtcttgctttattttctttgatttcttacttgcttttttctctgcctcagcagccttgacagccccagcttcagcctgtgcagcagcccttgcagctacaacggagccatcgggatccaaaatgtgcatgaggaaaccgtcgagagacccgtcatgttcctccctgtatttctccgcctcacgggaaagcatgtcgaactcgttgtccgtgatgtagaattcaacatatccgcatttgaatttcttcaatgtgtttttgttctgctccagaccttggtcatttatcttgtcgctgtagtcatagaggtcccatgatacggtaccgaagaagtcgctgataaggtcacggttgaagtgctttcgcagaatttccggatcatcctcgccggcatggaggttatcttttacaagaagctctttcttgtcttcttcagtccagtcgtcaagagtgcgacagggtaccaagggattactctgccactctatccaatgagagataagctgttcctgctgctcttgactcatgtcacggaaaatagtctgctgcgcaaggaaatcctcaatggtatccgcatccatcgtcatgatgtttctgaaacttacacatcgtgcatttccactccagataacagaatctgagtcaatgcaaataggatgcacatcgtgcatccatggagacaggagaatgctttgcgtaagcttgtcctgcatgaaatcagtaatcgttctcgggttttgcggattaaccacaagtcccctgacatctaacaatttatccatctgtaaagtcttaattatatttgcgcacaaatataatcatttataatcaattatcgcacaaatgattatataaatcgtacttataatagccgtaaaactaagaaaagcggctatctaacagcaatatagcttccaaaaacaacaaatagattttgtttttcagagattttttattatctttgcagacaagattaatacaattcctttcagttctgcctttcgtatttgcgggaggttactttttggattggattaaatcttatttgcattttaacccagagtaactgtgaagttgctctgggtttcttttctattaggaagcaatacttattgcttctttcgtttcatgacacatacggcatgagcttcttccaatttcattgttacaagctcccagcccatacttccaagctcgttcagttcgtattccacttcttccgatgcggactcctgacatagactacaggttgcatacaaatggcaaaccttatattcaaaggaaacactgttcatatatcgtttatgtcaataataagaaaccatatactaatgatttcctttaagatcctcgccacgtttttccaatatcttacaatgttttatatcaacacacgtcttacattctggaaatgtcatacacattccggggcgcagctcatttccgcttctcttctgctctttttgttccatattccatatatttgattattcaccggaaggctctctccggctaccttttttccattcctctgtttgaccgttcttttctgcgacagcgtcatagaatctactggcgaagtagtccgacaggctacttgcagtatgtctgcaaacatcatctataaacgatgtttccttcagatgatgtatagctattgccagatgtataaaatctcgttcgttgttcatcatccctctttatttaaaagttcatttctaactttttggctacctttacaataggagtcatactgaattgccccaatagcaagaacaagcaatatgattcctactacaatccaaggtctctccatgtgaatactaaatggagacacactaattgtcgtccgcccgacaaaaagcataagggctacaaaaacaatgatacttagtacaattttcataatcttactttatttggttatcaataaatttatccaataatccctgttctttacacatttccagtgcttccataaagtagtatggagagttctttatagcagtcattccactcgttcctttgcgccacatttcagtctgccagtcctccattgtcatggtggtggatacattatgtttctgaagcaccttgttaatctctgcacattcctcgtacgcttcgtttatttgaaacacattacggacgcaaataaggatataaccaccgtagttaatcagaatcttctcaaaaacttccataactcattatttcatgaaacacatccatatcatgtgattacctttaccagaagtatgaccgaagagtggtttctcatcttgcgctattttatcgcacatctgctgtatgcgatagttcgccatttcacttgtgccatactaagcatgaatttcctcacaccttttttgcacattgaatttctctgttggttttgctcgctgttccatattacacctccaatgctctactttttacttcttgaattaatgcttcatcagacagtttgtcaatattatcttcgacaaactctttcacttcgtaatcattaaaccaagttgcagcaacagtgtcaagctctcctgctatgtcggtagcgtgatttaccaaaaactgctcttggtcagcacagctcaactcattgtaaacatcttcaatatctactgatacttttatttctactgttgttttcataattttatttctatttcgttacgttctaaaatctttctgtaatactcattctcgtcctccagctcttttatcttagcctttagacgcttcacttccttgttgtactcatttcgttcaaaggcagcaaatgtcttcggctcacggtgacagatgcaatcacgaatgtcgttactgatggcaacagcccaacagccgggaatgagcaccttaccaacgcctttgatattttcgtaatggcatttcatttccctgacctatgtggttgattgcctgtaatagcccaatctggcacataatcatactcaatttcttccattgtcagcttcttttaattgttgttctaatttgttatatataacaaggcttctgtcaagctcttctttcaattttgccattgcttcgtattcttctttttgaccaagcatctggaactgtatcctcatattctcgatatgtattcctatggcattaaagttgcaccgcttaatcaccaaaaggatttcatcaaaacattcgtccataacacttatctctttttctatccgtctcaaccacctcgatagcatataacagataatagctacagctgtacagttaagagttatgataacccagttcacaaaatatccaatatctttcatacctacttttttaatagttccctcgcattaaacctgcaccatgtgcagattccaagtaccacattaggtgcatagttttctcgtccgcacttaggacatcttacaagaagcagagtgccgtcactctcctgcatgacaccattctttaatattttactcatttttttatgaacctatttgatagtaccgtcttcaagaaggcgtttcaccaactcaaaaatgcaattgaacaacgaaatccctttacactctatgtaacattctctttgcgaattacaaaattcgacggacggattcttatattttgaaatgaatacggttcctgttggaacaagttgtaagagagcacttagcgaccacgctggataatctacttgcaatccatcctcttcgctgtcacgtatttcaggaaaagtgttccctgttggatacacaggatagtacatatctgcagaatgtttatctatcccaagtttaaggagctcctgggattcctcttttgtcgtacatacctgcctcatactcgcccctccgtagactggatcaaactcttttgtctttccgtagcaatctgcttcaggtttgtaaggttatcaatctcttctgtagtagcacctgcttcaacccgagatattatcttcttcgactcactcaaaaatgtccctttatccataaaagaaagttgtttaggatggtgctccgagacagcaccatccgttaagttaaaaagattaaagattaaatgctgtgcaaggacgcacatagtaactggtgcacttggtgtagtcgtagctcaagtaaccattgccaaagcccaatatccaactgtaatgctggccgctctcgctgcttgaccagtagtagtcgtcggtcttcataggctctccaccggcatactccagagccttattgagctgctccctcatacggtacatggccacaagcatggctgccgtcgggataaactctccatcgttcagcggtatgtcagtaccggcttccacgatgtgcttcgtatgtgcttcggcgtcccagtcaaagatggcatcaacctctctcttataaagagggctatctttctcgcacttgtctgagtccctgaccaaagcatattgcttaggtaggtctttcagagctacggcaaaagcgtggccgccaaatatgataccgatagacctaatgccgtctttatcattttcgccagtgaacagctcatggtgaccatcctcgtaaatgaggaaagcaagctctctatgcgtatcggcacaatgctggatatagctaacatccttgtcaggcgcttcactaacttccttccctttcatacatgaaacttccttgtactccattatgaagtcaaaagcttcctctgcatctttaacatttcccattgctctaagcaacaggaacttaattttctgactttctttcaaatccatattcgtaaatatttacagtttattaaatgattatttccatatctttatttgttaatactttccacacactttatcgtaaatcttagcgcataaatctatatcgtaagccgcatcgtgcaacttattttcttcaacgccaatgcccaactcctgggcaacggtagcctgcttgaaatcaaccatcagataccttttactggcgaggaatggagtagcgagaacaaggcagtcaaaggaattcgaccagaaataagaaccgaaatatttagagtcattcctttcaaaccacttgcgcaggaactgatcatcaaaatgccggttattatatccgacaaggaagaacttatcctttttatcatacttattgacgtacttgtttagcatatcaataaatttgtcgaatacctcagccattgggctgtaggcctcaactgcttccttagtaacattccctaccgccaatgcgtcaggatcatattcagctccatcatgtggcgcgaccttgaaatcaaaagtctctataattgcaccatctataactactcgcccggatatttggagaacaccatgcttctcaatatcaagacctgtagtctccatatcatagaataataatttcataatttattgttttatagttcatctatattcccttcatagttccaaaatccaagccttcctttagctgcaataggttttttgaacaatacaggattacgcactttccaattccacacgtgatcctcagcccatatagagctatcgttcatgacgcaatcatatatctctacggaacctattatacaaccctcggatagagagttttctcgctgctccctttgcatattcgcataacatctctcgaaagctgctatttgctcaatgctcagataatcgctaagcacccccgtatatttggcagcactcgcatggataagaatccttcccctaaaatgagttcggcgcgtccggttctctacgtcttttatccctgttacaaggagcgcagcccaaggctgtcttacagataaaactttcatatttactttcctttgaatatgttatactttgcgttcacacagaatcccaacgagagacaggcatagtctttcgaaagatattttctcacagattctttccaatatactttcggagaaaattcacgatgagccataatatatgaggatatcctatcgacgaatgaggataccatcgcacccgtataggtacttctgctcactcccgactgcagaccaatcttatacatatcgcagaaaccatatgtactttccaacatcttgtaagataactcgaagtctattacaggctccaaacttgcaaaagtcttaatcccttggccatgcagaaactgcatggctgcaattctatccgagtttggtgctgcaccatgctccatagcatcctcccctgtcagggtaaagcctacgcatagaaactctttggctttatcgttctttacaaggttcatagtctcagcgtcatcaatccactccgtacacttcgtaagaaccatgacaggaatgtttcttattatcagatattctatacagcgcattgtcaatggccatgtttccttcaggcacgggtctgtcatgaaagaaaagaacactccgccgtttctgataatgctcgctctgttcggcaagacctccttacgaaaatgttcaaaggcgtcattctcattcttgaaaactttcttgagcttaggttctcctccccacacagtagaaagaacaccatgtttgcaataacagtaatcacaatcatttgagcagcccgtgaagaaattaactgcccactgagcatactcgccagcttttccggtgggctggtataatgccttcccactatatttctttttctctttcttgctcatattcatgcaggatttgtagatggtccctttgtcagttccttccacatagaacatataacttctttgaaactttttgttttcccagaaataaagtgccgaatagtcatggagcttttaatccccatactcaaggtgcacatactatccgtggttttaattttcagctttaatccacgtatatccatgttggactcttttttcaattcctctatggaggcgagaaccttgctcatcaactccattttctcactgtttgttgccattttattctgtttatattgtttactaatatccgaacacgagcatagccgcatctcttccgtgttcactcgttcttccttggtaatgacataatcccctgaatgcctgctctgtcatctttgtcgcattattctttggaggaaccatgtcaaagtccacattttcatctttcaagaagtcttcccataccgaagcgtctctcttcaccgagccggctccttgctggatatttctcatgtgtccatctttcgcatacttatcattgaaccatttcctttgcctggcatcttctactctgattacgaaatgaaaacctttccgcttccatgttcgtattctttcctgtacccggaagattgcctcgtgtattttcattgtctttacaagtacaaattccttgttcttacaatcccattctgcatatccggtatgaacacctgtatcaatgccaatagcgaagtcgaaagccgaacgatgtttgagggaagcaaatatatctttctttaccattatccttcctccagttgagtttttgtaaacaaaggctcaaaacaacgcgcttcgctttcatcgagtcccgcgaagttccctttagaaggaaaagacttaaggtactcatagaaccgaaagaacagagaatcatcatcaccagttctgtcttcgagaacgaggagaaactgataaattctatctgattcattagcaaggtcgttcgcatctcctttgctgagtccagagaaagcattcagctcaccaatggcttttgtagctatcttaaagttctttagatcctgaaagcgtagctcataatttgctttcttgagccatttctctgtatccttcagcgcacatgaaagaagctctgataccagatacaagaggttaagtctgcagttagcattaaactcactcgccttagttaggtcaagctttgctccatttgattttttgtattcatccatactacttctgtttaaaatagtccaacaaggtgtttaattccccattgatacaatatttatcataaataatctcattgcctttataaattctaacagctgtaaggattatccctgactcccgcataattccgacttcttctgttagaaatatagcttcacggaaaggctgcagatcttccttatcgttcaatagcctttgtcgcacggttttcttcccttcatttgcattgaaaaactccaattctactttatatttcccgtcgatgaaaggtgatattgctctgccaataatattaatatttcccatcttaggttctcgcattgaacttatggaaatcattgcgtacagctatcaccgacactccgttaggatattccctgtggagccaagcgcaatagtctgttgcacactctatagatataccacctatgatagcgatgataatatccgtctctgaaagttgatttttcttgttcatcttactttttgaattaatatcttatttgcacttgcaaatataatcatttattttcaaaatgactatatcttgattatatttatttttataaagtccggacgactttcacaagcggtccgaacagacagaaaagcttcaggcagtcgcctgaatttattgtaaggttatgggtgtaaccctcatcgtatcaagattcaggtaaagcccgttagtatctatcgcacctcttgtgaacatcttccatagcagggcgcatccgagttgtgcaagtgtcgagttgataaacaggtcttgcttactaagagcctcggcaagagagcagcttggccctgcctctttttcatttacttttctcaactcaaacaagtcggttacagactttagaatagatacacaacctttattcttaggctgttctatcttatgcccagccgttccaagtattacctgccccctatctgtaagattcccaaaatctaaccaataaagaaatttctgatcatcatatccatagtcacattttcggagcttatcatcgatgatgaggcgagcttccactgtgtcaacacatgaaactacgatattagtaactgcggaatctcttccaaacatcactggctcacttttccacgcagtaccaaagaacatattcagtttggaaacgaggacgttcgccttgtttagcccaacctcctgcatagagaagagctgtctgccacaattggcctctgaaacgatatccgcatcataagcagtcacttgcatgccgggatgtccgagtttcctcagtgcatagtttattctaccgagagaagtcaggacttgcgaccctgttccgccaacacccacaagggataccgtaatcttatgccgtgggttcagtaaataattgtcgatataatgttgctttttcattttagcaaatcctttagtgtctttttcgatcttatcaattcatcaatcggaaatggctttcctgtcgatatgcatttcttcgttatggtagcgaggttcccttttacagggttagcgccaagtatatgagcaaactctgatttccagaacattgtttcccagtattctatccagttctcaaatgtactctcattcggtttctgaactttcgcagtaccaagacatacactgtcgcctacattgaagaaaggggcgttatataatatccgccttggtttacttcccttataggcatacacgcttaatgtccgtccctcggctacatagacgagtcctgggatcatcatttcaccatttggaatatccaacacctcagcaaaatacatcatcctcttttcaggcttcctgtaccaaataagcttgacgctttctatcttgctgcttacatatagcagattatctggaatagtaccatgtagagagtccatggtcgcctgtgtttttgtgtacctctcgacaaccttcatgatattggaaagcattttaacgcttaatggttccgctacgccgaaatttccattctttatttccctatgctccacatatgctccattttctgtttcacatgagcttttgtagaaaattagagcatgcgtcggtatcaacctattgctcaaaatatcctttatctttcccataattatcaaacttttctgccagtttattaaatttatccatccagtctccaaacctctttccgagatttctgtcagcctcaaactctcttatgtcgtcagctttagtttttcctgtcaaagggagattgttcagccacctacttgcctccatcccgctctgcatgtttgaattcaagcattctaacagttcatctcccattccgtcttcggaactatagagaattgaagtagtccatgcaattgccattctctcatcatcgtattcttcgtcataagaatcaggaacaaaatcgtaccattcaacatacattttacttatcagaggaaccccttctatcatacattcgataagttcaacctcgtcctttttgcatacaggaagatacgctttaagctcatccatgatttcattactactcaggtgcttctggctggaaatctcttcaaacaatttatagaaagaaccgcctttcctgtattgttttgaaatcaacagctcgtcttcgtcactttcatcgctaaactcctcattaccttcatctatccagttcacgatagcgtcaagataataattcgagttattttcaactgctccgatgtctatacccatgctgtcagatatgaactttataaaatccttgtagattctacctccctctggagaaaggaactgcgctggagcgcaatagaaaatacatatcgtgtaatccagctcctcaagaggataatagataacaaaacttagatattttccttcatagtccctgctcaggctcaattcatatcctgcagataatacctgcccgcttaaccattccgtcagcctcactattttgtccgaagatgtcttgcagccagagtagtctacattatactcataaccatagaagtccaagaacttccgactatttctttcaagtctggaaaagctttctttaacatcaattccaaatgtcaaaagatactgctcatcggaagttcttattggttctatgttttgactcagaaaagcaacggagtcgcgcccggaggcggaagaagaacttttaattcttcttcctccagacttgcatggacggattgtcttgttccctgttctaccgtagtatatagactttggtaaaaacccttcaacaactcctgcttgttgcatagcttcttcatcctttggttcctacagtcgtcttgaactcatatacagcttgaccatcctcaacttttgggccatggacattactggtcgtaagttcaggatatgttcctgcatagaagttcataacttcgtctggtgtcatagacttgtccggatctgacaatgttctgttgccgaacttgaaaaccctctttaatcctgttaaatttaatgccataacttaatcctcctcattttcgttatcatcatttctaccctctacttcttcctcttggtcgctgttaccggctaaagcgatgtctttgccatcagatttatcttcagccactccgaagagacttcctgcacccattttttcatcaatatccgcaaggatagtatcgatttccttcttgtccgagcaagaaagagctgccgctttgtcaagaaccagtctggcatccttaaacttctttgcgtcgatattctttttcgcaagggcaaggaagtcagtgtactgctttttcatcttttttgcctcgtcttttttcttattctccatttctgtctttgcccgggctgcatcgacctccttttcataggttgaaacatccgatacgaggccaagagccttgtctattggctcgagagcctctgcgaagcccatctcaaaatcttcaggcgttccgctcataacaaggggagctaagtctgagaccgcattgtcctttacactgcttgtgtccgggagaatgcttgcaacaagcttttctccactctttttgatggtcaatgtgagttgctgaccgtcatgcagatgttctgcaattgttttgaaaaaatccataaatcttaaatattaattggttacttaataatctcttggcaaatcaaatcaaatatttctatttgtgtttccaaagggcagtttccaagccccatacttgcgttggcacctttttgcgtgcagcggtcgtcatgccaccagacgattggagaatatttcttattagcaggtacgtccactttaataacagacctccattccctatcgaagtagaaccgaggtgatttcgtatcatcgaatttaaaggttttccctgcggcaacagtccaaagttctgtcataagatctttacgcattgctatgagcttgttctgaaagtctccatgcgcatgttcgtacagagttttcctcacttcaagatatacattcgtgatacttggcaatgtaaaaatcttcgacgtaaggttcacaaaaaaagtgtttttaatattcggcatgttcatttcgaccttggatacatctattgatgtttccttatcctcaacatgacaaacgactgagttcatcagtttaatagactgagcattattctgcgctaagagtttagacagtgcatctattgcctgctctttgttttcaaacattttcttcataattcaaaaaagttagtttatagaaaagccatggagaatcaaccccgcggctctgattttggtgttacttgatagaaaacttaaccccatctggcaatttggagtaatctacttgattgataaaatcaacgaattcttcttgcgtgatctttttgctatagtccttccagttgaatacaacctcgtttgtgtggttgtagtaaataacattgtcggttggcagcccactgtcaaggatatagagcatgatgtcacgctcattccgtgcttgttgctcagttttgttgtaccttgcaaggatttcttcgcgtcgcgcctctatcttagcaatgcgccgtgcctcgttgcgttcagcgattgcttcttctgaataatagccgtttgagattttcgtctcaatttccgctttttcttcagctgaaagttctaatctaaaatgctcctgttccggcgtatatgggttctcccactcaacacctgttttttcctccaaaaatcgtataaactcatcggcttctttctgccaacgggcaacaattccaaggtgaaaaagcatgtatttataatacaaatggtctttcgggtctgcgttcaacttttgcagctcaccatcggaaaggcgcaagtattcatttgcttctatctctggggaattacaaacaaggtatgatccattttccacagggtacataggagaaccatcgtggctgcataaatgcagtggaatgaatttcttgagttcagggaagtgctttgcgattaagtcgtgttgacaaccacccgaaaaccaaatccatcttccgtttccccgcttctcgtaaacatctgccgttatcgagaagtcggcgtgcatattatggcagtcatcgtcaagtgacacatttgcgcaaatcttgtacacatgacttccttcgctatagaaccttacagggttccatcttaaaacattacttttcataatacatttcctttcctgtcttttagaacggaagctcaaagtcttccgggtgatttattctgttaatagtttcttcagcaacttcaagaatctctctcttgtcttggcaagacaagtcctgccatgtaagtttatcaggaatacagcttgaaagaactatatttcctttccacaagtcaacagagatgatgaactggttctctacgaacgtaccgtctgcgtcgacccagccttcgagttcgttataggcgtcatctttatccattccgtcataatgatccctgttaatctctttatctggaccgacatacacggctttacacaggtacagtggctcacggcttttccttttgaggagtatagtcgtaagatcattttgtatttgaacttcgttctccattgtgatttccttttctgttctgattggtttactaatcttatttgcatatacaaatataatcaaaaataatcatacctgcaaatatttacaggtattattttaattacatttgttaataaatcataatcaaataagcggacacgaaacgaggtcaaggtgtggaagagttaccttttcgtagcatgcgctcaatcatgggatatttcccgggactgtcggatacaagcttaaccgggctgacagctttgttctctgtcttgttcctttcctgctcttccttgtggatttcttcaagatgattttgccaatcatggttccgctccttcaagaaaacatcaagtgacatcaatatcttcatggggtcaacggaaccaaagaacttctcgtaaacaccatggcgtaatctgccacaaaaaagtgagaattccagcacattcaggttgccgaagcaattcaatatctgaactccaagatcatacagttgctcaacattcaatttgtctttggcgcctgtgaatgtatttaccttctcaagctgtatctttatccactcgatggcaacatcctcattatcgtatgcatccgaaatgtctttcagagtagggacatccttacgagccgttagtgctgccatagtcgcgcatctcccatccaatataccctgaagatccggggtgaactggctatacagttttgacgggggcatcgtcttaccgattctcgttgccagagccgttttctctttgccatttttcgtcgtaggaagcgacattagaaaggatttcagcccttctgctgacagcagcgtcgtcaaatccgtgcattgctttgccattgttcctcttgtttttaagttctgaaattatttcgttgtagtgagaggctatcatcgctacagagaaattatcatttatccaggtcttgttgatagacagcagaaacttctccagtgcatccattacactatcgacatcattaggaagtggcgaagctctgttctgtcttgaaaattttattgcgttcaagagaattgtcatctgacctgcgtctttcgccgtccagtaatacgtcgttccatacagcgcaaggtatgttttctcgaaaaccttacgcgcgcgcttgttaaactcaactttgccgttaggcaaaagttgagaactgtctgttaagacatcctctttcttttttattttctttatagggggtatgggggattttttcttttttgtttctttctctgtcaaactggaggaaagctggagggaagctggagaattaccttctccggagagctcgcaatcttttgttttacagtcttttatgctttcattggagttggaggaaagctggagggaagctggagaggttttgcctttctttcgtgtcaaactggaggaaagctggagggaacggttttctattttaatataagttgctgatatagaatactttgacattgcaccagagctggaggaaagctggaggattattttatgttccaccaagttctttatggcagaccttacactccagtcgctctctcccaaaattgtacaaacacttttcctgcttacatgcacctcgttctcgccattcttcttagcgcaggcgataagatacatgagcaccttggctgtacaccccttgtacatccagtcatgcaagaatattctatcgtcaaacgaaacgatcatagctcctcaccctctcatgtatctgttcacttccttaacaaactcttccaccgtgtgacatacgacatacttctgaccggcctcggttaccgctttctgccactgtttctgtgcagtagattgcgttcccgtcggtgttttcatttcaatgcagagcgcaccataccccttgcgcggaacaagcagtatcaggtcgctcacgccagcacagaccccatttgcctcgagcgtgagcgcgccaaaccgccttcccgcactctcgttaggcacatggaataataagcccttagaagcgacggatggatataatttgcgaaattcagctatacactccatctgtattcttttttcggagactggcagatacttcaaatctccctttcttatgacctttttccttcctgtcagcagacgatgcaatactttactcttatctctttcttccatcagaatataacatttgtaagttgcttccattgattatctatccagccattaaccatccactttccggcacccgggcagtctatgcgtagattctccaccctgccaaaggtcttgatgttcccacataggtcaatgaaccaaggctgcttgcccggaaacggacggatggcacgtccaattacctgataatagagggcaagggacattgttgggcgagccattatgatcgtatcgagctctggatagtcaaaccctgttgtgagaacaccaacatttgctactacctttatttcccctgccttgaaacgacgcaagatgtcttctctgtcctttttctttgtctcccccgtaacgaaagcactattcggaatagcagctgtaagggcctgcgcctgtatgatattttttgtaaaaacaagtattcctctgcgtggaggtacgccttgcttcggatgcagcactcttttaactatggatatgaggtatgtgtacatatcgaaatattgaaaggattcctctacgctggcatcatcgaagtccctgccagtggtattcctttttaacctgccttgctggtattctttcggcgttacgtcgtaatatttcatttgtgcgagatacccttgctgaagcagttctgatacctgacacgtataaatgacattacagaaaatcctgggcttgcatctggtcaggaagcgcagtattgcgcggtgctccttttctatctcgccgaaaatatctctcataagctcacctctctcgtttctaatcggtgcattgatagagtcaaggcgatacggagttgcagtaagccccaagactttgcgctctccgtcttctatgaaatccttatacataccgccccgaggattgcactcgtgagcctcatctatgatgatgttgcggaagtgtcggaaatcttccatgtgatttgcgacgcttcctatcgttgcaaaggttatcttcgatatttccttcctgttcatggaagcagaatatatggagcagtcttcaactccatagctccgcagctttgcaaagttctgttccaaaatttccttgttcggttgaaaaactatagtcggttcggaaaggcgcgaggctatatcggcaataaccaaactctttccactattatggtgaatgaagaattgactatcacaataaagatgattcccatcaagagtgaatccaaaatactcacctttccctacatactcaacggaaaattcagttaccaaaacgctcttttcctgtaaacgaggtttagcctttcgtctctcaactctgtttggaagaaccttattattatgaaattctatgcatttgcttctatggagtttatgggtatgtctatagtaatcggtctgcttgagataatcgcgaaccgatatttcattaatccttgattttccgcaattatacaagtgcccttcattagtcttataaagagacagaatgtgccctccattgactatgaagggttctcccttgattggaataattttatacatatcatcaaaaccattgtgaagttgcagcacatttcttttggttccatcatcacccattagaatgtctccgatactaatatcttccacattctttgttgagccgtcatacagaagaatcttgctaccctttgcatgacaccctgttggtaaaacttccagtgcatggtatttgctgactggcgtactgaaaaagcgtacagcagagtcgcttgcctgtttttggtaatatctcagactatatttcatgcttgttgccattgtttacatactgttcatgcggaaaacatgaaggggcgcacagaaaagaactgcacgccccaattctttaatcatcatcctcatcattaggatcctgactgctttcatctgattcagggtcctcgatgttgacaattttcccaccctcgatagtaacaagtgtgccatcgttaaaagtgtagtcgccatcactgtctgatgtcttgtcgccgacttctggcttaccgccattcctgctgactgtgagttctaccttgtctccattctcgtctatcacattatatacggtcacgaaggggaattcctgttcgagatcctttggttctattcctctcacaagcacgcattgacctgttgactgtgcaaagtaataaacatgcttgcctttcatgtcgagaactttcacacatggctcgaacacggacttcgtaccgcgctttacattggttgtcacggtgttcatctgtgtctgcaggctcttgatacggtcgccgtaatgcttggtgagattggctttctcttccgtagtttccatcagctcatcattgagccggaaaatctcatctttcatttcagcaagctcctcctccgtgagcttcttgtcgaagtccatgttgccgatactcttaccattaacctcgaagaatgcttccagctcttctgtggtcatcccttccagcatgtcgtgagcaaacttcacatcttcttcatgctgctccggtgtgttctcttcacttgtctgtggctgttccagaacctccggattctccttttctttgttttccatcgtctttgaatttgttgttgaaataatctaatacatacttccttgcagtctcgtcactcttgagaatattgataattcccatgacgatatcctcctcttgtccggctctgccaaaagttgccgcatttccgtcacacgccatgtagagaaatgaatttttgttcttcgacgtgatacggcttctgacaatctgaacgacagagccgacaagttctaaatacggaacggtggctaatcttacaggggatgtccccagaatgggaatgcccgttccgtccaaaattggtattctactcatagctatttaataattgaattatgacctttcgttaaaaaccttcgtatccgtaatcatatcacggtttgcctccaaaaactctataaaactttccagtatataccgtagcttgcttgtagcttctttatggtcatagtcatagaactcttggtaatagtcatacgacagtactttcggcttcagctcttttggatatactgcgacagctccctctgtgccttccggaacctcatcattgtcaataaagtaggttggcttcggtgcgagccattcatacagcgggtctccttgtggcaatttaagcttccattctgtacgtgaacgccacttgacaatgctatactcgaagccgatgatttctttcatcttttccgagtttatcaagcagtacggatatacgtatctttgccaatggttctcaaatttaccgaacgagtacgatgttgttgttttaaggtcatatacaatatcgcgcttcagctcgtcaataaacccatacaactgaacctttccatatgccgtgtccatggttccctctacgaatagctgagaacaactgcctctgaagaagtctgctgcactcttcatactctgcaggtcatacagaaacacctcgtcctccagtccttgttgacggaagcgggctgctatcacaccatattccctaaatgtcttgaattcaatgtcggtcctgaaggtatctctgcatctatgcaggcaatcgacaagttcgttgaataccgttccattgtctgctgcaaggctgtggaacggaaccctattgatggagtcaaggagagactgtttaagtttctcctcaatttcctccatcgtaagagtatattcgcctgtgttcgcatttttattgaacggtccctcgtattcagcttctgcatcgagatacgactgaaacttatccaagaggctcggataaatgcgatactttatctcttgagagttcataggctacttctccttcgccgattcatatttaccatcggaacgactccatttcaatccaagcttcacgcatttctcatacaacagctggtttgcgtagagcctgatgtcaaagacctcttccatttcatcaaagtcctcttttgccttgtttgccgtgtccgcatcggcaacatctgcaatacggagttccacgtcgcttttgaggtcatcatagtgctggagtcgtttggtacgctccgcctgcgacatggtgtacgtgttcactatgtcagaaaggaaagtgtttctgattacacgtcctttcgcatctttggccatgtttccgtttgcatcgaggatgattggaaccttaaatactgatggcaggttacaagcattctttgcatagaaccgctcgcaaggcgtgaagctaataacacgctccgttccaatgagctgcaggtatccgacaaggtcaagttcctttatcaggtctccggctgaacttccgccaatctctggtcgaatcttcttgatgtctccatctttctcctcacgctcatgcgctatgaacacaaggttcttgcccatcgccagaacttgctgtacaaaagaattaaacatcgacttgcggataccatattcattgagagtcaaagaacgaattgggttcttgtcccggctctttgagatgatatccttatccataaaggatagcatttttcctgcggtatcaataacaatagtattgaacatcgccatttcgggatcggcaagagcctgtccaacctcgctccattcgttgacttcaacggttatcacctctgctctatgtgccatattcacgcgacggataccaccatcgaaatcaaatactacaaccggacccggtgcactgacaccaagcgttgacttacctgcaccaggttgtccatagataaggacactgatggctttcttctcctcaagctctgaggcctttttgaataaactcataatttaaattttaaagattaatacaatacttacttgcatttgcaaatataatcatttcctatcattcaaacaacgacatgtgattatgttttatcgttggtttgattatatatttatccgctcatatcagaaacaatttattgggtttgacatacataacaacttctgcggcatcgaaccgccacatagtgttgctggcgccttggcgttttgtcgcatgaattttcccttgtaatagaagtctttcaagccttttctctccaccaagcagccttacggcaagtcgccttgaaaattcgacaccccggagccttacgacaagacttctgaagcgtatatccgattctctcaacctctctaccacgactccactctcgccttgggtctctcggctggctctgcatatctttctatcggagacattcttcttctcaccataagaatccgagcatttatccacagagtagattgcgcaagtagaagtatggaaagaatggcactcagccctttcaggcgcacctcctttgcattccacacttttcctatacgcctgcaaaccatccacagtacgagttcctgcattgatgatatgcccagcttctggtatatatgctttttgtgagttcttacggtccataccggctttcctacggcttctgcaacttccttatcaatcaacccgcggcagtagcactcggctatcagtaactccgtgggactaagatctttcctcatgatattctgcgaacctccaccgtgaaatcttccgcatgctctaccatttcataattccaaccagtacgcataccttctttcaccattcgctgacatgaaacatagacactcgaacgctgctcgatgggaaagctatgactctctccaatctccagttcccgtaatgtcgggacaatgggctctttcttaactaaatcttccatgtaaaatcctttctgttctgccgtttcgcacaggatgagagtattgccaattatcagcagatacaatcattttgttactttttggtataaagcttatttgcatttttgaacttatttgcctatctttgtaaggcgttattattattattatttgcaaatataatcatttctgcggatataacaaaagaatatataatcaaatataatcttttaagattttttaatcaaacctgcaaaatcatgagaagcagactaaaaattagcaacatggatgcaacaaaaatcattgacaaggtgttgaaggcggtaggcctcaacgccccgacatttgccaagacgattggtgtgaactaccagcgtatctttgacctgcaaagaggaagggtgaagaaattccacccagaaatagtaaaaggtattcttgaaaactggcccaacatgaacgccaactttctctatacaggagagggtgaagtcatgctcagtcccggacaacccgcgcctcagtcttctatagaggacatggtgaacagcgccgtggagaaagtgcttgaaaaagaagaataccaatctcgtgtcaaggctgttgacgagcgggagcaagttctaaacaaaagggaaaatatgcttgcggaaagagaagtcaaggtgaccagtatgtactctgaattgatggaaaaggataaagaactccgggacaaagaagcaaggcttgttgaacttgaaaggtcaatcatgtcaagggaacttcaaatggaagttaaaaaaaagaacagagaatattaatcgtgacatggggggatatgacgaatacttcttcgacaactgcggtcctatctacatatttaatgaccataacaaaaataaaaatactgctgtgaaataacagcagattgtggcataacgaatcgttttgtagtcgatagcctataatacattctatataaactgctgattttcatagaataacatctaataatccaattttaattatattaaggcggttgccctccttgtctgtcttggctgcggctgtgaacttctcccaatcctccgtcatggcggtgatgactgcgttgttgttctgtagctcgcctgtcttggactccaacttgaactctgactcacgcctgcccttgttgaacgacttgcgttccccttcgagggaggcgatacgtttctccagtttcgctttttcaagcaggtctgtattgcccgaaagaatggccatgtattccgagaagttcatacccgatttctcgtccatcgcaccctcgtcaatggtacgcgcccccatcgctccgcttttcagctgtgagatgaaggtctgcttgcaatgaagcaggttgaacttgtaactgtccagcgacttctccacggcgtagatgacgacatctacattgtttcccgcaaagtgcttggcaatctcgttgccggcacgcacgccacgaccgtcacgctgttgcaggtctgacggtcgccacggtgtatcaagatgatggatggcaacacaccgttgctgtgcgttcacacccgttccgagcatactcgtggaaccgaacagcacacgtaccgtcccggcattcatggcgtctatcaccgccttgcgcgccttgtcggccttgcactcctgtatgaaacgaacctcatggccggggatgccgtagtcctccatcagtttgcgcttgatttcggaatagacgttccagccgtcgcccggctgataggtgccaaggtcggaaaatacaaactgcgtacccttctgcgagtcgtacctgcggtaatactccgcaatcgtcttggcgcagtggctcgccttgttgtcggggtggtcctcataatgcgggtctatcatgcgcatgtcaagagccatcttgcgggcataatcagtcattaagaatgaagggaaatagggggaaacgcaaggaatgtaactatttgaaatatcatcatttagcatttttatgctattatcgagttaggcgaaaggaagcatcaaacggcaggagttccgttaccaaatcgtaacccatcaaggaaaaagcaaaaaggggttacgaattgaatgttaacaactgtgtcataggtttttattcttcatctttcatttttctgcatcgctcgggaacacttattcatctgtacctttgcaagcaaaggaaatttagaaaaaacgacagaaaaatgaaagaaaacaaactcaaagtatcgttcttcgttcaggcgaaacgaaccgacaagaaaggacttgtgcctgttatcgggcgcatctccgtaggcagaacccattcgggcttctccaccaaatgcaaaactccgcttgctctttgggacagtcgtaagcaaaggcttatcggcaagagcagcatggctgtgtccgtcaatcagaaacttggtgaatgcaccgcacttatccacacacgctttcacgaactctgtgaaagagaagaatcctttacagccacagacgtgaaggatgcctatcaggggcaaatccaccgccaagccttgctcttggagagtttcggggagtatcttacacagacaaaggagcgtataggcatcgaccgagccttgaagacgttcaaactccgtacctatcagctatccttgctccgtgagtatgtgcagaagaagcacaaggtaagcgacatcccactctcacagctggacaaagcatttatcgagggcttcgagtattatctcaccatcgaccgcagactgaaacgcagcagcatatccagtaccttatccaccttgcagaccatcgtccgtatgacggtaaagaaaggtgtgctggacttctatccttttttgggctacagttacgagcgaccaaagggtgaaccaagaagcattacgcaggaagaacttgagcgcatcatcaacttggagattgaatgggagaactatcgttttgtccgtgatttgttcgtcttttcttgcttttcagggcttgccatctccgatgtccgcaatctgagagaggaaaacattgtcttggaagaaggcaaactctgcatcaagggcagacgcatgaagaccaagaccccgtatcgtgtacaggtgcttccccctgcgctgactatcatgaatcgttatagagggataagggcaggctttgtctttgacgtgccaaccaccgacattgtcctcaatggtatgcactacatacaacgaaacatcggcatggaaactccgctaaccttccacatggctcgccatacctttgcgtcgcttatcacgctctcggcaggtgtacctattgaaacggtaagccgtatgctcggacacaccaacctgagaacgacacaggtatatgcagcggtttcctccgaaagaatccatcgggatatgcagaaagtgcagcagcgaatacaagatacattcaccttaaaactttgacattatggcacgaagtacattcaagacactcttttatatcaatcgctccaaagagaaaaagaacggcaaatgcccaattatgggacgcatcaccatagacggagagcaagtgcaatacagcacgggaaaggaaatcgctcccgaactttgggacagtcgtaagggacggtgcaaaggaacaggcgaagagataaagggaattaaccgctatttgcaaaccaaagaggaacaagtcaaagcgaagtatcaagaattagtctggcaacgtggctatattaccgctgagttgctgaagcgtgaactcatggaagaagacaagcccaaaggttttcttatggaggaagcacgacttttcatagaggaaaagcgtccttgcgtaggaataacggtagccaagccgacctttgccaactacatctatgccacacaactcattgaggcttatttgcgtgaacgcttggggctggaggatattcgctactcatcgcttgactatggttttatcgaagggctggacttctaccttaaatcagagcgcaacctttctcttgccactattcaggtagcggtcatcttccttagaaaactcatcggcataggtcagcagaagaagtatatccgcatcgacccttttgcggactacaaggcagaacagccacaccgcacaaggcgttatctcactacggaagaactacagcggatactgcaaacacccatcattgacaagcagtttgaacgggcaaggcaactctttcttttctgcgcctttactggtctggctcgtgtggatatgcaacggctcaggctaaagcatatcatccgtaatgcagacggcacggaggaaatacgcatcaaaaggcagaaaacggatgtagaggcgattattccgctcctgcctattgccaagcaaatcctttcgctctatatcaaggacaagaaagcggacgacttgatattccccaatcttacaataaggaaagcatcctttgcgtgtgtgaacatcgggcagatatgccggatagataagggcttgacctttcacatggctcggcacacattctcaaccacgatttgcctttccaatggtatttcgatggaaacgcttagcaagatgctcgggcacagcaatatcggtacgacacaaatctacggaaagataaccgaccataagatacaggaggatatgactgcactcacagacagggagcatactgtatttgagggttattgtgagtcgatagcacggcagaacgttccattgcaacaagcataaaaaggaagtaattaccaaacatttattattcacgattgaaaaccaaacgattatgaaagagaacaacaagctggaactttcttactttcgattgaaattaagaagttacatgagtgagcatcaccctgagagattgaaagacaaggaatttatcactgcacgggcagatatggctctcacagcttactgcgatgccgtggcgcaaggttttaagtaccccgaagcggaaagcatggcaagcgaggttttgtatcaaggcttgcatttttccaagtatgacacgcttgtatccgtgttggaaaacgagtttgaaaaggaactgcctgcacctcttccagagaaactcgtacctatactgctgtcgaacaaggctattcaagccacattcgacaagttcggtttgacggacacatttgcttctgacgagcaatacgaccgtctttacaccgaactcacaggcacgatagtgctgctcatcgagagcaatcatttgccaataatcggtcagacggaggggtaagcccaaaggcgttgtaagcaaaggcacacgcaaagtccctgatgccgtttcttatcgtgcaaagatacaacggcagccaatctgccctgcaaggtcaagtcctgcggatggagagaagaatctccaccgtaggatttttcttttcaagttggtactgccattttcaatattcgtgcggtcgtattcatctctcccaaccttgcagggcagggctgccgtatgagagtataggcacgacaagaatacggcatactcaggctctttggacgcaaggcgtaacagccaacaatagataggactgacgataatacggactatctgttgtttgtacaatttattgtcatgactatctgttgtcatgactatctgttgtcaaaactatatatcgtcaaaactatatatcgtcaaaataatctatcgataaaactatctatcgacacttcgacatctcgatttgtcgaactatcgaattatcgataaaacaacaaaataataaaaggaaagagccggcacctcatctcattaccgcaataacacaaatggatctcctttggtcttttctcttgttttctctctatttccctgcttatcctcatttcttgcagcggtgcttccgagggtttacttttgcactcgataagtacggcaatggactgcataacagtttgtttgccgagtaacaataaagtaatcaaaacaaaatcaaggcaatgaaactcattatcatcgaccgcaaagcgtgggagcggcactgctccgaatttgcagactttatccacagtattgaacagcttatcggcaatccgcccgaaacggacgaatggctcgacaatgaagccgtatgccgcaggctcggcatcagcaaacgcaccctgcaatcctatcgcgatacgggtaaaatacccttctccatcattgggcataaatgctattataaggagagcgacatcgcagagttactgaatgcaaacaatgaatgaactcaaacaatgaatgaactatggaagagaatgaaatcattacacaggaagaccctcagatgcagttgttttcacaactgatggaaggaatattgacgaaattggagcggtattgcgctaccgcccgtccgatgctggacggagaggtttacctcactggtgaggaggtttgtagccaattacggctcagcacacgcacgctccaagagtacagaaacttaggaacgcttcctttctacaaaatcggagggaagatactttacaaacagagtgacatacagacaatgcttgaaaggcattataacgcaacacctaagaaattatggcaagaatagatgaactaaggaaacaacgtctggaacaagcccttcgagatatgggcaattatggtgttaagctccgcaagcccgaagagttgcccgattttgatcagcccatagattatgaagaggaaaagaaaagatttgagcctgttaaagttgaggaacaaaatgacgaggagagtcacaaggactattctcaaccgtcctatcaagaaacagagttgtcaccaacggaaagggctacttctaccgaagaaaatcatcaacgaatggggaaaacaagggacaggaagcaattatccgagtttcaggggaaatatctccaaccctttcgcaacagccaccgcaaagccgtgtatgtatcagaggaaactcaacgaaagttggacttcgtggtaaggaaaatcggtgagcagggagcaagcgtttcaggatatgtggagcaggtgcttcgagaacatctcaaccaatacaaagatgatgtggaaagatggcggaaactctgaagtactgcattcctcgaatgcaagcctacgccgagttactgtattcaatgaatgcagtaacacggcatgggcttataatcccattttctacatcagcaaggtgtgtctttgtaccacaaactgccgtttgtaccacaaagacccttgccccgaaagggggattaaatcactccaaagtcgtgattagaaagcaatgaagaagcaaaaacaaaagaagccagacggctgatgtgccacctgcccaagatgggacagatggcacatcaggatacctaattctgaagaccagcagaagcttatcagactctaccgcaagtcgggagcaaagacaaaaagtgattttgttcgagtaaggctcttgggtgaagcctttaagttcatcacagaagacccatcaagggagtattacttagagaaactctcaaaaattgtagccttgacacataagataggcgtgctatacaatgaagccgtgaaaatcctcaatgcgtatcattctgtcgccactgctcaacgaatgctggataaactcgaaacctattcccaaactctcatcagattgcaacagcaagtcgtgcaattgacagaattgtttgagagaagacagaactgaaggctgataaatcataatttagaggcgatggcaaaacaactgtatgactattggttcgtacagttcgactttcccgatgagaacgggaaaccgtataaaagtagcggtggaaagatggtgtggaatgagaagttgaagagagagataccacaagggtggaaagattgtaaaatcaaagactttatgagaatcttcacaggtaagaaagatgtgtccaaagctgttcctggaaattataaattcttttcttgtgcaccggaggctattacttctaacgaatacatttatgacggatatgcagtgttggtttcaggaaatgggagttatacaggacgagtaggtttttatagaggtaaattcgatttgtatcaaagaacatatgcttgcgttttagatgaagaggtgcgtaattttccattcttctattatactttaagatacttatttcaacctatatatagtggtggtaagcatggctcttctattccatatattgtcttaggtgatttggctgatttctgttttgcctttaatgaaacgatatgtaagaaatttgtagatactgtaacgcctatgttcgatgaacaactattgaggctaccagaaatcgaaaaactcactaagcaacgccacgaacttctccctcttctaatgaacggacaagtaaaagtcggtgtcgagcgttctcgactaaattatgatttaatctttcaatgttctccgaagttttcgttattatggtatgtcaccaaataataattagatgaaagagaaaataatagagaacattcttgccgagatgtctgatattttggatacaaggcaacaagcaagattgcgagaggtattgaaaaccgcttttgaacaagtggtaatgatgccagctgaaagtgaagaacaacaacgagagcaagctaatggagaactactgcaagcctttatttctgccaagaaaatagagggttgttcagataaaacgttgtgctattaccaatcgtccatagaagccttgttgagaagtgaacaaaaacgaataggtgaactcgaaacaaacgacattcgctcctatcttgctcgctatcaagaagaacgtggctcaagcagagttacaatagacaacctgagacgcatattttccagcttctttgcgtggatggaggatgaagactatattgctaaaagccctgtacgccgtattcacaaagtgcgtactgaaagccttgtcaaagaagtaataagcgatgaacacatggaggtgttgcgtgatacctgccatgaaatcagagacttggccatgatagatttgttggcttctactggtatgcgtgttggcgaattggtaaagatgaaccgtgaagacatagattttcacgagcggcaatgtgttgtctttggtaaaggcaacaaggagcgagaggtctatttcaacgcacggacgaaaatacatctcaaacggtatcttgaaagtcggactgacaataatcctgctttgtttgtatctctttccttgccctacaacaggctgacaataggaggggtggagacacgtttgcggcaacttggcaagcgagcaggattgaacaaggtacacccacacaagttccgccgaaccttagctactatggctattgataaaggaatgcccatagaacaggtacaacgattattaggacatgtaaagattgataccacattacattacgctatggtcaatcaaaccaatgtaaagatggcgcaccgaaagtatataggctgacaatagccattttattatctaaaaattcttaattatgaacttcgttctgtatctttgcatataaaatgatagtctgtaataagaccatagaatatggaacaagctaagaattgggagggtgttaaaccaattactgatgttaattggttaggatgtctattgtcatctaatttaaaaagatataaattaggagacatagctgaaattataataagtagcgttgataaaaagaccaaagatggagaacaaaaagtaagactctgcaattttgtggatgtatatcataattgggctatcaccaaatctatgcataattcttttatgattgcttcagcaaaaggaaaagacatagaacgtttatccctaaagaaaggatatgttgcttttacaaaagatagtgagacacgtgacgacataggtatttcaacatatatagcagatgattttaacgatgttattttgggctatcattgcgcattagtaaagcccaatgaagatattttatcagggaaatacctgaatgcttttttgcattcaaattatataacgaaatactttgaactaaatgctacgggtagcggtatgagatataccctgtctatacaaactttacatgatatgcctatactcttgccttccttagaagaacaacagtatattggcgatatattttcgactatagatagaaaaatagaacttaatcgtacgataaatcataatttagaggcgatggcaaaacagctgtatgactattggtttgtacaatttgattttccgaatgagaatgggaagccgtacaagagtagcggaggtaagatggtgtggaatgagaaactgaagcaagcaataccagaaggatggaatgtagatgtaatcgggaatatactggacaaatatccaactactaaaagatacgagactaaagagtatttgtcaataggaaaatatccgatagttgatcaaggggatgcctatattgttggttttaccaacgaaaacgataacttactgagcagataccccgcagtgctattcggcgaccactctacgaaagtcaagttgctcgacttcccttttgcgcgtggtgcagatgggactcaaattttatactcaaataatcttttggtgagtcaatactacctttacttggtcattgtatcattacagatacctaatcccggttattcaagacattttaaatacttgaaagagttgccaatagttattccccataagagtgtaattgatacttttacggaaatagttaagcccttgtatatagaaaagaaagagaatgtatttgccaatatagtattgactaggcaacgcgacgaacttctgcctcttctgatgaacggtcaagtgtcggtaaattatgatttatcgcacgattgatttcaattttacggtcaatgtcaaatagaagttgccctatctgtttttgctctgccaaagaaggtaaccatacggtgcagtcttttattttatcaggcgaagtgtgtctgattttggtttgttgggcagccgcacttagttgttgctttaccatgttggaggaaatgagataataggcgaacttcttatcaagtagttcttcattacatataatcttggctatatcctgactttgaatatatttcccgctttcaggaatccatgcggtagaaccaagcaaacctatagcttgttcggttaatggagttatcaaatctcccttttcaagtagaaattcctccttgaactctcctgtataaaaaagattgtccttagaggtattctccttaaagcagttgttgcgatagtcaaagttaccacaggtcaggcgaatgtatttgcccgatacagcataataattaccgttaaggcttgcgcctcttattacttctatcaattctccaagtttatatttcttcattgccgtttttgattaaaaaggaagttcgtcatcagaaatcgtctcagacttattaactggtggataattagatttatagaagttaaggagaaataaaccaacagtggttgttgcattgacgacaaagtaagcaaagacagaatctttaattattaaatctccatcagtttttccatgaaattccgtcttatcgctacgtaaaacctctatcgaattccctatacttattagagaactagctaaagtttttatctcgttcggaaaattgtcattactctgaatgccaaaagctttgcatatatttctaataagttttgtcaaggtctcgttttcattccatttcacgtttatttttgagtccttcagaatttctttgatgatactttcaagagcagaatttgctaatccgatagcgaggcttggatctatctctacatttctaaatgctttttcaaatgttaggcttgctgtttcataactagactttaattcatttttgaaagttggtatgcttgggatataatcaggagtttctatccccaaatctattgcaatcttcagtaatgtttcgccatcgatattatggagtgtttttgctgcatctattttcttttttgcctcatctctataataaaactggaagttctcccagaaattattccaactccgttcttcttgatgccatttgcttaaatacgtttcaacattttcataacttctgaattgctcaaataaacaggtacttatcttttgaactatatccatttgatattttggagagatactttggttcataacaatttctttaattcatcaatacttggcaaggctctacgcagtttctcaggcatttctgctgatgtcttataggttgccactcccataggcttgtcatattggcgcaccatgtattcagcgtagttcttgttagcacttcgacaaagcacaatgccaatagtaggattttcgtgtggcttgcgtatcttgtcatcggcaatggcaagataggcattgagctgtccaagataggaggttttgaactctcctgttttcaattcgattacaaccaaagcattgagttctcgattaaagaatacgaggtcggggaaatgctccacgccatatatctccatacgatattgattgcctacaaacgcaaagtcgtacccaaaggtcataataaacttcttgatattgtggatgatttgctgttccaccacacgctcgtctatatccgctacatcacgttctcctatttcctcaatattgatgaagtttagcagatactcatccttaaacgccataaccgccttacgtgacaaatctcctttactgatagtggctgtaaagttgttgggtatgtcggactgatggtggtagtcgtcgttagccatcgccttcttcagagtttccacagacatgtgttcctcggcacagcggtggatatagtacgaacgttcatcaaacgacttaactttggcaagaatacgtgagtgatgggtgaaaggaaccttgaaaaaatcatctattggaaaacctgccgaatttgtgaattgcaattcacgaattggcaaatggaaatcttcggtattatctaaatcgtgaatcgcaattaacgatttatccttttcttcttcggcttccactgatgtagcatccaattctttccattcttcatagaagatacgcatcagtttaagactatctgctgaatatcctcgcagtcctggcagtaattggcgcaatcgggtacttatagcctccaatgcaccggtaccccaaactccttgtcgtgtgttagccgaaacatatttgcctacactgaaataggttgccaactgaatgcgattaacatctttggctgcttcatactgtccttgcagaatagccttctttatggtttctgctgcaatttcgtatgcttgtgatatatgatgttgctccataatctattttactcgttaaatttcaaactatccaactgacgcatgatttcctcttcaagccgatggctttcagcaaactgttcagtgagcgtttgacggaaggatgccatccgggtattgaattcctcttcggtaatgtctacataatcaattttgatgtcgaaatattgccctgcggagagcgaatagcctttttccttaatgtcgtcatacgacacacaaacagagaaatcgtcaacgggtttgcgctcacggaaagtagtaacaatttgccctatttcaaaatcacgcaatcgcttcttttgattgtttccttctttatattcttcccccaacttgctggcatcgataagcaccaccttttgtgctgatgccgacttgtcaaaaaacaacaccgaaacgttagtgcctgtgttggcaaatacattgcttggcattgacacgcaaccataaacccaatgctcatcaacaatgcgcgtgagaattttcttttcgataccacttttagctgtgataaaacctgttggaataacaatagctcccttgcccgaatctttcaaagaattgataacgtgctgaataaaacaggtatagatagccattgactcttttttcttggcaggaattttaggaactccagcccaaaagcgcgcaggttgggcagctatcttttcgcgtgtaccggagaaatccatcttaaatggaggattactcacaacaaaatcaaattggcgtaagctctgcccaccatcactcttatgataaggcgaaacaagggtatctccctgaatggcgtagtctaaagatgaaacaagcccattgagaagcaagttcagtttcaacatcttgttggaacgttgggagatatcttgtgagaagatcgtacaacggtcttctcctatctgatggctaagtgccataaggagtgttcctgttccagccgatgggtcgtaacattcttgactatgcaagttggtatcatcgcccacgagcaaacgtgccataatggtagcaatagcatgcggtgtgtaatattctgcatacttgcctcccccggcagtattataatctttaatgaggtattcaaagatagaggcaaagaaatcgtaatgcctctcaaatgcatcctcaaaagagaaattaaccaatttatcaaccaatgcacgtgcaaaatctgcacgatgagccgtgtcggtaacaaaatttgtcagggtttcaaagagtggtatcttggtattatcggtggtctgcgtagagaatatatcagcgttcttttcggcaatgtctgtcattgtattgtcgaagattgtgtcaaagtcgcctttgctctgctgattccaaaggttggaaataagatggtaaggttcgagaacaggtacatcagcactcaatgaactttgcagcaacattcgctcattatcagggagtgcagcatacgccacctcccatttatctgcttccttgattttcttggcaatctcgctgcgtgcattcttcagttcgtatccaaatttatcgttaagaaacttatataagaaaacctgtgtgataattttatactcgttgccatcattacccatgccataattggcacaggtagctttcagctcgtcaataagacgaatggtttgttctttaatatccattgctatgaatgaccgtaagttgtgttatactgattgagatattgctgggctactcgatccttgatgaacttataatcgtccatctcgggctttatttgtggaaactggtacaagcaaccactaataagcgatagcactgtacgtgagaaataagcgtcttttttcaatatatcgcttttgtcatacacttttgcgtcaatatcttccttgattattttcaagataaccattatttcctcatccttgaatgagaacatcggttttttatcttctaactcccgctttttgtttacttcgcgtatgcgcttgtggacgcgcgcaaactttgcatctccattatactttttcaagagagcattgttccttatttgtatctcctgcaaacgcttcattacatcatcaagcgccttcgtttcttcattaaattttgccacggtatccacaacaaagccatgttctttaaaacgctgtgtaaaggcttctcttaatgtaacaaactctgggtcgtcttggtcgacattgttggtaaaggcggtaataacacgttgccatttctcctttaatgccactgtgcccccaatgatgtgtaattcttccgtcccaatctttgaaaagtcaaattcaatatcaagcatagcctcattgatgagcaactttgtatcatcgctcatcttaaaagcttccttttggttaatgatgttgatgcggtgttgtacttcagacaataggtcgggaagtttggttaattccaatttggagaactgttctctcatttcgctatcaccaaatgtgcgaacgatatttgccatattcttggcagaaacaagtgcatgcttcaggtcaagcaatactgctttatcttcttgggtagaaatttctgtggagaaatcttcagcattatcgtatgaataatcgaacagtacttgcctgatttccttcatctgctcaaatatttcttctttgttttctataacttgcgcaaaagtctcggtattattgccatcgcccgtttcctttacatcattaaagcgatttaactcttgcagataggcctcgttggtttcttcaaaattgcgtttgatgtctgcaaagtcaatgagaaaaccatagcgcatatccttgtaagggcggttaacgcgtgttatggcttgaagaagattgtggtctttgagtttgcggccgaaataaagccgttttaggcgtggggcatcaaaacctgtcagcaacatattaaagacaatgagaatatctatggtcatatttttcttaaagtcttttactatctgcttacgagtttctttatcctcataatcgtgaagtatcaaacctgcgtgcaggtggagcttatcgctaatttctttctgtatcttatcaaagtgggcgaaaagtttttctgcctgaccgctggtctcgcaaataatcataccacccaatgtttcatctccctgtatcttacggaatttaaccaagtcattgatgatataacgcagaagttcgtccacataattatcatgctctacaatctcgactttcttaatatcttttttctcaaccaaagtttcaagtttctcatgcacttcggtgagtttctcccggtaagaagtttcgatatcttcacgaatgattttaagcgtatagccgtcagctattgagcggtcataataataagtgtgcagataatttccaaacaccttgcaggaagcgcgttcttctttcagtagcggtgtgcctgtaagagctatcttaatggagttttggtcggcatcgaacagattcgcaaggaaacagcctcccggactataccctctgtgcgcttcatcaagaataaagatacgttgcagattggtagcgtaagaattaagttctaccttttcattgtctttttcaaaacgctggatattgacaacggttatttcagccttaccactcgtaccttgctgagcttgattggtacggaattgttccatcagctcctttcgggtgttggcagtagatactaccaagcctcgtgcttcgaactcctgtgttgcctgttccagcaagtcaaggcgatctacgataaaataaaaccttgcaaccttattttgtcttgcaaaataatcgctgagtatgtaggtaagatggaaggcaagagcagtctttccactaccttgcgtatgccaaactaaccccgattttaccccctcggaaagtttgcactcgatagccaatgcagcaaacaactgttggtagcgcatgatatgcttctggtcggttgtttcaatcttaccgtcaacttcacgctccatacgaacgtatgctataccatactttaggatataaagcaaacgttcagggctacacatcgaagtcaagatgcgatttgtgggcgtatatgggcttaaattgctttgatactcaggacttgtatgtattacttggttattgtaatcagctaatattttcttttcctcttcgctatcagtctctaaatatgggtactctgcatgaaaaggtgctactttcaagcccttatgattttcttctctgaaacagttgaaagcagcagtttctcttgctcctgtgcaatagaatgcgccttcaacaggtacaataccacctaaagtatcatactccatattattggaaaaaatcattagttgggtaatgttgatgaacctgcgaaacttcttgttagggaatcgctccttgttcattcgcatgctttcagcaaccattccaccatgattgttaggtttctttacctcaacaaaacaaagtggaagtccatttacaaatagagttatatcaggacggaattcgtcttgcccattcttacaggtaaattctgccgtaaaatggaaagtattattgtttggatgctcaaaatctatcaactgaacaggggatacagctttaagacgttgataaaatcctcgccccaaatcatcgtcattgagttctttgcgaatatcttttaatgtttgttcacattcgcctatgtgttcaggattgagttttttgaactggctcttaaaaacatctaataaaatatttgtatcaggatcatagactgtaccagcttcattttcataaattctcccccaatacttatatcctaaacgagttaaatgcaccattgctggcatctgtactctggttgcttcattgaattttcccataacactctacttgtttaatgtcggtctcaacaaatcacgaatatctacttccaacacttcagcaactttgacaagattatcaagagagggttgtactttatttgaacaccagcgcgaaacagtgttctctgtatgtcccacttgggttgccaaccatttgcctgacacctgcttttccgctaacacggatttaatccgatttattgcttttacctgtagattttatttcatttattgttaaagtcatcgagtccaaaattaataatttcataccataactccaagcaaataagtgtattattgaacaacattgatatttttcttgtattttgagtatttttcgttagctattgtatatctttgtaacatcaaatcaagtgttctttgaggcattgcagaataaagaaaggataagaaacttgctcgtttccatctcgtaacccattttccctttattcattcttattctattggttatctgaaagatacaacatttttgaatcttttgcgggcatagtcggtggcgatgagcatcttcgccttttcctccgtttcagaaagtgccgctctgcccagcagcgtggcatcgcccgtcttggcgaactgcatcagcttctgtatgaagtcctcctgctcgggcgtgggcggtatgtggtgcagtatctcgttcttgtgcggacggtccacacccacgtcctccgccgtgcggtagtcggtaatctcgttgtagaaggcggcaagttctggcaccttgatgaagtagcggaaacgttccttctgcaccacgttgttcgtcacgttgaactcgaagtcggtggtctttttggcgaaaatcgccgcccaggcatcgaaacagcggatgtcctgccgctccagctccttcgggcgcaggtacttgaagagcaggtacagctccgtcagtgagttgctgatggtcgttccggaaaggaacgtagcccccaagtccttgcctgtgcgctcctgtatggtgcggatggcgaagagcatgttcagggctttctgactgccttccgagttgcccaagcccgccacccggtcgtgacgggtgttgaaggtgaggttcttgaactggtggctctcatcgacaaacaggtggtcgatgcccatctggcggaaatccaccacgtcatcggtgcgtgagctgatggcgtgctccaccttctgcagcttcgcttccaggttgaacttgcgcttctccagtcctttgagcatggcccgcgagatgtccttgccctgcgcccggagcacttcgaggctctcctccacagagtcaagctccgcctgcaggatgcgttgctgcaactcgggcgactggggtatcttgccgaactggtcgtgcgacatgatgacgcagtcgtagtcgttgttcttgatgttgttgaagaaacgcacgcggttggcagtggagaagtccttctcggaggcatagaggatgcgggcgttgggataggccgcctgataggtggcggctatctccgccacattggctttcagcccaataatcatcggcttgtgggcgaggcccagccgtttcatctcgtgcgccgccatgcacattatcagcgtcttgcccgttcccacctcgtggtcgcatatcccgccgccgttctgcttgagcatccacacgcagtccttctgcgagggatagatgtccttcacgcctcggcttgccagccccttgagatcaaggtcggggaaggtttggtgcgagccgtcgtacttcggacgcacgaaacagttgaacttgcggttgtacatcgtcacgagccgttccttgaactccggcgactgctcttcgagccattcggagaagccgttacgtatctcgtcaatcttggcgttggcgagctgtatgccctcggcatcgcgcaccttgatgtcgttgccgttctcgtcctcaccgatgcacttcatcatgtcgggacaggtgttgtgcagggcgtgcttcagcaggctcatgccgtcgtagtggcggtagtagcccttcacgcagaactcgtcccagatcttgatgttcttgcggtcacacacggcggagaactcatccatgccgggagcataggcgatgcggacatcggtctcgtagagatggctcatgtaggcggagtaaatgcccgtgggaatccaacgttcgccgaaattgaagtcaagctcctcaaaggtgatacgctgcggagcggcatcctgcaatgcctccagcgcaacctttgcctccgccagatgctcatgttcttcgttatcggcaatccatgcctcgatgcgctccgccttatcgatgacattgccggcgatgaaacggtcgctaatctcgtaaccgtccgccaaaggattgaagaagaccctgccgcgcagggcagtgagcagttcctcctcagtggtgtcggtgagtgagcgcatatagtcgaagtttaccgtgccgtacctgttgagcgatgcggacagggcttcttcgggagagtcggcctgtgctgtctcctcgatagagaaggacacgggacgctcgaagatgtcggccttgacgaactgaccgttctcctcacgttccaatgagaggatgtcgcgtcctgcggcatccatcagcaacagcttcacattctgcttggcattgagaggaccgtagcgcaggacaaactcatcgtagtaggtattgagatagcctcgctgctgcttgttctcctcatggttctccgcctcgtagctgtacagatgctcgtaggcatcgcgcagggagatgtagagcgtcagcttctctttctggaatccgcttacgtcagtggggtggaacatcgcaccatagggcgtgaggtctttcagatagcccacgttcctagccgcatcaagtacgatggatccttcacggtggtgtggttccaacgtgcagtcgtagggatgcgaagtaaggtcaaacggtttccgctcgggtttggcaggagcatttcccgtatcttggaacaaaccatttctcgttggctgcactgtcggttttgctgattgctcagttacatcagacgtcggctttatttcgccttggccgggcaactcgttttcggaaggtggcttaatttctcccatcgggggtatgaagatgggattgagcgtgtcttttacgccctgcctcctcaactgttcctgacggtggtgctccgcttcctgccgcaatgccacacgcctttcgggtgtcagcgtcatcatcgtttcatagaatccgttgatgggcggattgtcctcccagttgatgtctgcatagatgtcacctggcagtgttttcttctcctctttcggggtttcgtctgcttttttctgcgaagactgcaataacgtattgtcttgcttcttcggtttctcagcgtgagcagatgtgggactattgccattctgcacctgttttgcggaagcggacttctttttacccttcgagactggtttctcttgtggcagggtatattcccacaggtcgaacaaggtaagctgcacagccttcccgtccatgggaaaatcaatggcaggttgttctttcggctcttccttgatttgcggaactacttccgctgtcttgacttccttgttcgctgatgaaatggcatgtgcaggtgttttctctacttttggcccgtcaccaaaagtcacgcccttatagcgtgccatgtccagccgtgcggtcaaatcagcatccagccgtttacggaggtcctcggcgattcccgatacaccgccctcatgcagatagaccatcgcaggtttcccgtaagggtcggtgtccagtttggctgtggagtgtatgaccagttccggatgtgccagaagatagcggttggtcgtcccacgggtatggttgtccttcaccgtttgggtaaacagctggtcgtcttccgtcaggttttccttttggctgttcttctgaaggacaatcaggtcgcagcccacctcggtgttggcattctccgtgaagaggttgttgggcatacgtaccaccgacagcaagtcggcattcttcatcatcaggaaacgggtgccgttgttgctctcgctgtccaatacaccctgtgaggtgatgaaggcgacgatgccaccgtcacgcacggcatcaagccctttcaggaagaaatagttgtgtatcttctttgccgccacacggtacatgatggaacgcttctcgtactccgcatcgaacacggcgatgtcaccgaaaggtatattggagatggcaaggtcaaaatgaccgttgaaaggcttttctatcttctcaaagccctccacatgcaccttttggtcgggatgcagatggcggagcatcctgcccgtcagcaggtctttctcgaaagccatcacatcggcttggggtgagaaatgcaacatggagtccacgaatgcacccatgcctgccgatggctccagcatacgtgcaagcacgacaccttgccccgcaagcacgcctgcgagggtgtcggtaatctccttcggggtatagaaagccgtcagtacggagcctttcagcgaatcgacatatcgtttgtactccgtctcgtcacggctgttctcacggataaggcggtggagttccgccgtgggagcaaaaagttcgaggtcggatttcgcccagtggacggcatccgtcagttcctttgcaggattcaggatgcacttcaatcctccgaagccgcagtatctgcgcagtatgttgcgctcggtctcggtgggagtacgtccttcccggtcaaggaggaatgccgtccgtatcgcctcgatgttgtccctcagtctctgctttcggttaaacgccatactcggccagatagagtacgacagctcccgtcagttcgctgtacagcaggtcatagtccaacgactgggcgaagaggtcgtcggatagatcatagatggagaatacattatccactaatggcagcagctttctagtaaaggcttcctgctgcgctttgggaatctcgtaggcaaactcgttggcgataacctcacgcaggatggcgtatctggaatggtgcagtcccttcagcagggtctgcatcaccagttcctgtgctccctctatgggatagcccccacggcgtgcctgctcgtaggcagacgcggcaagttcggcacgggtctcgatgaaggcggtgtcatccgcctgttcaaaacggttctcttgaagatgcttttgcagatagaggtggtagtacgacagttctttctgtttcttttcgttcttgttcatgtctattttgggattatagtggtgaatactaaatgtcgggatagaagaaaaaagcactccgggtatccctcccgaagtgccaccactaaatccaaagtaaatcagtcaagtcttagaagaacaagaacgttttcgttaagccagatgagcaatgataagctcgcttaatcattgccatggcgagaaaacgaaggtttaaaaccaacgattagactttgattcagtggcgaaggtactcatttatttcctcttctgggaatattttcccttgtttttcacttcggggaagacaaataccgtattatagtcggcatcaaaggcaatgacggcatcgaaactcttgccctgcttgctcttgaagcctttcaacagggaagtcttcccggtggtgagcagttccctgatctcctcgtccttcaggtcgcggttggctttctgacggaacacgggcagaccgcattcggggttgtcgcaacgcacaaccttgccgtagaactgcatctgtcccttgccacacttgggacaggtgcagccggagggcttgtggccgaaaattttgtcgcaagagagcagctccgcggtgatttccgtggtgtaacgctctatctcaccatggaaggcggagacttccttctccccacgttcgatgcgtgccagctcccgttcccattctcccgtgagggcggcatcagcgatgcgcatttcctttaccacggaatagagggccagccctttctcggtaggcacaagcgacttcttgcagcgttgcacgtagccgcgggcaaagagagtctcgatgatggcggcacgggtggcgggagtaccgatgccgcactccttcatggcttgacggacctcctcatcctccacgtccttacctgctgtctccatagccgacagcagggtagcctcagtatgcaggggcttgggtttggtcttgccctctgtgaggcttacgccgcatacggaaagggtttctccgcttttccatccgggcagtatctgctcctcgctgtcctcgcccagtacggcacgccaccccgtttgacgtatcacgcagcccttggcggcaaactccgcctcaccgctgagggcggtaacggtggtgagttccttgacgcatttgtcggagaaggcctccaccatgcgcccggcaatcatctgatacacggtgttgtcctccttggataggaagaggggcttctcgcccgtgacgagcagggcgtgatggtcggtcaccttgctgccgtccacgctgcggcgggtcagtctgtccttgcggggcaccttgcctatccattcgggatagccacccaagaaggcgagcaacttggggatctcatcaaagacatcttcggggatgtagcggctgccggtacggggataggtgatgagcttcttttcgtagagcttctgcgctatctccagcgtcttctccgctgtgaagccgtgcttggcgttggcttcattctgcagggtggtgaggtcgtagagcagcggcgtgtcttccaccttctccttgcactccacctttgtaacgagcagggagggctgcgcctttaccttattatatatgtgctccgccggggatttctccttccatttctccacggaagagaacttcaccgtctgttctcctgtgccgtctgtggacagatgcacctgccagaaggcttcgggggtgaagcgtctgttctcccagtagcgggcgcacaccatcgccagcgtgggtgtctgaacacgcccaagggagtaggtgcctctgcctgcggcgatgctcatggcctgcgtagcgttgatgcctaccagccagtcggcttcgctgcgtgccttggcggcatggtaaaggcggtcgtaacggttgcccgcttcgaggtggcgcagtccctctcggatagccttgtcggtgagggagctgatccacaggcgcacgaaaggcgtgcggcagtccaggtagctgtagagatagcggaagatgagttcgccctcgcgtccggcatcggtggccacgattatctgctcgctctcgttgaagagcctgcccacgatgcgtatctgcgtgactacgctgggttcgggcttgtagcccttctctgtcttggtgtgtcgtggttgcagggtgaaggtgtcgggcaggatgggcagatgctcacggacgaagccgtggatgccgtagccttcgggcatggtgagctgcacaaggtgcccgtaggcccatgtgacggcataaccgctgcctaagaaataaccatcttctctctttgtcgcgcccacgatgcgggctatctcacgtgccacggagggcttctctgcgataatggtcttcatactgatttactttttttctgttcttacttattgtttatgttctcatatttgggataatggtggattcagtggtggcactccggctcataccttcatgcctttgctcttgcgtttctcctgcttctgctgggtatcgtccttcggagcggtctgtcccttctgcagcggctcgttgacattcttagtcgcctcgttggtcttgccctgactgttgacggccacctgcgtgcggctctcgtttgccggagccaccttctgggcgttgtcgggattggtgtcgtaacggtaaggacgacccttttcaggattgaaacggaggtacatggtggagagcacacccttgtcgtcgggtacgttctctaacttgatggtcttgccagccacatagtcggctttctgctcctcggtgaagggtacgtttttccacttgctgatgggacggatgctgccgtcctcgttggtccacgagttgcgacgttgcttgccgggtttctgctgaggtgcctcctgtgcgaatgagggattctccttgttggtctgctcctccacggtacggggcgacttgcccgtgccgggtacgaactccacgcctcgctgttccacgttcacctgcagggtggtgacaaacttgcggccatcgttacgctcgatgagcttgtccttgacgggcagaccggcacggagcatctcacgctcctgcggggtaatctccgttttgcctatacgttcgggaatgcggatgcgtgcggcaggcatgtcggtaatctcattggtcttgcggtcgatactgatgaaagagggagttatctctcccgtggtcttgtccaccaagtccacgattctgccgagattgcctgtctccctcagtgccttcttctcttcgggggtgaacttgtgtcccttgtactcgtcgagtttctgctccttgcggatgaaatggggaacgagccgcacgttgccgtcatcgtccttgcggaaggaaagtcgggcatcgaggctgaacgactcgccgccgaagttgggagtgacacgaacaaggtcggacttgccgtagttgagcatcttctgtaggtcgccggactgttccagttcatcccgcttcacgccccagttcttttccagtgcctgccagtcgatacggctttcgtcaatgggctggtagccttgccgttgtttactttcctgcttgttctcctgtgcgctctgctgcacgttttcctgtttttgttgcatgttttcttgtttttggggttctacattgtttgtttgattttgattcatttcttgcttcttgtcttcctgcactttctgttcctgcgccacctgcttttcgtaagccgatgtgtccactttgtggggtgcgagtaggtctgcattggctgcagggtctttcagcaactccttcatcacgccgagcaggttttccgcctggtctgccgctatacggtagaagccgaagcggctgggttccttgcactggcggaagaagttgcggaagaagttgtcgagcacgtcaccgttcttgtcgaactggaggaagtccttggagttctccatctttgccggcgtgcgcttgggagtgccgtccgcctgtagtccggccaccacgctgatttcgcccgtcttctcgtcacggactatcagcacgtctttttcgtcttttttctttgccatcttgattgactttaattgtgaaacattgattgttatcggatgcgggccttgtagtccgccatcttctctttctggaaacagtcgatatgctccgcaaggaacctctccacgtccgactccttgtagtaggtcttctgacggagcatgaggtagggcaggatgcccagtgtgcggtagcgttgcagtgacctcttactcacctgcaacatcaggcagaggtcctgattgtcgtaaagccgctcgccgttgtatatcttgcgttccgtgtcctcctcctgacacgccatctgccgctggctgcggaaaatcaagtcgccaatcattttctcttgtctgtcgagtcgctccatgaggaggtggagcagccgttctatcttgtatgtatccatatcctgtgtcgttttatgtctgtttgtctatgcttcttccttttcctatccttaccatatattgcctgtgcagttccccgatgcgttccgtattgccgctcatggaacagccgttcatcatgcgctccacgtccgtgaggcggtagcggcaggtgtgtcccatcagcgagaagggtatgcgcccctcgtctcggtagcgttgcagggtgcgcaggctgatgccgagcagggtggtcacttccttgctggtcagccaccgttcctgcggctgtacaggctgtctgtcctcatacttgcggatgtgctccgctatcttctcaatgtgcccgaccagttcctgaaaggcggcactttctatcattattacgttcataatcaatactgtttttcttgtttctgctgcaaaattacagggtatggaaaaggcgggcttatgactcatatatgactcatagaagattttcttgcgattggcttcggatggcgcatttgtctgttccagatgctgccacctgcgctggaaatgaacggctttgaggcgttgcggcgtaactttgcaccgacaatcacagcaacactcagaatcatggaagtagtaatcattgaaaaaaaggcgttcgaggcactgatggcggatgtctcgtcgctgacggagaaagtgaaccgcctgtgcggtcgtgaaagagaccgccgtatggcgaagtggatggacaacgaggaggtgtgccgactgctgcgcctcagtccgaggaccttgcagatgatgcgcgacaagggcttgattgcctgctcgcagataggtaagaagttctattaccgcagggaggacgtggcaagtctcgttgtaggcggaaaggagggctgcctatgaagcaggaaatcctcacgctggagcaggaacaggtggcggacatgcttctctcgctgaaaaacagccatcgcaggattaaccgtttcatgcaggagtacacgcctccgctcaacggtgaccgttacctgacggacagggaggtgtcggaggtcttgaaggtgagccgccgcaccttgcagaacctgcgcaacagccgtgtgctgccgttcatcctgctgggcggcaaggcactctaccgggagtatgacatacagcgactgctggaaacgaactaccgcaaggcggatgtatagtcatgtatagggacgaaaaaaagacggacgggcaaccctgttgaatgggatggtccgtccgtcttttcgttttgttatgtctgtccggtctttcagttattgccgaaagtccaaaggggaatgatgatggcttgttgtgcctctctttccttttttcttgtagctgtctctttcagccatttccggaaggcatgtgcatagaaggtgtttatccgataggacaaggcgacgatgatgtcccaatggtagatgtccacggaacagccgcccgccatgcggatatacttgcatacctcatagtccaccaacacgcctgtcttgcggatgcgccttatctccctgcctatggtggcggcagggaggttgaacaggtcggctatctccataagggtcatccacacctcttcctgcgggttgccttccatgcgtacgcttccgtgctcgtctattctgatgattcttctcatggcgttccgtgttagatggtctgacaaatgaactgttccatggattctatctgcttggacagacgctccatgtcgttgcttaccttctcagcggtaatcttcgcatagatctgcgtgctgcggatgctggtgtgtcccatcatcttcgacagggtctcaatcggcacgccgttggagaggcagatggtggtggcatacgagtgacggctctggtgccaggtcacgttcttgttgataccgcattgcttggcgacggccttaatgccgtatcggcaatggggatagcaggggacgggcaacagccgtccgccctcagccatgccgctgtacttctcaatgatatgcttgggaacgtcaagcaggcggatgttcgattccacgcctgtcttctggcggttggtctttatccacagatgcccgtcgaaggaggtctgtaggttctcctccgtcaggttgtacatgtcccgccagctcagtcccgtgaagcagcagaagatgaagaggtctctgataagctcaaagcttttcttcttgaacgtgccgttgatgagtgccgtaatctcttccttggtcaggaagccgcgcttggtctcttccttcgtgatgtggtaggcataaaaggggtcacgcgccagccagccgttgttgatggcggtgaagatgatgctgcggaagggcatcatgtacgaccatacggtgttggtgcagtggttcttctccgtgcggaggaacagctcgaagtcggtgatgaaggcgggtgtcagctcacgtagggcgatgtcactcatcttgtagcgttgcttgatgaactccgacaagtggttgtacaccacgcagtatttccagtagctgcgctcgctcttcatcttgccgacctgtttggcatagtcctcgttgtgctgcttgaacacggcaagcagggtcttgtggttctgtcccagacccaggtaggcgttgcgcaccttctcagccgtgacatatccgtcggtgtcgcacacttcctgatacgccttgttgatgccaagccgtatcttgtccagcatacggttgccctcctgtgccacgaggctacgacccgtcagtttgcccagttccacgttccacattttctcctccacgtccagcttgctgctgaactgtgataccttcccgttcaccgtgatgcggcacatcacgggaatcattccgttctttttcggcgcgttgcgcttgaggtagaacaacaccctgaaagtgcttctgctcatactctacattgtttttgtttgcaaaattattccatgtagagctgaaaggctgtaagcaaaccgcagcacatcggcgcaatcacatccgcttcacgtcttttttgtccttttcccgcaggcaacatcagatattaccctaattttgcctcccgaaacgctgtatttcgatagtttacagccatttcctcacgggcttttcagacctcctcgccagcgaaaagagtaacgggatagtaacgaaactcttgcttcaactgacttttctgtggcatctgttgtctgcacagagaatccaactaaatcaattaatccgctcattctcacagatttttcatcattctgccctcattctcagttttttgttgtatctttgcagaaaagagataaattatgcccatctacaaactattcttgggtgtagatattgtcctgttcttaagatacaaacattcacctttatactaattttacagatatgatccttttctttgaaacaccccaaaagaatatcattgcaacggagataaaccaccaaccttgtcaagaagacatcgacaaactgtgttggctctttgggcaagctacttgcttggatgcagagaagcttgagggcttcttcgtaggaccacggcgcgaaatgattactccatggagtaccaatgccgttgagactactgaaaatatgaatctaagcggcattttgcgtattgaggaattcttccctgtccgctcaaaagaggcggaacatgacacgatgttgcaaagaatgtacgacggattgggacaagacatttttgaggtgaatcaccaaccagagcctatcaagctggttgagaatctggaacagtataacgagcaagagggattggcactctcgcctgaagagatggcgtacctgcacaccatagaaaagcagaacggaagaccactcaccgacagcgaaatattcgggtttgcacaaatcaattctgaacactgtcggcataagatattcggtggtacttttatcattgacggtgaagaaaaagaatcgtcgctctttgccatgattaagcgtaccaccaaagagaatccggggaagatactgtctgcctataaggacaatgtggcttttgcacaaggtcccatgatagaacagtttgcacccgaaaatcaggcgaccagtgattatttcaaagtaaaagacatcgagagtgtcatctcattgaaagccgaaacacacaacttccccaccaccgtagaaccctttaacggtgctgctacgggaacaggtggagagatacgcgaccgcatgggtggtggtgtaggctcttggccattagctggaacagccgtttacatgacagcataccccagattgaaaggcgaagcacggtcatgggagaacatcctgcccgtgcgtaaatggctctatcaatcacccgaacaaatactcatcaaggcttcgaatggtgccagtgactttggaaacaagttcggacaacctttaatctgcggttcggtactcacttttgaacaccaagaagacgaccaaaagttgggttacgacaaggtaattatgctggctggcggtgttggttacggcaaaaaacgcgactgcttgaagaaagaaccgcagaaaggcaataaggtggtagtagttggtggcgacaactaccgtatcggactgggtggcggaagcgtgtcatctgttgatacaggacgctataccagtggtgtagaactgaacgctatacagcgtgccaaccccgaaatgcaaaagcgtgcttacaacttggtaagggctttggtagaagaagacagcaacccagtggtgtccatccatgaccatggtagtgcaggacacctgaactgcttgtctgaattggtagaagactgcggtggagagattgacatgaccaagttgccgattggtgataagacgctcagtgccaaggaaatcattgccaacgagagtcaggagcgcatgggattgctcattgatgagcaacatcttgaccacgtgaaggcgattgccgaacgtgagcgtgcaccgctgtatgtggtaggtgagaccactggcgacgcccacttctcattcgtacagggggatggaaagaaaccgtttgacttggatgtggcacaaatgtttggacattctcccaagaccatcatgaaagatgagacggtagaacgccattacgaaaacgccacctatagtcaagaccaaatagatagctatcttgacaacgtgctacaattagaagctgtagcctgtaaagactggctcaccaacaaggtggaccgctctgtaacaggaaggatagcacgccaacaatgtcaaggcaagatacagttgcccctctccgactgtggtgtcgtggctttagactatcgtggcaagaaaggtattgcaacagcgatagggcatgcgccacaagcaggattggcttcgccacaagcaggaagtgtgctcagtgtggcagaggcactcaccaatattgtgtgggctccgctcacagatgggctggaaggcatctcgttgtcagccaactggatgtggccttgtcgctcacaaaagggcgaagatgcacgcctgtatgctgctgtcgaggcattgagcaacttctgttgctcgctccacatcaacgtgcccacaggaaaagactcgctttcactcactcaaaaatatcctaacggcgagaaaatcatctctccgggaaccgtcattgtcagcgcaggaggcgaagtggaagatgtgaaaaaagtggtttcacctgtattagtgaacgataagaactcatcactctactacatagatttctctttcgacgaccaacggttgggcggaagtgcctttgcgcaaaccttaggaaaagtgggtagtgacgttccgacggtgaaaaacccagagtatttcgccgattgttttgaagcagttcaagccttaatcaagaaaggttgggtgatggcaggccatgatattagtgctggtggcttgattactaccctcttagaaatgacatttgccaatcctgatgggggcatccacgtaaatctttacgattttgcagaagaggatgtggtgaaagccttatttgcagaaaatccgggtgtcatcattcaggtatctgacacgcacaaacaagcattgcgcgaatacttagaagcagaaggtattggatatgccaagattggctaccctacccccaaagtacgccagctcgtgataaagaaaggtgaatgggaacacgaattcgacattgacgcattgcgtgacacatggtatcagacatcttatctgctggacaaacgacagagcatgaatggaaaagcagacgaacgccgacagaactattggcaacaacccgttgagtggcacttcaaagaggagttcacaggcaagctctctcaataccagttggatgccaatcgtcgctccacatcaggaattaaagccgccattatccgagagaaaggcaccaatggtgaacgcgaaatggcttatgccttatacttagcaggctttgacgtgaaagatgtgatgatgaccgacttgatatctggtcgagaaacactggaagatatccatatgattgtattctgtggcggtttctcaaacagtgacgtgttgggttctgcaaaaggttgggcaggcgcattcctatacaatccaaaagcgaaagaagcgctcgataagttctatgctcgcaagaatacgctctcattaggtatctgtaacggttgccaattgatggtggagctgaacttgattaaccctgaacttcaacgacacacacgcatgttgcacaacgactcacaaaagtttgagagtgcattcttaagtctgtctattccagagaataacagtgtgatgcttggcagcctcgctcataataaattgggcatttgggtagcgcatggagaagggaagtttagcttgccagaatcagaagacaagtatcatattgttgcgaaatacaactacagtgaatatcccggaaatccaaatggcagcgactatagtgtggctggcatctgttctgcggatggacgtcatttggcaatgatgccccacttagagcgtgctatcttcccttggcaaacagcttattatcctcacaagcatcgctgcgatgaagtgactccatggatagaggcgtttgtaaatgcgagaaagtggatagaaggaaaagtatagttgacgagtagacaagttgacaagtttacaagttgacgagttcataagttgacgagttgataagttaataaaaaggtattcattagtaaggagactatcaccattcacagcgcatgggcaatcatatcaaaatacccaacacggcagagacatcagaggataactaccgctggacgacgctctttaagactttcttcaagataggagcgtttacacttggtggtggctatgccatgattcccattatcgaaacagaggtagtggagaagcatcattggatagagaaagatgagttcctcgacctcattgccgttgcacagagctgccccggtgtgtttgctatcaatatcagcacctttgttggctataagttacgaggcacacccggagccatttgtacggcgacaggtacggcattgccgtcttttctcatcattttgctgattgcgatgttctttcatagttttatggacgtgccttggatagcagccatgttcaatggcattcgaccagcggttgttgccttgatagccgtgcccaccttcaacttagcaaagagtgcgaagatttcgttagtcaactgttggatacccattatttctgcgctgctgatatgggcggttggagtcaaccctatttttattatcatagctgcagcggcaggtggctatatttacggacagtttatcaagcctactgagtaatatgatttatctctatctcttctttacctttttccaaataggtttgtttggttttggtggtggttacggcatgctgtcgctcatacaaacagagacagtgatacaacaccactggctgacaagtgcggagtttaccaacattgtagctatcagtcagatgacacctggtcccataggcatcaactctgccacctattgtggctatgctgccattcacaatgcaggatatggcatgtggatgtcggttttaggctcggttgttgccaccacagccttggtgctaccttcccttgtcctcatgatactcattagcaagatgtttatgaaatatatgaatacagaaccagtgcaaaatatctttagcggccttagacctgctgttgttggtctcttggctgctgccaccctactgctgatgaatgaggaaaactttggctcaatgatgggaaatccatggcagttttggattagtattgccttattcatcgcaacatttataggaacgaaatatatcaaaattaatcctatccgaatgatttgctatgcggcattcgcagggttgatgttgctgtattgaggatctatgagttgacgagttgacaaggtgacgagttgacaagttaatagcattatttagttgacgagttcacaagttgacgagtttacaagttaatagctatcaacttgtgaatgcgtcaactaaaccaactatcaacttgtgaacgcgtctactcgtaaacatgtcaactcaaccagctatcaacttgtgaactcgttaactcgtcaacatgtcaacttaaccaactatcaacttgtgaactcgtcaactcgtaaacatgtcaactaaaccaactatcaacttgtcaactcgttaactcgtcaacatgtcaactaaaccagctatcaacttgtcaacttgtaaactcgtctactcgtcaactaaaaaagaacaaatgaacaaaatacatggttttataggagccatcacctctgcaacagcctttgggcttataccactctttagtcttccagtattagcagcgggcatgccgtccaccgcagtgttagtgtatcgctttgcttttgcttgtctgattatgcttgttgtgctgatgtaccaacgacaaagtctacatcttcgctttggcgaatcgctccgtctcatgctgctatccactatgtataccgggtcggcagttttccttatggagggctatcgttatctgtccagcggcatcgcaaccgttattatgttttcatatcctgtgtggactgctctgttaatgatgatttttaggggtgaaaaggcatcgggtactacctttttagccataggactggcagtggcaggggtatgtttcttatcaggaattgagaatggtgttggcaacatctctgttttgggcatctgcttagagctcttgtcaggactgtcgtacgctatttatatggttgcctaccctacaatgaacatacgcaccatccccaccataaaagtaaacttttacattttcttcttcacgatgctgctgctcatgttatacgccatattcacctcaggtggattgccagctattcatacgggtacggttctgctcaacctcttcctgttgggcttgcttccaacagtagtaagcaacatcaccctcatcttgtcgctaaagagtattggcagtaccttggtggcaatactcggtgccttcgaaccactaacggcgatgtgtatcggcattatggtctttggcgaaccgtttacggtacacatagccataggatttgtgttgatattgattgccgtagcagtgttaattcttaaaaatgcacaccataagacaaaagcagaaaaagatattgtctcttcaatttgaaaaaacaccataaaataagacgtaaacaagagcgcatgtcaaatattatatctatatttgcgaaaggaaataatgatgcgtacaaaccattttgtaaaaccgtcatattaacaactatttatatcatctgaaaaagaagataataaaaaaggaaaggcgatatttcaaaaatatcaattgatgaaaaacatcctgattatcattctgtcatcacgacaaattcagaatctatctcaatatcgcataaagaaaaaaaatatcaccatataaaatgttaacgaaaaaaaatacacaatggaaaaagaccaagattacagagtagaaagtgatttgttaggagaattacaagttcctacaaatgcgtattatggcgtgcaaactcagcgcgctatcaacaattacaagatatcgacaggaaagatgagcgactatcccgactttgttgtctcgatagcctatgtcaagaaggctgctgctaaagccaatgcagaggcagacttcttagatgcacacattgcagaagccatttgcaaagcctgcgatgacattattgaaggaaagctgcaagatcaattccctgtagatatggttcagggtggtgctggtacttcggtgaacatgaatgccaatgaagtgattgctaaccgtgcattggaaatcatggggtataaaaaaggggattatgcgcattgctaccctaacgaccatgtgaactgtggacagtctaccaatgacgcttatcccactgcactacgctatgccgtgtatcgaatgaacaagacgttggtggagagtcttcgccaccttgtagacacatttaacagcaaagccgatgaatacaaagatgctgtgaaaatgggacgcacacagttacaagacgcagtgcctatgacctcagggcaagagtttaaggcttttgcgcacagcttagaacaagaaatagacttcctcaacgaaaacgcgaagcgccttttgaccatcaacatgggagcaactgccattggtacaggtattaacgcagcaccagggtacgacaagttggtgaccaagtatttggcagaatacacaaaagaggattttaaggaagctggcgatatgattgctgccacacccgacacagccgattatgtgagctattcaggtgcgatgaaacgattggctgtcaagttatcaaagatttgtaacgacttgcgattgatggcatcgggtcctcgttgtggtctacacgaaatcaacttacctcctatggctccaggctcttccatcatgccaggcaaggtaaatcccgtcattcctgaagtaaccaatcaagtttgcttcaaggttattggtaacgatacaaccatcaccatagcagcagaggctggacagttgcaactcaatgtgatggagcctattattgtgcaatgtctgtttgaaagctcacagtggctgaacaatgccatgaatacattggctgataaatgtgtgaaaggtattaccattaacacccagcacaatcttgacgtggtgaaccattccattggaattgttaccgcattgaatccttacattggttacaagaatagtaccaaagtggctaaggaagctttagaaacaggcaagagcttgcacgaaattgtagtggaaaagggattcttgtccaaagaagaggtagacaaaattctcgatccaaaaggtatgctcaacgtacacaagaagatagaagtataacagagaaatccgatatttctttagactcaaagaaaaggacgcgggcaatgttgtccacgtcctttttattgattgttatttgctacaacaatactgcacaatgcttcatgtttatggcactacaaccttttgatgattgatgagatatactcccttaggtaactgctgcaatgctcgctgaacattattcgttgtccctacctcacagccttggagggtatatatcttgacagaagtcgttttcgatgtttgagcaacacatttcttaatatccgttaccacacccaagtttacacctgtgggattgtagtatgcaccattttcaaacttcaagtcgttggtttgattatcacctgaatcattgaagataataccagttggcacttgtccttctgcagagcctttcgtgaaactgccgttccatgtccacttccacacctcgttaccactgtcagtcacaccaactttggtgcatgacacaccaggccacgtgccaccagtaaagtttccagtatcgctccatgcccaacacttgatgtcggaactccagttttttggcttttcaaagaaagcacaggtctcaccatctttcaccacacaaaacgaaggtgcgtggaatgtagcttgctcttccttgatgcttgttacctcatcaatgttgacggcattgctgacatacattttatagttgtctcccgatgtcgctaacttcatgccttgcgtgttggcatctgtcgttgtccctagtatcagcaacaaatcaccttggctaccttttactttcagcacgaagccatcgtgtttggcatcggcttgcacaatatcgctggtattgcttatgcccacggcacggcgtgtagcaatcatccgcttgatggcagttttgtattgaagccaatgtggcaggaacacgcaaggcgtgcctggcatggcgagaatataggcattggcagcctcgatattggcaaacagcggactgctgccgtttccatcggtgcgacctgtatcatgattgtcgacaaatgttacggcatattgcttgtaataagaatctcttgcaagacactcgctattgagctttgaccagtcgccaccggaacgaaaagcatcataaatacgatacttcatgtcaaaatcgaaggcagcagaggttggaacaccgtctaccttggtgccattaatccagttcttgatgttgcctgtgttgtcccaatactcgccaatcgagtacacgggtttggcagacgtgttgtacatgcctatgtaattggctgcaaagcctttgaccatatcgtaacggaaaccagtgtaacccaaatcattcaacaagaaatcaagataagccttgatgttcttttgggcattcgcagaggtgtggtcgatatcgcgtgcaccgttgaagtcgtcgcccgtgtcgctgttgcctgtcaacgcatagccatttcgctctgtttttcctttgtcatcccctttacaaatatcggcaagcgaccatgtgaagttttgccctttccacgtctccgtggggaaatcacaccagttggtgttgccgttgcggtgattgatgaccacgtcttcgatgatgccagtgcctttttctttgaaggtcttgatcatcttgcgcagttcagtttcgcgaccaaatgcgctgtcgtgtctgaaccaccatataggcgcatagcccatttggttttgatccgtgttgcaatagcccgactgtggcacccaaataagtgagaagtacttggacagctcgtccgcctggctctctaaatgactccattgcgtgtcttcgtagctgtcccaataaaagccttgcagcatcacgcccttgtaatccttgggccaaccctgcgcatgaacgttgccagcgagtgccagcaacaataagaataaggtgtaaaaatgtctcatcctcgttaagtattagtagtgataaatatgattttggtaaaaaaggcgcactatctacatgtgagagtgcgccttttatattcagtattctactctcgtaacgaattattgctctgttacggtagcggtcttggcttcggggtcaagttcgatgaggtaggtacccgcaccaatcttgatgttggcaccaccttcggtaaggcccgtcaagacaccaccgaagttcttttcccatgaggcatcccaacggaacttgtactcaccttccaccattgttatagtgatagaccacttcttggtttctgggttgtaggtcatcagctgtcccttgtcccagccactgggggtagcagatccgataatctcccatcctgtcttggcaacggaggcaaccatcttcttggtgttagcggtaatgcgataccagccaccttcggtgaacttgatgttggcaccatcgccaatcgcaaactctgccttagttttagtgtcattccatttcacctcgcctacgcttcctaaccatttgccgtcatcatagagtttgaattcagtattagcaggatagtaatagatgcccgtgtattggaagtcgcggctttccgacttgagtcgataagcagtttcagcggtcgggttccaaccttgataagaaccaggcactgaaagctcggcactcgagagttcgatatcggtctcttccatggtataggtgtacttgccagcagtggtcaagttgagtttcacgatgtatgcgtgtgtcttagccaccttgaggttttcgccaccttgcgccaaaacgcttggattatttttgtcactaccatagttgattttccaatcctcattggcacggaacttgaactctttatcagtcaacggtgttaccgccgtccacatacgggtgtctttgtcatactccatcttggtgtctttggaccatcctccagatgtagcttcaccaatcatgccccattcgcagggttgtccgatagtcacattgccgtcgggcgtgagcgtcacctccacaaatcccttgtggtctgcatcaaccttcaggtctttggcgagtaccttggtaacgtctttgccatccacgacagcaaaagaacactcgtcgtcaaactgtacccaacctttgtaagtgccgtcaccatcagggtcgccaaggagataagccttagaataatcccactcgggatagcccactgccacataagcatagttccagtcaatgcccacagtgttggggtcgtaaggtgtagccttgaagttgacagtattctgcgcatcatcggtcaatgtttcgaatgcagaagacttgagcgacacggtgaaatcataggtgtgaccaggataggcacctatcttcgccaacagcgagttcatcgcctcattggtgaaagagagtttagcgtcctctgtatcacctgccactatactctttttgttctcattattggtaatagttacggtgtactttaccaccgcacctttgccgtaattggctttttcccaactaatatcgggaaacgctttgtcactattttcctgcgtaaaggttatctcagctggattgacagcattgagtttcgcagcctgctgtaacttaagcactggcgtggtgatatcgtcagagcacgatgtcattgccaagaaaccagcggcaaggaataatatattttttagtttcatgatctatcttgttttaatccattaataaccatcattctgtttcaagttctggttcgagccaatgtcgtcagaaggcaatgggaatatcttgtatttgtcattcacctctttaccttcaaccactccacccttccagggccatacgtaatcggcagaagtgtatttaccgaagcgcacgaggtcggtgcggcgttgtgcctcgaagaagagttcacgtccgcgctcatcgagcaagaatttcagtgtaaagttgttatcatcaattggagccacggttttatccttataggcgcgtttgcgcaattcgttcagatagttcatggcttcgttcttggttgctcctgttcctccacggagaacagcctctgccaagttcaagtaaatttcgcccaaacggaacaatgggaaatctacgtaagcctcagaagatgcaggtttgctgccatccttattaagattacagaacttggttacaggaataccattgtccttaaaatctgcctcattgacaatttccacgttcttagttccatccaaacgtagcatagcaaagcgtgtgtcttcctcatgctttttctcgttggtaaacaacttgagcaatgacgacttggcacgtactccttgccaagctcctttggcattagtctcttcttggaattgtgcggacccccaacatagcagagcggtcatacctccccatgtcatggtttcagcaccttcgtaacgaagtgggaaaatcatttccttggagtgatcattgtccgccttgaacatatcagcatagttggattccaatgcgtatccagcattgataatcttcttacaataagtaatacactcggtgtacttcttttgccccacgtaggtctcggcattgagatacaaacgtgacagagcagcccatgcggcagccttgttagcgttgccataattcttgttccagcctacaacaggagcagcaagatctttctcacattcaagtaattctttctccacatatttataaaggtcgtccttcataatttgttgtggacgctcgctacctattgtactattctcatcaaagaaaggatagttgcgatacaggtcaagggcgtacatgtaggtgagtgcacgcaggaatcgagcctcagctctatacgtctttaccgtctgcttaacttgttcgttacaaccacggctactcagtttgtcgtcagtggtctcacgaaggaaagcattcgccaagttgatttggtaagccaatcggtaatacgaacccttgatccatgggcttgacgaatcccaagaaaggtggttgaacccaggaattccagggtcgttccatgcacagtgagccatgtcggatgccagttcctgcatgttccacaacacacgtatgaaagaagcctgcgagcctccatcaattcctttgacgtcttgctcggcgtctccacctttgtttccacctatcaccatgcccgcataaatcttggcgagactctgggtataagcgttgatgtcgtctttgaacactacattagacactaattcatccttgtccaacggttcggtatccaagtctcctacacaggaggtcattcctaacaatgctcctgacaagagcaaaaacaatgactttttaatatgatattttttcattttgagttgctatttagaatttgaaattgaaaccaaacataaacgaaataggtctcggatagatgtttttgtctattccctctccgctgatttcagggtcaataccgctatagttggtaatgacaaacggattttgcacggtgagatacaggcgtgcggactgtttgtcattgaacagcttgttgaaagtgtagccaagtgtgatgttgtccatacgaacaaagtcagctttctgtacgtaatagctgctacggaactgtcccacatggaagttcttgttggcggcggagttcaggcggttcttcaagaagcctgactggtcgtacatctgtgagccgtcccatgcctcgcggttagactgtgtgttgttgtacacatagttgccgatgcttgagcgaagggcgaacgacaaatcccagttcttgtaattcatctgcgaagtcaagcccatgtacacgtctggagccgatttcttgtaaggaataaggtcagcttcgtctatcttgttgtcgttgttctggtccacgtaagccccctcgataggagttccgttcttatcatacatctgctcaaacacgtagaatgagttgtatggcttgccaacggagttgatttgaatgttgtaacctacggcgccgtctaccccaccatgaatcacgcccttgtatctggggtcatcgttgattgtaagtttggtgatggtgtttttgttgtacgacacgttatagcccaatgtccactggaaattcttagttgtgatggggtgagctgtcaacgagagttccacacccttgttttccaacgtgcccacgttggtcaatatttcattgctgaagttggttccggctggtgccgtcacggtattcaacaggttgttggtctgacgataatagaaatccaacgtacccgagagtatgcccttgaagattccaaagtcgagaccggcgttgtaggttgtggtctcttcccacttcaaatcctcgtcgtaagccaatggtgcgataagctgtacgcgcttgtcaccgaagaagtaattggctccaggctgtgagtaagcgtagcgtgccatgtaaggatagtcgccgctattgaggttctgctgacctgtcacaccatatcccaaacgcagtttcaaatcatcaagccagcgcgtatctttcaagaaagactcctcattgatacgccatgccaatgctgccgatgggaatacaccccagcgattgttcttgttgaaacgcgaggaaccatcgttacgcagtgtgaacgtcaagaggtagcgatctaataaggtgtagttcacacgtccgaagaacgacacgaggtagttttccgtgacaaggtcttccgcacctttgtagaactccttgccgtactccttggctttggctgccgagtaggggaatttagtccactccgagcgatagaagtgttgccatgaataaccagccatggcgtcgatgaagtgtgcacctaatgtcttggtgtagttcatgtaaaattctaacaacgtattccgtttaagctgccagaagctgctgttctcaccaaatcctttcttgaagttgccccaagtccacgacataggagagttatctacagttatcacgtcgcccgttcccttagaaacgtcatatcctacgttgaggttcgcacgcaagtcgggcaagaaatggaacttgtaatcaagttgaatgttgccgatgctgcggtacacctttgacttgtcgctcttgtccgtgagtatggagacggggttggccaatgcgatatcaataggatgtccgtccttcttgagatacatgaaataaccgttgccatactttgagcctttcatgtagatgggctgcgtggggtcatattgtgtcgccaggcccaaagagccaaggtcagcaaaacggttcgtgttgtaaatacccttgaggttcaactgtacgctgaggtgcttgtcaaagaattgcggactcaagttgacagcgcccgtgaagcgttccatgtcagatgtcttcacgataccattctctttcgtgtaacctaccgacacacggtaaggcagattagccaccgcacccgacacgctgacgttatggtcagtgctcaacgatgtgcgcaacacttccttctgccagttggtgttggcgctgccaagcgcgtttgcctgcaggcttcccttgccaaacttggaggtaacaaagtgcttgaagtcgtttgccgacatcacgtccacttctttggcgtgagtgcttaccttcacagaaccgctatatccaacttggataccaccagccttgccttttttggtagtgataagaatcacaccattcgatgcacgcgaaccatagatagctgttgccgacgcatctttcaatatggtcatggtggcaatatcgtcagggttaacggtactcagagggttggccatacctttgatttcgccatcatccactggcacaccatcgataactaccaatgggttattggacgccgacatagacgaaccaccgcgaatacgtatctttgccccggcgcccggcgcgccaccatccgtgataacgctcacaccggcagcctttcctaccaacatatcggtggcagaggtaacagctccttttaccattttttctgcattcaaggcagtaacgctacccgtcaggtcgtttttcttcactcgtccgtagccaatcaccaccacttcgttgatagattcacctttggcttctttcagagtaacaaccatcttggcagctgctggagcctcaaagacatcgtaaccaatgtaactaacagagatcatgtcgcctgtattggcattgatggtgaagtttccgtcaaagtctgtcaccgtacctcccgtttgtccagctactctaatagtggcaccaataatgggttcgccggtttcatccttcacatgtcctttcacggcaatctgctgcgcaaaggcacttgctgaaatgaacaacacacagatgagtgtgagcattctcagcggtaatgaaaattttacctgcttcatttttttagttttaagttaatataataataaatttagagtttcttaggtcaatatccccaacagctattggctatcaaaaggcttgatgggtgtcttcattcagcatgtcaggaattccttttgaggatggttagtaggtcgttatgactcatggttagtttctcctcatgctgcaaagttagttttctttaactgtcattgttctttttaagtgcaaaattcactatatttgcaatgcaaacgtttgcatggtcgtcatctttataaaatgataaagacgttttgagcattcttttgttttacatacatttgcaaaactaataacaacctaaatggaaacatcgttgcccatcacaatgaaagacattgcgcaagcattgggagtctctgtggctacggtttcacgtgcactcaaagataatcctcgtatcagtaaagaacaacgcgagaagatacaagcctacgcgcgcgaacatcatttctatcccaacgtgattgccgagtcgctacgaaacagtcgtgtcaaacccctaaaggtgattggagttattgtgccgcaactctcacatttctacttctcgagtattctttcgggtattgaggaagaggctaccacacacggctatcgcatcatggtagcacaaagcaatgagcgctatgaacgagaagtaaggatttgtcaagacttctataagaatagggtgtgcggggtgatcgtatcgcaagccaaagatacagtcaagtatgagcatttcaaaaaacttatcgatcatcacatgccactggttttctatgaccgcatctgtacgggcattaactgttcccgtgtcgtagtagatgactatatgggcgcttacaatgcagtaacccaccttatcaatacgggatgtcgacgaattgcttgttatagttcgcccatgactttagagatttccaaaaacagatacaacggctatcgtgatgccctcctcaagaatggactcaaagtaaacgagaactttcttcgaatctgtgacaatagagaggatgccgaagtgctgacccccgaacttttgcaacaagaagagattcctgatgctttctttgcagtaaatgatgatacggctgtcggcatactctatgcggctaagcgcatgggttaccacattcctgaagatatttccatttgtggttttaccaatggcgaccgttccaaagcttgtgaccccatgctcactactgtagagcaacgtggtgtccgagtaggtgaagaagctgctaacattctcatctcgaaagtagaaggtttactgcctcccgacaaagttgaaaagaggattgtaagaacaaaactcattattagaggaacaacgaggtaattcataattcataattaaaaattcataattgagaattcataattcaatttgctgacagtatatttgttatggaatatgaagaaatcaagttgaaatgaatatctttgaaatagatatctgaacaaaacataaattctcacttgaacctaaactctatctatcaatgaaagatatagacaacaatgtaatcgtccaaaagagttttgcttttgccattcgctgtgtaaatctctgtaaatatctgagagaagagaaaaaagaatacgaaatgagcaaacagcttatacggagcggaacgagtattggtgcaaacgtaaaagaagcactaagagctcaatcaaaagcagactttaaatcaaaactcaacatatcactgaaagaagcgagtgaaacagaatactggatagaacttttatggcgcactcaatacattaatgaaacggcagcaaaaagcatcttagcagactgcgttgaattgattaagctgttaacatctatcatcatacacattacaaaggagcaacaaaaaagtaagtcttcataaaagaactataattgaccacttttgaatgagacatcatgaatcaaaaaactcatcgcacatcctaacacaagtatgaattatgagctatgaattatgaattataattgaccgttttgcatgaaacatcatgaatcacaaaaaacttcattgcatattctaaagtatgacttatgaattatgaattatgaattataaaaaacctcatcgtatattctaacaaaagtatgaattaaaaattatgaattatgaattaaaaagaaagcccgacatgagcttttggaatctttggaatttaagtttcggatttttcggtgtacagattgcgtacgcgctgcagagtgcaaacatctcacgcatctttgccacattaggtgccgacccacacaatcttagttatttttggatattacctcccctcatgggaattgtagtacaacccatcattggtacttgttcagatcgtacatggacacgctatggacgccgcatcccctacttattcatcggagctgcggctgcggtactggtaatgtgcctgctcccacagtctggctcattcggcatgacggcatcggtagcaatgattttcggacttgtcatgctcatgttcctcgacacctctatcaatatggcgatgcaaccctttaagatgctcgtgggtgatatggtgaacgaacgacagaaagccaaggcgtattccatccaaagtctgctgtgcaatgcaggctctttagtgggctacctgtttcctttcttcttcgcactgttaggcatcgctaatacagcccccaagggtgtggtccccgactcggttatctacagttttattgttggtgctggcatcctgattctctgtgttggttacactgtttccaaggtaagggagtggtctccggaggaatatgagcaatacaacggtagcttgaaagttgatgccgagaaaaaagaaaactggattacgctactcaaacatgcgccttctacgttttggaaggttggtgtcgtgcaattcttcagctggatagcctttatgtacatgtggacctatacgcatggcaccgtagcagccaacgtgtggggcactaccgatatggcgagtgagggagcgcaagaagctggcaactgggtaggcgtattgtttgccgtacaagccattggctctgtgttatgggcgccgctattgcccaaactcggtagtcgaaagactgcctacgccctcagtttggtattgggagccataggttttgccgcctgtaccgtgatacacgaccagtatttgttgttcattcccttcctgctcattggctgtgcatgggctgctatattagccatgccatttacctttgtcaccaatgccttgcaaggctatggacacatgggcgcttatctcggcttgttcaatggcaccatctgtatcccacaaatcattgctgcggtaataggaggcacactcctcagtatggtggggtcggtgcaaagccacatgatggttgttgctggcatctcgctattgtttggtgcagctgctgtatcgctaatcaaagatgtcaaagattgatggacttgcaaagccactaacgctttctacattctctcgcctctcacttctgtctgtgttagaaacaaagacttgattgatagatgatgattaaggctggactcctcgcatggaatccagccttgtgcatatcttgcctcaaaccaacaaaccgttgcagtcttgagccaaatgcaccttatataataagtagttgttttatattcatcgatgtctgacacctattcgcagttgcgaactctgtgtcattagtacatattatttctgaacattggaatgtcacccaattttccccagtaacctaatgatgtaaccttggtctcatttgaaaatctccaggcacatgtggaaaagatctccatcggtccccagtacgagtacgtgtacgggtcataattatatcttattcgtctctctggcttatagagatgagtagcttcgccaccgagaccttgctcacccatatagatataacaataaggtatgcgatagtaggtacggttcaagaactggaagttataaattctgccacaggcgtcacgtccaaagttgtctacaatgtcgtttggctttgacagggaaatgtcggtgccgttaaaggtcaggaagtaagcgttacagaagtggcagttcgactctcgtccacagcggtcacgattcccttgtggtacaaactgtcgcagcaaatttgcatcttctccgaggagtgctatctgataaatttggtcgtcgcagtaatcgaaagcaccttcggcaactcttctggtaaatccagtaatcaagagcgaagcaccacttggcagtactttcttttggcggtcattgtacaagaactgtgcgttattttcttccagtttgcccaagtcaatcacgccagaagccttttctgcgcttccaaatacagagcgaacgagataatatccctccaagctgatgtcatgattactaatattggtaatctgaagaacattgcgattgcaataacagttctttcgtgttgaccagaattgtgtaatcaccaaacctttgtcacaaacgggtgcttcctcagtaatatttacattgtaagtcttgttattcactaattgttcgtttttaccaatgacctctttagaatagtggcgcgctttgcttgagtaggtagtctttttctggagactcacagtagtagactgttgcgattccctgttaaggattggcatgaaccacacaatcaatggcttgctctcttgctttgccttcacctgaaagtttttcacatcaaacctaatgttctgctgcgtcgtagtttctggttgccatgcagccactccactctcagaagagaacaggtcgagtgagccgttagtggacaccaggtcagagcttacattcatgaaatcgggattgatatctttctgtacgttcaacgtcacggcaaaccaactaccaagcgctttgaaatgaagattgatgtcaccatgagtgttgactttggttagagaggcatagaaaggcaggttaaactggtctgatgctgcatctgccgtgtgtgaagcctctatcttgaacttgccgtcagccgtcatgccgcttgcccaggcaccgttgttcacgcctggcaccttacccatgacagctcccatatacaggtcgccacgtctcctgtcgaagccagcaggtatatttatagtgaattttatgttgtttccattcactacgaacacctcgtcttctaccactttctgcatgttgccttgcttgtagcacatgaacacaggtatcttctcaccctctttccatctaaagctcagcttctttttgctattgtaatgcactgttgttctcgtttctggagtcgcgttgaacatagcatccacctcatcggtgtcgaaagatgctgttccagaaatgacactcgaggtctggtcggcagcagctctttgcacgtcgttcagcacatcgttctccgaacagcctgtcaagaaacccagcaagctaatagctatgaacgtaaaaatattctttttcatttcggttttcatatttaatcgtttttaatagtttgttattagttatttccatctgcttcatcaccccacatggattcatcagaaaaatcactctgaccaaaatcataggctttagcatgagtctcatcatctatgccaccacctcctccagatactttcagcagcgcatcttctacatttgtgtaaataatatccacccttggacttacatattctttcttcatacataaatactcctcgttttagttgattagttgattcttattattttatgattcgttatattatctcttgtttttttcggtataattcctctatattacttgtgtttgcaaaattaggcatctttataataagggcgcataacaaattatttcaaaaaattatcgttttgtttcaatctttattttgctcaatattgatagtactaaaatgaaattgacaaaaaagagtgaaaatagaggcacgcaatataataggtggagcgaaccgcataaatgaacatttatatggaaaaagttcttaatttattttaaaacaattctttaatttataacttttcttaatatttgaaacatatgtcgcacattttttataaattcacaacaaaattataaaatatacaaattgcctatgcacgtttactacttgaataagcacctgatgtgcgaacattataggaataacagccctacgggttttagggttttgaaagaacagaaaggagtcaccacgcatacagatccttcgcgtacagccatgatctttttgttagaaggttgcatgcacgtagagggcaaacagtttccaagtttcaccgtacaaaccaaccaaatgtttccgatgcctgcgggcatcaacaactctataagctttctcgaagacagtactcttttagttctttacttcattgacagcaaatttagattttgccgaagcattcttagcgacgaaaagattagcaacgcaccgaaacgcgacgactggttatttgcgattgacatgataaaacctgtccaagtgctggctcgccaaacagccgactatgtcgtagacaaactgctgtgctgcgatattcaactcattaagcaacgcgaatttacagcggtgatgcaagcctattatcctaccgacaccctggcgtcgtttttggctccactttttcgagtgaatttatcattccaagaaaccatcatgggtatgtcaggcacctatccgtccgttgacgaaatggcagaaaaggtgtgtatgagcagacctaccttcattcgccacttcaagacatgttttggcgaaccacccaaaacttgggtgaacaaagtaaaaggcgaggcactattcaaagccctacgcaacaccaatgacacgttagaggagatagccaaccagtttaagttctcatcggtgcaacgtatgtccacattctgcaaggagacactcgaaggcactccaaacgaaataagaagcgggaaagtaaccccaaagcacgctttataattaccgtggtgtaccgttggatgaggtgagatatgactatttctaacaatggcactatccgctgcaaggaaaggacaaccatagaacagcccaacattcacgtctgtcgatcacttttccctgcctgaaagagtattggatcatccctgcatggtggagaagggatgaggtgtgcaataagaaaatattttacatcgggcatcaatactcggatatttgccaacaactgcccctttggtcgcaaataagcaatttttgtatttatccgtatatcagcgtcttaacccaaaatttgcatagtgaagtggagctaactcaatgcttcaatgagactaaagcattgacttaacaggcttatttgcaccactttgtgcccttattcacacaagatagcgcgacttaaagtaatgggttaaccaccaagaggagtaaaaacaagacgaaaagggcacctcagtaccgtttcaaattctatttctcaactttctgaaaaggaaaaatcaggacaaaatcacaggcactcgcctaccctgtgcattcataataaagagaggaagcgcaatcgtttgcgcaatatttctaacagttttatctctacaaggcagcgaccccctacctattctttataaatttgcagataagcgacttattaacagtcgaacaactactaacccttagtctatgaatctattatttaacattgaatacaaaacggtatttggggaagacctcatcttgaatgtagtgaatgaaggtcagcctgcagacgggctttataccccttatagaatgtacaccacagacggactgcactggaagtgcgacctcaaattgcctgccaccgcagagcatgcttccctttgctactactactcggtagaatgtgacggaaaggtaacgcgcaaggaatggaccactcttacccaccgccttgacctcacggcagccaaagcgaagcaataccatgtgtacgaccattggatgcagataccagaagactcgtacttgtactcttcggctttcaccgactgccttcaccgcagcacattgcaagccctgcagcctacggcttacgacaagacggtgcgtatcatcgtacgttctccacaactcaagcccgaccaatatttagtgctgtcgggcgacaccgaggcattgggcgagtggaacatcagcaaagcactgcccatgacccagcaccagcacaacgaatgggtggtggacttggacgctgaaacactgagcgagcagcacatagaactgaagtttgctgccctgtcgtactctcttcccacgaacgagccgatgtgggaaccgtgcttcaaccgcaccatcgatgtacccaagctcaaccgtggcgacatggtagtgtaccacttggatcaggctttcatgcccatgcccaacacaaaggtggctggaacgttagtacctgtattctcactacgcagcaaaggcagctttggcgtgggcgactttggcgacctcaaggcaatgatcgactttgtagaagccaccggacagcacgtccttcagctgttgcccatcaacgacaccacagccacctatacctacaccgactcttacccttacagctgcatcagcgtgtttgcgttgcatccgctctattgcgacttgcgccaattgcccaaactcaacgaaaaggcgcagcaagcgcaatttgacgctttgcaagaagagctgaactgtctgccacagatagactatgtacgcgtgatgaaaagcaagatggatttcttacagttactcttcaagcaagagggcaaacgcaccatgggcaccaaggcgtacaaggcgttcttcgaaaagagcgatcgctggctggtaccttatgcacagttctgctacctgcgcgaccaatatagcacggcagacgcaacacaatggcccgaccaccacgcatggaacgaggcagaccgcaaggcgttaagcaccccaagcaacaaggcatatcaacaagtagcgttctactacttcgtgcagtttgtgctatacacccagatgaaagaggcgcacgcctatgcgcaaagcaagcgcatcgtactcaaaggcgacgtgccgattggtgtgagtcgtcacggctgcgacgtttgggtagaacccaaatacttcaacatggacggacaggctggtgcgccacccgatgatttctccgtcaacggacagaattggggattccccacctacaactgggatgagatgttgaaagacggatgcgcatggtgggaacgccgtttcaagaacatggcggagttcttcgacgcttaccgcatcgaccacgtattgggattcttccgcatttgggaaatacctattagctgtgtcaacggcttgtgcggtcagttttcgccctcgctgggtatgtcgcgcgaggagatagcatcctacggactcaacttccaagaagatttatttacgaagccttacgtccgcaactgggtcatcgacagagtgtttggcgaacatcgtgaagaggtcatcgccaaatacctcaaccatattcacgacgacgtgtttgaattgaacgagcatttcaataccgagcgtaagattgaagcagccttcgaggggcaagagatggacgagaagaacacatggatacgcgacggactgtatgcgcttgccaacgatgtgttgtttgttcgtgacaagaagaacccacatctgttccacccacgcatcacggcacaattcaacttcatttacgaaagtctgtgggatgtggacaaacaggcgttcaaccgtttgtacaacgaatactactatcgccgcaacaaccagttctggtatcacgaggcgatgaagaaattacctaaattggtacaggctacccgcatgttggtgtgtgccgaagacttgggaatggtgcccgattgcgtggcatgggtgatgaacgaactgcgcatcctcagtctcgaggtgcagtcgatgcccaaagacccaaaggtaacctttggctatttacctggcaacccctacagaagtgtggctaccatatcctcacacgacatgccaacgctgcgccaatggtgggatgaagattacccacgcacacagcattattacaacaccatgcttggaaaggaaggacctgcccctcacccactgccgggttggttggctcgcgacatcatttggcaacacttggcatcgccctccatgctttgcatcctatccatacaagactggttgtccatggacgaacgtctccgattggacgatgccaacgccgaacgcatcaacattcctgccaatcccaagcactattggcgttatcggatgcatctgaacatagaagacatgctgaccgacaacagcttggtgagcaatctatgtgaactgaactcacagtcgggaagggtctaataccctacccctcacacctataaccacaagggcgcaaacccttgtggcatacctttcaaccacaacatcatgaagaaaatcaaccttatccttttgttttttatgctgccaatggcattgttggcacaagtagtcaaatcgcccaatggcaatgtaagcgtcaacttcagtctgcaaggcaatggcgtacccacctattccatgacctacaaaggcaaagctgtggtgaaaccatcgcgcttgggattggaactcatgaaggacaaacacgcctccaaggggctcagggaaaccgacttgatgaatgggtttacggttaaagacacgcagacatccacctttgacgagacatggaagcctgtttggggggagaccgcaaccatcagaaaccattataacgaactggcggtaacgttgcatcaagcttcttctgagcgcaatatcattgttcggttccgtgtttacaacgagggaatgggattgcgctatgaatttccacagcaagacagtttgacgtatttcctcattaaagaagaacatacgcagtttgccatggctggcgaccatacggcatggtggataccgggcgactatgacacgcaagagcaaaagacacagcaaagcaaactctccgaaatcagaggtcgtttccatgatgcggtgaactggggaaactcgtcggtggcggtattctcgccaacaggcgtgcagacctcgctgcaaatgaaaagccaagatgggctgtacatcaacatccacgaggcagcttgtgtggactattctaccatgcacctcaacttagacgataagaccatgacgtttgaaagctggctcactccagacgcatacggtgccaaagggtgcatgcaaaccccttgtaagagtccgtggcgaacggtaatggtgagcgatgacgcacgcgatatgctgtcgagcaacctcatactgaacctcaacgagccgtgtaagatagaagatacgagttggattcatcccacaaaatactgcggtgtgtggtgggaaatgattgttggcaaaagcgcatggaactacaccgacgagttcccgtctatcaaactcgaccagatagactggagcaaagcgaagccaaacggacgccatgcggctaacacagacaaggtgaagcgatacatcgacttcgctgccaagaacggattggaccaagttttggtggagggatggaacgtaggttgggaagattgggcgaaccactggaagcaagacgtgttcgacttcgttactccttatcccgacttcgacctaaagggactcaacgagtatgcccattccaaaggcgtaaaactcttgatgcaccacgagacatcatccagtgcggtgaattatgaacgacatttggaaaaagctttcaatctcatgaaccaatatggatacgacgccgtgaagacaggatatgtaggtgacatcattcctcgtggcgaccaccacttctctcaatccatgaacgaccattatatgtatgtggtgaagcaagctgccaagcaccatatcatggtgaatgcgcacgaagcgacacgcccaacaggcttatgccgaacatggcctaacatggttggcaacgaaagtgcaagaggtggagagtacgaagcctttggaggaaacaatccagaccataccactatcctgccctttactcgcttacagggcggaccgatggactacacgccgggtatttttgtgacgaaactgtcagaatggagcaacaataccagctttgtacattccaccttggcaggacagttggcactctatgtcaccatgtacagcccactacaaatggctgccgacctgcccgaacactacgagaagttcgatgatgcgttccaattcatacgagatgtggctgttgactgggacgacagcaagtatttagaggctgaacccggcgactatatcaccgtggctcgcaaagcaaaaggcacggacaactggtttatcgggggcaaatgtgatgagaacggacataagagtgtcattaaactcgacttcctcgacaagggtaagaagtacagatgcacgatttatgccgatgctaaaaatgcccattacgaccacaatccacaagcttatgtcatcacgcacaaaaccgtgaaacgtggagacgtgttgaaaatcaatcaagcctgcggtggcggatttgccgtttcgctcatggcgcaataatcaataacacccttacttatgagacattatcagcattatattttcctgttgttggcttttttgatgccaataagtaaattatctttatctgccaaagtgttcaacgaaatgatttattcgcctcaaaagacagctttcaagctcaatgctccaagcactgccaagcgtgtcgtgctgcgtttgtacaaagaaggcgaaggtggaaagcccacaaagactgtaaaaatgaagtcaatgggcaacgacgtgtgggcaaaagagatgaagggcgacctgaaaggcatgtactatacctttgaagtgttgggttaccaacagcacaaagaaggcgagactccgggcgtgtttgccaaggctgtgggcatcaatggcaatagaggagctatcattgacctgcaaacaaccaatcccgaagggtgggaaaacgacaagagacctgcactggcatcaccctccgacttggtgttatacgagatgcacgtacgggattacaccgattcgcctacctctcctgccgttcataagggcaagtttgtgggattggctgaaccaaaagccattgcccacctcaaagagttaggggtgaatgcggtacacttgttgccttcgttcgactttgcatcggtggatgaacaccaaacctccaatgccaactacaactggggatacgacccaaagaactacaatgtgccagagggagcatacagtaccaacgccaaagaccctaaagtgcgcatcaaggagttcaaacaaatggtgcaaaccctgcacaaggcgggcattcgtgtaatcctcgacgtagtgtacaaccacacgttcgacatcgaacacagtaactttcagcgcacttaccccgattactattatcgcaaggacgcagaaggcaagtattcaaatgggtcgggttgtggcaacgagacagcctcggaaaaacctttgatgcggcaattcatgttagaatcggtaaaatattggatcaacgaatatcacatcgacggctttcgtttcgacctcatgggcattcacgacatagcgaccatgaacgctatccgacaggaagtggacaagatagacccgtctatttatatctatggtgagggatggagtgcagggatttgtgcttatcctgcggacaaactcgccatgaaagccaacatccaacaactgccaggcatcgcagcctttagcgatgaattgcgcgatgctttacgtggtcctttcagtgacgacaggaaaggagcttttcttgctggcattgctggcgaagaagagagcattaagtttggcatcgctggtgccatagcacatccacaagtagacatgagcaaagtgaactacagcaaagtggcatgggcaactgaacccacacaaatgattagttatgtaagttgccatgatgacatgtgcttggtggaccggctgaaggcgtctatacccaacatttctaccgaagaaatcatccgattggacttgctcgcacaaacggcagtgttcacttcgcaaggtgttccgtttatgttgagcggcgaagagatgctccgtgacaaacaaggggtgcacaactcgtttaactctcccattgaagtaaaccgattaaattgggacaatttgcagcgttacccacaggtgttcagctattacaaagggctcattgcactgcgaaagcaataccacgcattccgtttgggcaacgccgaggcggtgcgtcagcatcttacattccttccaacagagccttgcttagtgggttatcgcttgtttgatgcccccaccaacagctacatctacgtgctgctcaatgccaacaagaccgcaaaacaggtatccttaccagctggagcgtacaacgtactgtgctatgatggggtcatcgacgtcaatggaacagagaaattgatgctcgatgaacatgccgacaaggccattgtccctgcccaatcagcgcttattttgtctatcaacaagcaataattttttgtagtaacaacaaatgtaacaaataaaacaaataactttgctatatttatgaataaaaatgagctaaagctcggacgaataaaacaaatttaacacaaccataatccctaattaactaacgtataaatgccatgatatggaaccgctgtataaggatttgtcttatgaaatagtgggtgcagcttttgaagtacataacgagctggggtgtggcttcttagaaaaagtgtaccaagaggcatttgccattgccttacaggaacgaggcattctctttgaaagagaaaaaagaatcaacatttcttttcaccatcatccactcttcacaccctacatctgtgatttttgtgtggaaaataaaataatagtagaactaaaggctatacaaaagattgacgataatcacaaagctcaactcatcaattacctcaaagccacaggactacaattaggaatattaatcaatttcaatgaaatcagattatcacctatccgactatttaatccacaaaatccgataaggtaatctcacagtcatgaaaaccatgcataaaagaacgtatataacactcaccaactatcaaaatgcacaaaacataaacaaagaacaaataacaaattggagttctatataggtatcttaattcgttgaatttgtcagaacatttatgttcattcgatattatcagtcgtaaaaagataattcgttttatttgtttcatttgttgttaaacaacccctcacagttcaccgtagcagtcatttattcaaaaaactatcaaataaacatcgcatgaagaaatctatatttatcatgtttcttttgtgtcttgcgttcgcaacgaatgcgcagatacaagttaatcgcattgaccccaccaattggtttgttgggatgaaggatgcgagtttgcaactcatggtgtacggcaacgacttgcacggcactcaagtaacaacccatgacgctggcgtgcgaatagacagcgtggtacagatgcccaacgcacattatttgttggcttacctcaacctgaaggacgccaagcctggcaccatcacgctgtcgttcaccaagggaaagaaaacaaaaaaagtgaaatacgagctgaagcagcgtgagatgagtggcgacaagcgcatgggattcaccaatgccgacgtgctgtacatgctcatgcccgaccgatttaccaacggagacaccaagaacgaccagataaaaggcatgaacaaatatgtttgcgaccgcacgaaacccagtcttcgacatgggggcgacttggagggcattcgcaaacacctcgattatttcaccaatctgggagtaaccgccctatggttcacacccgtattggaaaacaattcgccagacaccaacggctctagtacgtaccatggctatgccacgacagattattataaggtagacccacgctttggcactaacgaggaataccgccagctcattgacgaagcccatcaaaagggactcaaagtggtgatggacatgatattcaaccactgcggatttgaacacccatggctcaaagaactgccctctgacgattggttgaatgtgcctgaatggctcgaggaaggcaagaaaacaggaaaagatgagaaggcaggcatgccaaatggcacaaaaaccgactccaagtatttgcagaccagttataaactcacgccagtactcgacccatacgcttcgaaaatagacctaaaagaaaccgttgacggatggttcgtaccctccatgcccgacttgaatcagcgcaatccgcacgtcatcaagtaccttatccaaaacagtatatggtggattgagaccgtaggcatcgatggcatccgcatggacacctatccttatgccgaccgcaaagccatggcactgtggatgaagacgctcaacgaggagtatcctaacttcaatgtggtgggcgaaacatggaatacagaacccgcttatacggctgcttggcaaaaagacagcaagctgtcggacatcaacagcaacctgaaaagcgtcatggactttagtttctttgagaaaatcaacaaagcaaagaacgaagaaaccgatggctggtgggatggactgaacagggtttacaactcactggtgtacgattacctatacgaaaatccaaaagatgtcatggctttcatcgagaatcacgacaccgaccgattcttgggacacggacaagatacagcagcactgaagcaagccttagctcttttgctcaccatgaaccgcactccgcagctgtattacggcaccgaagtgctgatgaatggcaccaaagaggtgaccgatggtaatgtacgacaggatttccccggtggtttccctggcgatgtacatacggcattcacggcagagggcaggtcaacggctcaaaatgaaatgttcaactggctcagcaagctgctgcattggcgacagggcaatgaagtgataatccaaggcaagcagattcagttcatccctcatcaaggggtgtacgtcctggcacgccaacatcaaggtaaaaccgtgctgaccgtactcaacggaacgtcgaaagaagctcagttggacgtgaagcgatatgccgaagtaattggccaacacaaagcaggtgtggaggtacagacaggaaaaaccatcgatttgaccactgacatactgttagaaccacgccaaaccatgattattggattataaacttctatcagctatttggaggattgatgtatctcatatcacatcaatcctcaaaacattttgttcaaacacacatacacctactttttcaacacactccttaccgcaaaccatgcatgcatgaagagtgttgggagataaccataatgtgactccataacacgaaaacgctctttcaaagatgccttatgatttttctcggtcatgcctccgtccaaatagttcgccactacagtctggacattgcacaaaggcagtccttgtttctgtgccattttcatcaccctgatacaccagtcaacatctgcagaataacgatattttaattgatagggaactttctttgccaaatccgcgcgtgcatagaaggcttggtgacataccaccattccatgcataaacgacttccagctcaacttcttaggcggagaaagacgacggtggcgcacaaatttcccctcattgtctacaatatctgtgtcgccatataacacaccaggcaagacactcgtccccttcgcacatgctgccacctgtgttaaagtgctttcagaaggaaaggtatctccagcattcagaaacaacacgtagtctcccgtagcatgccgaagtcctttgttcatcgcatcatacaatcccttatcagactctgaagtcaccattacctgatgtccattgttttgtgcttgcgactcggtgacataagcttgcgccaactgcagcgttgcatccgtagaagcaccgtccacaatcaagtgctcaatatccttatatgtctgttccaatacacttcttagtgtcctttctatttctttctccgcttgataggtacaagtgataattgtaaatttaatcatctattcttcctttttatttctccatacggattgatacacagccaaatatcgttccgccacacgctgttgtgcatactccgtccttactttatggatacagtttttgctcaatgtctcgtagtcggtttcttcatccaatatccatgccatgccagctgccaaggattgcgcatctttataatgcgccacatagccattctctcggtgatcaatcatctcaggaatgccccctacctcaaaacctacacatggtactccgcacgccatggcttccataatggtattgggcaagttctcagaaagcgaaggcaggacaaacaagtctactgcattgtacacatccacgattttcttcgtatcattcacataaccaagtggataagtaggtaaatcaaaccgatccgttatctcctctgcatgaccgcccaagaccactaatcctacgctatttttcagctcaggttgctgcttaacgagtagttggcacgcctctatgagatactgaatacccttattaacgttcgtgaggcgctgtgaggcaaacaaaatcagctgtttgtctgttggcaatcctaacctttgggcagcctcgtgcttacttgctggtgcaaatacatgggtatcaataggattaggaatgatagagagagcttgctttgatagtaatccacttgcctttgcctgctgtcccaaccactcactacaagtcacaaaatgaatcttacgttgttggtaaatggcgtttttgcgttgccaaatgcggtgcgataaatccgttttagaacctccacctggtagataaaagcagtttccgcactctttcttaaaatgcgtacatgaaagactaaggtggcaaatgcctgttgcaggccaaatatcatgcagtgtccacaccacgggtttgccactttccagtatcttttggatattacgaagagacaacatcccttgattgatccactccaaatgaatgatgtctgcctcctgaaactcacgcagttgggtgatgtctgttccgatattggcaatgtcgatagcgaacaaataccgcctattaaaatgcaaatggcaaaagatgcaccatcgttcccacaggaaatgccaccacttaagccactgacgaggcaatgctactacagaaagttggtcggtctctttatccttcaccaacatttttgccttgcatcctgccttgttcaaagcctccattaaacgattagaagccagtgctgccccgcccgtcttctcacttgtgttaactatcaatatccgcatatcgctgctttattataggggtaaagatacatcaatttgcaaaatccaacaagaaattagtgctttttaagccattggtacagcaatatgaccgcatatagaaacatcaccactaccctattggtgaagaaaaacaacattgtgtgcgaacacaatttgttgatataagtcaagaaagcaccgtttttgcaaggaaacagcaagacatatttggaacaaaccgcaaaagtatatacctttgcaacaccaaaaggttaatagattgtttaggttagtagtaatagatttaggtttttagttattaggtttaaggtaaattaaacagattgtttaacaggtaacaatggaggccgtgaggttttcatttactaagaaaagttttttagttaaacatacttatacgctgtagctcgagaagagttacagcgtattttttttaacatagctatcacctaaaaaagagacacatttttagaataaaaaaggaacgttgaagggagatattttgcttaaatgcttatctttgtgacacgatgcaaatgatagaactcattgatttaataataggatatgataaccacgctgtggtatctcctatcacagcctcactgaatagtgggcagctcacctgtttattaggggcaaacggctcgggaaagtcgacactgttgcgcacacttgcgggttttcaaccaccgttaaagggtacgatcaagatggcaggcaaaccacttcatcaatggaatcatcaagagttagcgcaaaaaataagtgtggtactgaccgaaaaactcgatcttaaaaacttaactgtctacgaattagtgggcttaggtcgctcaccatacacaggattttggggaggattgagtaagatggacaatgaaattatacaatcgtccatcgcacttgttggcatcacccctctctctcataggaagatacaaacgctaagcgacggagagaagcaaaaagtttttatagcaaaagcattggcacaacagacgtccgtcatcatcttggacgagccaacagccttcttagattttcaaagcaaagccgaaacgctacaactacttgcacgtctggcacacaaagaggataaatgcatcttcttatctatccacgatattgagttagctatccaagttgcagataagatatggctcattgacgatgcccatcaattacaggttggcacccccaaagaactaatagataatggcatattcccccgtttcatcgagaacaactccatacaatttgatagttatcaccaaaagattagaataaaaaaatagccattttatcgttgagaggaatcctttcacgtccgataaaatggctgttttttgaaattgtcgatgataaagcctctcttcatgataagataagactgtatcctatcattgagacgctttattttatctttttatttcaccgaggtctgcttatctttaacccgtttgatttgccgtaacaagtctttgtagtgcagggcattcacgccactactttgcgcctgttgtgcttgacaatacgtctctattttttccaaaagcatttgtacatacagcaacgcatcacttgtcagcgaagaagaattgccacctgaacctgtcgcaagcatttgagaaagactggaagctcgttgtggtttttcacttgggttaagcagttggtcgacacattgcacaaaactacgctccaaagtacgacgagtggtgttctttatattctgctctgtcgttaatggtttccacactgcacgataaacatcgtcaagataatcgggcaattggtaagccgaagagcgatcaaaagaatcgttataaatcttagtcaagacatctaacgagagcaaagaattcagtacacgattttgatcactcgaaatacgagcaacggcattgtcacctgtgatacttgtgatattgtcgggatacaaccataatggtgcatcaaacaactgacgagccaagaaatctaccgcttctttctgacgctctgcaggtgctacttcatagggtttagaacccggcagattgttaagatagcgtccacctacattctttagcacatgattggtgtatctacggaactggtcacgtacgctttcatgcatctctgtgagattgtcaaattgactatctggctgtttggtccactttggcaggttcgccatgacacgctgtaagttaaggataccataatcagacgccttcacattgttatcacccaaatcctctgtttgtgaacgggggtcttcatcacgcccctccccactgaaccaaaggcgaggattatttttcaatactttggttgtttctgcacgtaaggctttgcgttctgcaaattcatccttaaattctgggcgatattgatagccccatttaatcgcccacttgtcataatcattgatgcgtgggaaaagaccttttgacgaaatgccgtcttgaggttgtgccacatagttgaatcgggcatagtccataatagaaacggtgtgtccatgcttctctacccatgctttgtcacgcaacttttctactggtgtggcatggctggctcccatgttatggcgcaagccgagcgtgtgtcctacctcgtgagatgatacaaaacggattagctcgcccatcagtttgtcgtcaaagggcattttctgagctcgcttatcaagcggaccacactgtgtcatgtaccacttggtgagcaaattcatcacattatgataccagcagatatggctctcaatggtttcaccacttcgaggatcgacgacatgagggccatacgcattttctatttccgcaggcaaataacgaattacattataacgcgcatcgtccacgctcatgtctggtctgtctttgggccattccttaccgataatagccttcttaaatccagccgcctcaaaagctacttgccaatcgttcacacctttaatgagataaggaacccatttcttaggtgtggcagggtctatatagaagatgatgggcttaacgggctccaccaactctcctcgacgatatcgctgcacatctttgggcaccaaacgaaatcttcctatgaattgttcacggtcggtcttatgctgattatcgttaaaatacgtcacacggtctgtaaagtaccccacacgctcgtcccaaaggcgtttacgcataggtgtcttaggcaacatgacaaaactggtgttaagtcctaaggtcaccgcacccgtttgtgcggcagccatgttctgtcccgacgaactgtaagtccgagtcgttgcaatctcgatgttgataggataaacttttaatgtgtcgataaatgttcgatcgctctgcaatcctcccaacttcaaccgcttgctaaagaactcggcaaacgacataactttgttttcagacttaaagagtttggtaacatctatcaagctacgctttgaatctttgttcgttccgataatcttaaacgatgccacaatcggatctactgttgatgccttgagtgttcgagagatattgtccttctcatcagccaactgtgataacacatatacacgtagcaacatggttttctcatctcgtttttcaaagtagaccgttgcctcgttcatcatttctcctgcatactttccaaagttttggggagtagcagtaaggcgtgtcaccgccaagaaatatcgacctaaaagactatctggaacttcaaaataccatttatcttcgatatggcgaactgtgaaaagtcctttgagttctgtccctccctttttaagtaggtcagcatactcattctttttcttgacctttttctttacatccaccgtatcttttaccgtgctggtggtatcacggggtgtcttcttttctgtcttagtggtatctacctttagtgatggatagagccatggatgagcctgaagagacaaacccatgaacaaaaagaagaaactcaataagtgtttgttgcttaaaatcatgattttttgtatcaattgctattttacatcacctgactaccaggctttacaggatgctctatggtggttacgctcaaagaaccatcgaagtcttcggcagacaatatcatgccttggctctcaatgcccattaacttgcgaggtgctaaattagctataaagcacacatctttgccaatgagtgcctcagggtcatagaattttgcaataccactcacaatggtgcgatcggtacctgtgccgtcatcaatggtgaacttcaataatttgtttgccttcttcacccgttcgcaatgcttgatgtgtcctactcggatatcaagtttctcgaagtcagcaaagtcaatggtcggtttgatgggctttgccacatagttagcagcctcgttggctttcttcgtttcttctaactttttgagttgaatctcaatagtctcatcttcaatcttttcaaacagcagctctggttctgccaaatgatggttagctttcaacaagtcggtacttcccaactgactccaatcgaaggtatccatgttgatgagttgccgaagtttcttagaggagaagggcaagaagggttcaaaggcaatggcaagattggcaaccaattgcagtgagacgtataaaatggtctttacccgttctggattggttttccataccttccaaggttcacattcagtgatatatttgtttcctatgcgtgccagattcatggcttccttctgcgcatctctgaacctgaacgcatccaaaagcgtttctactttttgctttacatccttgaattcttcgagtgtttgcttgtcaatatccaacaattcaccacacgctggaaccactccctcaaaatattttttggtgagttgcaacgctctgttcacaaaattgccataaatgcctaccagctcagagttgttgtgctcttggaaatctttccacgtaaagttattgtccttggtctctggtgcattggctgtcaacacatagcgcaacacgtcctgctttccaggcaggtctaccaagtactcatgcaaccatactgcccaattgcgtgaggtagaaatcttgtcattctctagattgaggaactcgttagctggcacgttgtcgggcaagatatagcctccgtgtgccttcaacatggtggggaagatgagacaatggaacacgatgttatcctttccgatgaaatgtatcaaacgagtatcttcatccttccaccatttttcccaagagccccaacgctctggtgcctgttcacacagttccttggtattggaaatatagccaatcggggcatcgaaccatacatatagcactttcccctctgcaccttctactggcacaggaataccccaatcgaggtcgcgtgtcatggcgcgaggctgcaaatcaaggtctaaccagcttttgcactgtccgtagacattggagcgccactctttgtgtccttgaagtatccactctttgagccactgctgatattcgttcaagggcaaataccagtttttagttttcttaatgacaggttttgaaccactgagggtagatgtgggattgatcaattctaatggagacaaggctgtgccgcaatgctcacactggtcgccatacgctccatcgtagtgacagtgggggcactcgcctttgatgtaacggtctgccaagaactggtgagcctcttcatcataatactgttcagactcttgttcctgcaatttgccctcattcaacagtttcttaaaaaagtcggaagccaactgttcgtgcgtctttgaggtggtacgcgaatagacatcaaagctaattccaaactcctcgaaactctttttaatcatagaatgatagcggtctaccacatcttgtggcgtaatcccctctttcttggctcttatggtgatgggtacgccatgctcgtcgctaccaccaataaagatgacgtcttggtttttcagtcgcaaatagcgaacataaatatcagcaggtacatacactcctgccaagtgtcctatgtgaacgccaccattggcatacggcaaggcggccgtcacggttgtgcgtttgaactttttctcttccatgagtttaatgggtttaatatttaagtgcaaaattactacaaatcaaagagataacaaaataattgagaaactgattgaggctggttctataaattagctttgttagattttgagcttatttttgaggtcaaaatgcaagagaatgaaggagtgtagcgagctacacgactgaacgaacttacattttgaactaaaaagaagccaaaagataacaaaacgtatttcatacacatttgatgactatgtgcggtggtaatttatagaaccagccttaaaacaaagaaatactaaacaatcttgcaacttccctgtatgtacttgctatacttcaacgcacacttgaaaccaattaacgcaccaattcaagttgagttttgttaaaataaatgacaaaaaacgagggtttagaaaaagacaaaatagaaaaaaatgataggcacgctcactacacaaaagtgtgaaaatgacaaaaataaagcccaaataatgttagagcattgagttaagaggactgtaaacagcacttaaaggcgctatttacatgagataaaagggttagaacaaagagttaagggcactaaagcaatcattttggatagtaagagaggcaagttaaacgcttaataacatgaatgagaattacaacacactgataaacagtcgcttataaaagtcttcaaatactgcgatatttgcgacgcatgacaggtttgtttcaaaatacggcagctatgaaggggttgttgtcaagaaaaaagacaaacatttccactcattttgtctcgaattggaggtattgagaaactgggttgcagtcttcttcgctacaagtgccatagattttctggcgaagggcacttccaatgatatgtggaagaaatagccatttcatcgttatacaacgacttatatcaattggcaatgtacattttgacagtattttacaaatattatagtaataaaggaaaaaacttagtcggaaaacttgcttatgttatataaaatggttatatttgaaacacgatacttatttaatttttatgactatgaaaagaaaattttttaatgcgaaattttatcgcaacagttcagcaacggaaatgattgtggagaatggcaagattgctcaaattggcaataatctgcctaaatgtgacgaggagattgacctgaaaggtaagtttgtgcttcctccttacgtagatccacacttgcacttagactatgtttacacgctggccgagatggaaggcattggcgctgcatcgggtacgctttacgaggctatcgaaaactggcccaagtataaggcaacaatgaccattgagggtgtgaagaagttggcacgcaagggtatcgaggacgaggtatcacagggtgtacagtttatccgcgcacagaccgacgtcaccgatcccaagtttatcggcttcaaggctcttatggagctgaaagaagagatgaaggatattgtagatatccaggtagtagcattcccgcaaaacggtatgtacacctacaagggtggtaaagaattggtggaagaagcactgaaaatgggtgctgacgtgattggtggtattccacactacgagccggcaagagagtttggagagaaatctatccacgacattgttgagctggctatgaaatacaacgtgctgattgacgtacactgtgacgagaccgacgacaccatggcaagattcgttgagatattaaacgccttggtatacctggaggattatggtacaaagaccaccgccagccacacctgttcgttcggttcggccgataactcgtacgcttaccgcatgttcgatatgtttaagagaagtaagatgaacttcatctcctgccccacagagaacgcgtacctgcaaggtcgtcaggacacttatccaaagcgtcgcggcttaacacgcatcaaggagttcatgcacatgggtataaatgtagcactggctcaggactctatcaacgacccgtggtatccattgggaagcggtaacatgatgaacatcctggataatgccatccacttgtcacattatgcaagcccagaggaggtagaaaacgctttcgacatgattacttacaatggtgctaagtgtttgaacatccacaacgcatacggactggaagaaggcaaggatgctaactttatcgttctggacggcgacagctcatgggattgcatccgcagacgtgttggtgtgctggcttctgtaagaaagggtgaattcttgtttaagaagaaaccgacagaatatgagattcctttcaagatgtaaggacaaaaataacgagcgaacaagttgagaaattgactgttcaaagtctaaagttataatcacaaaaaaggctactatcgaaagaagtagccttttttgtgatgtatattttacttgtaaattatcctatccgacgcaatgtgtgtcttgcaaagatagaaataatcattcctggaaccgccattactaccgcataccataacagactgaacgctccaaagcgtatcaacagcagtcctgcaatccaagttgtgaccataatagagaggttaaacatgcacgactgcaccgacattgccacatctttggctttctctacttggttgcccacagctgcctggaacaacgtaacgagtggtccgaatgacaatccccataagaagaaaccgaaatgagaaatgccgctggcacccttaaagaagtagaacaacaacatagcgatgccaaggagagcaaacatcaacacggtaagctcacgcagatacatgtcaatatacttcgtagcaataataatggaaatcaaagaaccgatgccgaaaacaagcaatgccatctcgacgccaccttcaatgcctatctctcctaccaattgggtaatataggtatagactccatagtgtccacaaacgcccaacaaggtgagcaagataatgagtaagatggacttattcttaagcatggcgaatggtgaagtgctcgatgtgagcttctcgcccggtgttgacggcaacatgaagagtgacaacaaagcaatcagagccaccaagagacctaatacaatgaattcaatgcgccaaccaaactgatcaccaacagaggtcatcagaggcattccaaggctaatacctaacgtgttgcccgccataataatggctacagctctaccttgatgacttggctcgacgagtcgcataccgtaggctgctatcatgggccacatgactcctgcactgataccaccaatgaaacgcagtgccaatatcagatagtagttatgcaccaaacccgacaagatgttacaaatcgcaaagccgattagcaacagtaacagtaggtttttgcggttgaggtgcattgtggcagaaatgagaggaataccgaagattgctgaggcaagggcatataagccgaccatgcgaccagcttcaacttcattgatgtccaaatctcccataatctgttgcaacacgcctgaaggcagtaattccgacaaaattccgacaaaagtgaccgatgacatcaaaatcatcagcacccaaggaaataatcctgttgttttgttttcatgtaccatacgtctaattgtttaagtaagtttttccaaagataaacaattaaaatgtacattacaaattttcgatgataaatttacgcatcacttgctttatccaatttttccgaacaattggatgtaaatacgaactaaaactcagcggttcatcaagcgtattaggagtgccttcaattattgaagaaccaaaaaatgtataggtgtagggaacttttcgtacgtttatacaaaaaaggaaagaaaggactaaccgaacagaaacaataatttatctttccgcccaatcacctcgatctaaattgcgataactaatcgcctcagccaagtgttcggtcaatacttctggagatgcggataagtctgcaatggtacgagcaaccttcaaaatacgactataggcacgagctgacaggctcattcgttccatagcaactcgcaacatctctaccccatcctgattgggttcggcatattgatgtatcatgcgctcggtcatttgggcattacaatagatacccttgtgtttttgaaatctctctgtctgtatggcacgtgctttcagcaccctttgccgaatatctgcactcggctctccaggttttgtacgagagatgtccttaaaaggtacgggggtaatttcgcattgaatgtcgatacgatccagcaaaggtccactgattttgttcatgtatcgctgtatttgccccggcgtgcagacgcaagtatgtgtgggatcgccataataaccacaaggacacgggttcatggaagcaataaacatgaaattgcaaggatactcaatggtgtatttggcacgcgatattgtaatctttctatcttctaagggttggcgcaatacttctaaagttgttttcgaaaattctggtaattcgtcacaaaataaaacgccattatgcgccaaggtgatttcaccaggttgcggtgtacttccccctcccaccagtgccacttcgctaatggtgtggtgaggagaccgaaatggtcgctgtgcaattaaagatgttcctgctcccaatttgcctgcgacgctgtgtatctgtgtggtttccaaactctcagagagcgtgagcggtgggagtatcgtgggtaatcgttttgccatcattgactttccactgccaggaggaccaatcataatcaaattatgacctccagcagcagccacttccaatgcacgcttcacattctcctgcccacgtacatcgctaaagtcaagatcaaatttatactgatgctcataaaactccgcccgagtatcgatgactgtcggttggaacgtcttggtgcctgttaaaaactgaatgacgtcagccatagaatccataccatacacatcaagttgattcaccactgccgcttctcgtacattggcagtaggaacgataagtcctttgaacttctcttttctggcacgtatggcgatgggcaatgctcctttcactggttgcaaagtaccgtccaagctcaattcgcccaccatcatatattgccccaagatttcggacgtaatgctcccattggctgctaagatggcaatggctaaaggcaggtcgaaactactaccctcttttctaaggtcagcaggagccatatttaccgtaatgtctgcatgcggaaatttatagccgttgtattgcatggcagaggcgatacggcttcttccttcttttacagcttcgtcgccaagacctgtaaaatgatacatcaccccattggtgaggctaacttcaatggtgactgttgtcacatctaatccattgactgccgcacaatacgttttaatgagcataataattggtttaaagaagcgtctttatctttgtaacaagagcctctgtgtcaagtccacgcgctacaacacgtccgtttttcaatagtatattatctggaatagacgaaagtcctaattgatgagccaacttactttcaaacatttgttcatcacatacattagaccactggatagaatctctctgcaaaatatcccgacaatctttcttgctggcatctaaggaaatgccgaccaccttcagtttggcgccattcttcctttgcaaatcgtgtatttggcgcaacatgtctaagcttggataattccaagaagcccagatatgaatgaccacgagtgaactctgactaagagcagaagaggtaatggtattcccttttagatcgatggttgtgaaagaaggcaatgtaccaccttgtacaacatgaccagcagacaactgtttttgtaattttatcagcgaaacattgttggcttggtgtttcaccatgacatctaccaactgctttgccttaacgtaatcgggctttggagttttcaaaaaatacttcattaccaaatattgagcaccgataagttgaggattatcgtgtacatattcctccacgtacttaagaatttctggtggcgatgcattggagattttcttgcggaactttgacatcgtctcattttctttcgttccgtctacttgcaactcttttagtcgggaggcatctcccttcacgtcgaccgacttaccgggctgtgcaaaaactggttgctctgaaaaattaggaaatacaatcgacaggattccttctttttcacaaggaatctcgtaggtaaatcgaccaccttgaaccttaatggtgtccaagccatcgatgatgccatcgggactataaacgtaaaactcaccctggttcatgtgtaaaagctgtccatcaagcttaaaatggtggctatctgttccacacgacacacaaaccagcgtgagcaaaataaggtatgcaatatgcttcattgcaaaaataagtcttatctcaagatagacaattcaagatcttgatccgcgtatgttttcaatgctggatttttctttagcgcttctttcaaataagagtcggcagcaaatttattgcctcgacgagctgctacaatggcatgcaaataatcggtcatggcattgggattcttcacattatccaatgttgcggcagcagcggcatagttcttattcatcaactgtgccaaagcagcactattgctgataatgccttcgaaatctttttctgcttgagcgtaatttcccttcgccaaattgagactgccgatagctacattgatgttctgatcacctaatgccttcgcaatatccgtctctgcctctttgaggttgccattctgcaactctaaaatacccaagtttgccaaagcctctgacgcttgtgggttgatacgcaatgcctgctcgaggtagcgagttgcacccatttcatcacctttcataaaagccatcgtagccaagttattgaaagcgcgataatctttgtcatagtaagaagctgtgcgcttatagatttcttctttttctgcttgattgtctaccaacgaagcataatataacatttcatcagcactcaacttcgttgcatctgacgcatattgctctttaatttgatcgtcacttctaccaattgtttcataattgatgattaagcgcgaacgacgcaattctggaagaattccatctgccaattcgcggaaagcctgactcatattgcggatttgctgttctctctgctcgggatccttatacattgatagcacacgcaagataacatccttgtcttgaatattgctggcttgcaccaatttctggaagccatcccagtcttgagccgtataatgcgcatcaacacctgtagcaactcctgtttgtttgagttgagacttcacgtaagactctgaagtgttttggcgtttgttagcaagtttatcattaaaactatacccaccttctggagacgcataagcctgaacttccacattacgaatgttcaatttctcacgatctgcattgatgcgtttgagcatggcaacgaactcttgcacagagttgtttttcaattcacttcttcgcagattggcttggttgaccaagaacttaatattagcctcttgtttcttggcattcacccgctgaaaactatcaggagccaagcatccaccatcactcaacaaaagctgtttgtacagttcagaggttgcaataacaccagtagccactttcacagcagggatattcactgtcttatttcctctttttgcaatgaaagttaaatacatctcactttgttgcatggctggaacaaaatcgaaagctgtcttcatggtgtaacgaccccctaagcgataggaaatcatctggtcattgcccaatactttttctccctggaacgtggtagcagcaccttttgcaacctgtccatttccatatcttagctcaggaacaaccgttactactgcatttttcttcatatatttttcagggaacgctccattaatggttgctggtacttgaccgccttttgtttctaaagggttgggagtaacggtaaaattgttagccgacagcggacccatttttgaacatgaactgaatgcgaaagctgcacatacagataaagtaaagatgagatttttgcacatagtaataaatagtaataatatttttcttgaaaatgtgccgcgagcgggactcgaacccgcacagccattactggccaagggattttaagtccctcgtgtctaccaattccaccattgcggcaaatcattcatatggccatcttctattgtttgtcaacgaaagaagtcactttcttagatatgactaacaaaaatgatgactttctaaaagtgtaaaaaaaagagcggcaaacgagactcgaactcgcgaccccaaccttggcaaggttgtgctctaccaactgagctattgccgcattttttacagtttgcaaaggtagcatataatcttgtaagtcacaaagattttcacacatttttaatattttatttcttcgatttcaaaatgagtacatcaaccttctcttttttacaaatatacatttgtctatttcgctataattatatatttttgcaccaatgtctttttagatacgaaagacaggactcaaaatacttgaaaaatgtgctatcatggttgtacaaagaagcgaagcatgaacacaaagcgttacgctacatcaataataaatgactatcccaaaaaaaataaaaacgaaaataaaatgaagaagagattaacactggcaatgctgttattcattgctttgtttgccaatgcgcagatggtagaccccatacagtcatcggctcaacttaaaacgaataattctgcagaaggcgaaattatatttagccttaagattgacaaaggatggcacgtctattctaccaacttaggcgcaagtggtcctatagaagccactattcacgtaaacaagatggatggcgtagagaaggtgggaaaactaatggcacgaggcaatgaaatctccaagatggataacctctttaacatgaagttacgttattttgaaaataatgcgcagtttgtacagaaagtgaaattcaccaaacccaaatacaacttggatgtttatttggaattcggtgcttgcaatgatgccacttgcatgcctccacaagaagtatcttttaagaagtcggggacagcacctaaatttgacgcaaaggctgcaacccctcaagaagaaaaaaaggtagctacagaagagcaagagacgtctcttcctgccacggatactacacaagtcctgcctcaggactctgtcaaagaagctgccgttgactcttctgcgactgccgttggcaccgatttatggcaacctgttatccaagaactgcaagcacaagatggtcgttcagaaaagaatagttctatttggtatctcttcatcatgggatttgcgggtggactgctggctcttttcactccttgcgtatggcctatcatccccatgaccgttagtttcttcctcaagcgcaacaaggatagagctaaaggaatgcgcgatgccattacttatggattagccattattgtaattttcctatcgttaggattgatagtcaccgcactttccgacccacataagctaaacgaattagccaccagtgctgtattcaatattttcttcttcctccttttagtggtatttgcgttgtctttctttggatggttcgaactgcgattgcctgaatcttggggaaacaagatggatagcaaggcttcctcgacaactggtctactatctattttcctaatggcgtttacccttgtattggtatccttttcctgcacagcccctatcgtaggtttcttattggtacaaacggcaacctcaggcaactggattggtccagccattggcatgtttggctttgccttggcacttgctctccccttcacattgttcgcactgttcccctcttggctcaaacaagcgcctaagtcgggttcttggatgaatatcatcaaggtaacactgggattcattgaattggcttttgcgctcaaattcctctccgttgccgatttggcatacggctggcatatcctcgatcgtgaggtcttcctctcgttatggattgtcatctttggtatgatgggactctatctcattggtaaactcaagttccaaagcgacatgattggcggtcaagacaagcctatgccagtagcatgtatcatgcttggcatgatttccttggcatttacagtttatatggtgccagggttatggggcgcacctgttaaggctgttagtgcttttgcaccacctatcaacacacaggatttcaatctaaatcaaaaagaggtgcatcctgcctataccaattatgaagaaggcatggcagctgctaaagcacaaggaaagccagctttcgtagatttcactggatttggctgtgtcaactgccgtaagatggaagctgcagtgtggacagacccatcggtagcagaaattcttaccaaagattatgtgctcatctctttgttcgtggacgacaaaacaccactcaaagagcaaatagaggttattgataacggaaagaaacgcactttgcgtaccattggagacaagtggagctacctgcaaagcaataagtttggggctaatacccagcctttctatgttcctcttgacaacaacgggaaacctttagccggctcttatagttataaggaagacgtttctgcttatcttgacttcttgcataaggggttggagcagtatcagaaacaagactaagatttctacctttataggacaggatagactgttttttgaatgtccgtcaatgtaacattgaaaaacagtctatcctcctcctaaccaaaccgacacacacgcattacctacaaaacacatatcttttttagaacctataaagaaatgctcgaagaaaacaccagaaaacaaattatccaactcattcagcaagaagtagtccctgccgttggatgcacagaacctatggctgtggcactctgcacggcaaaggcaacagaattattagggtgccaacccgagaagattacggctctactgagtccaaacatcttgaaaaatgccatgggagtaggcattcctggcacaggcatgataggacttcccatcgcaattgctttgggtgccattgttggtaagtcggagtaccaattggaagtgattaaagacctaactcctgaaacgctggatgaggggaaaagatatgtcaaagagaatagaatctccatacaactgaaacatgacattaccgagaagctttacattgaagttatctgcgagactggtgagaaccatgccacagccgtcattgcaggaagtcacacccaattcatttacttagagcaaaacaaccgtcccttacttcaacaagcgcattcctcaagttctgaagcacaaggagatgatatacaactggactttagaatggtctacgagtttgcaaccactacccccttacaagaaatcgcctttcttctaaaaaccaaagaatacaatatggaagcagcggaacaatccttaaaggggaactatggtcactgcttgggcaagactatggaacgaccgctaagccgtggtatctttggcaatagcatttactcacacatcatatccaagactgcctcggcatgtgacgcacgaatgggtggtgcgatgataccagtaatgagcaatagtggctctggcaaccaaggaatctgtgccacaaatcccgtagtggtgtacgcaagtgaaaacgaaaatacagaagaagaactgatacgtgcactcacgttaagtcatcttaccgttatctatatcaagcaaagcctcggcaagttgtcagccctttgtggctgcgtggttgcaagcatcgggtcgagttgtggtatcacctatttaatggggggcgactatgcacatatctgttactccattaagaacatgattgccaacctaactggcatcatttgcgacggagcgaaacccagttgctcattaaaaatcagctctggcgtcagcacagcagtactctcggcattgctatccatggagaacaagcacgtcacctcagccgaaggcatcattgacgaggatgtagatcgctccatccgtaacctcaccagcatcggtaaagacgccatgaacatcaccgatgaaatggtattaaaaatcatgacatccaaacagcactgttaaagttgagtctatcaactaagtaaacaacgcaagttcaggcaaatcaagcttaacgcatttattggatttgtcgaaaacttgcgttcatcttttgcttaaatatgcgagccgtgctgcttattatatttgttatttgtcttctcccctatgagtcttgaatcgtttttccacagaggataaggatacaaaggaatgacgaacagccaaaaaacgagtgcctcctttctgaaagaggggcactcgttggtgtaataatagtaatctctttaagaaccttatggtcgcttgtccgtcatgaagaactcaagcgtaccaccagagacaatgtctttgtaatcaatatacaactttttgtacggacgcccgttcaacttgatttgctggacatacacatttttagcactgttattatgcgcaatgatagtgaaggttttgcctttaccaacattcacgactgctttgtcaaacaaaggcgaaccgaacatgtatcgtccacctgcaggctctacttgatagatgcctaaagaagaaaggatgtaccatgcggacatctgtcccacatcctcatttccactcagtccgtcgaaatcattgtggtacatcgtcttcagcacctcacgtactttctctgccgttttatcatgctgccccacatagttgtacatatataatatgtggtgacttggctcattgccatgtgcatactgtccgataagacccgaaatgtctggagaagcattctctcccaaatctccagagatagtgaacagcgaatcaagcttagtgacaaacgagcgtttcccaccaaaaagtttaatcagtccaggcacatcatggggcacaagccatgtatattgccaagcgtttccttcggtataatcgtcattacggtgtgaagaatggaagggattgaatggctcacggaactttccgttgtctacacctcgcataaaacccgttttcttgtcgaaataatatttgtacgatttgctgcgattgaagaagtattgatagtcttttttctctcccaacaacttggcaaccttagcaacacaggcatctgctaaggcatattccagaccttttgccaccgtttcaaaggtagagtcgcgattccaaggaatgtaaccaaactttttgaggttgtctaacgaacgctcatcaagcaacgcagaggtgcgcatcgcctgataagcggcttttttgtctacatcaaagcctttgagaacgatatcggcaagcacaggaatgccgggattacccaccatgcagtcggtttcattgcctacaagatgccatacaggaagttttccttgctgctggaagatatgtaataaagtctgtgcaatgtcacgttgcttttctggatgaataatcgtcatcaaaggatgagcagcccgataagtgtcccaaagtgaaagggtcgtataattcacaaaatcaccctgataaatcttcccatcacttccacgatattgtccattcacatctgagaagacagaaggggctatcatggtgtgatataagccggtgtagaatatcgtcttgtcgtctaaattcggcgtttcaaccttaattttccccaattcatcgttccatgcggcatcagcatcctgtgccactctgtcaaaattccagtccttaatttcagctctcaggttggcttttgcattatccacgctcaccgcagagatacccaccctcaccaacaaaggttttgtggcgtcatcaaaggaaaagacacccacgctatcagcttgcatctcttgcaatttcacggcacgtgagaactctgccacgaagtacactcgctgatcttttgcccagccttctgataagcgatagccacttacagtggttggattatcctgtgtgagttggcactttgtcatcttatcccaaccgataccctgtttcaagttcagttttaacaagggctgtttgctactcaatggataggtgtaccgatgcattcctgctcgctgtgtagccgttaactctaccaagattttgctgtctgccagtcgaacggtataataacccgggcgcacatattcggcatcgtgcgagaatcgctcggtataagtcttggcatcgaacgttggtagaaaggctatatcgcccaaatcgccaatgccagtaccactaaggtgcatgtgtccaaaaccgatgatgagcgaatcgctataatgatagccagaacaccaatcccacccacgtgtgatctgtgtcggtcccaactgcactgcaccaaacggcacgttggcgccaaggaacacatgtccatgcccgccagtaccaatgtatggattgacaaactgggtgaaagagtcttgcgctgccgagacagacatactgaagccagccaacacaagagccagcagttgagtcttaagataaaattttccgaatttcataggttgtaatcatgagtttttagtttgcaaacatcccctttcatgagatgctcacttttgaaagtgctaagatacgaaatttattccgattaccaacctatcctccctctcatttttgcgcataacaacaacgcacttcacccaagactgataaacgaaaggggcaaagatttgtcagtctcaatattttttacgaatattgcaccgtcaaatcaaagaaatatgagcattattagatttatcaagaactggacgttacctatctccatggcaattggtatgacggcttacagtgtgtttgccttcattcctcctttaggcggagcagtcactttttttgctcctatcatggacgctatcctccctctcttcatgttcctcattctatttgttaccttctgcaaggtagattttagacgcctcataccggtgaaatggcacttctgggtgggtgttttccaagtagtctttgttttgctcatcatggttgttatcttgggatgcaaactaacaggcaacgctcttatcctcatggaagccttgctcacctgtattattggtccctgtgcggcggctgcggcagtggtgacacagaagttagggggaaatttagaagagatgacgacttatacctttctttctaacttcatcacagcattactcatacccatttgcttcccactgatagagcattccgaacatattacctttcttagtgccttcctaaaaatattaaacgaggtgtgtatcgtgttggtggttccgatgttcatggcttacatcgtaaagcaccattttcatcgatttcatcggtgggtcatcggtataaaagacctgtcttactacctttggggatgctcgctaatgattgttacaggcacaacactgaaaaacattgtacacgccgagaccaccacttctttccttgtccttattggcttgcttgggcttgtactatgtgtcacacagtttgcagcaggtagaatgattggacaccgctttgatgcgacggtcaatgcaggtcaagcccttggacaaaagaacaccgcatttgccatttggattgcctacacctatctcaaccccattgcatcggttggtccgggctgttatatcctttggcaaaacatcatcaatagtgttgaaatttggctttatagacgaaaagggttggaactctctgcgtaatactgaaagctaaaaccaccgatgctccacgcttttatcgctaacaaacccttctctctgagttactcagaaaagcaccgtgacaccttatcttaaacaacgaaaaacacaaaagaaactaaaaaaacattgccacaaaaccatttcacggaagaatcgtggttcaaagacaatgtaaggatgtcaagtcgtctgttcttcatctatccataagtccttgtaggcgtcgtttctttgtagaatgacgcgtgcaaacgaacaaacgggaagaatcttataatgatgttcccgtgcataggcaatcgctgccgacatcaacattttcccgatgcctcgcccttcttgataagcataggtgtgcgtaatcgttaggatgttttcatgtatttcaaattcaagcagtcccacttcatgtccatcttctatggcttgaattttacaggatggtgtgtgaatgtgagtttctatcatcagcagttgattctgaatagaggtttaattgacgcttagtactccatgaggacccgtggtcgttgctcggtatcgagttaatttataccctggttctccctgaacaatatttccaccagtattaagattataagttcggtgacatgccttacaagaagcaatgcccgtagacgaacaacttaaaggataatctttccgtggtatctgacgccaatcaaagcagtttgggcattggtagtcgtatgcatagaaaatagcgggctggtcgagattgccaaagcccacaatcacgccgttgttataacctatgataaagtgcatacgttgctcctttgcatggaagatggacaagctctggttgccctgattgttcttaaaaaagaaatgtggcgcaccagctttcatcgtttgttgaattaaacagtacacgcctggtgatgcaggattcatggcacttgcaagtgtcgcatcttgatgttcttgattattcaccaacaggtgacatcttacagaactgaattcctctttactgtcgccacaagaaacccataaaagcacgatacaaaaaaagataacgactttattcatagtgaatcatttgtaacacgtctgccactttctcaatcccttcttgcaagggtttctttatcatccccttcatgaacatattgacttctgcctgaattgttaatttcatcttacttgattgagctgtcacaggcactatttgtatccacaacgtgagtggaatgggactttgctgtgtttggaacttaatacatttaggtgcatcacgctcaataatattcaattgcacggcacccaagggggaattgatggacaccgagtcggcatcgaaattcaaatccttgagtttatcttcaggtatcttatccctaactttctccaagttgctaagatcgctcaacatttggtacactgccagttgaggataaggaatctctcgaatagaactttcaaattttgcagacatgcttatatggtttttgataaataaataaaaaaagttggtaagttgttgacaagccttcggtggctactttctccaattggcagggtcttcacgccactggtgtaacaagtctaagtcacgctcttgaatatagccaatggacaaggcttcttcaaccatgttttcataatccgtcaaagtaactaattgaaggttcgcctcttcaaaagcttttgctgcaacggggaaaccgtatgtaaacgatgccaccatgcccacaacatcagcacctgctttgcgcaaagcctctactgctttcagcgaactaccacctgtagacaccaagtcttctatcaccacgacctttgcattgggctttagttcaccttctatcaagttttcaagtccgtggtctttgggtttgctacgaacgtaaaccagcggtaaattcaacgtatctgcaatgagggcagcttgcggaatgcctgccgttgccacaccagcgatgacatccacctcggggaaatgctccaaaatggcatgaaccatacctatttttacaaacgtacgtaccgcaggaaacgaaagtgtcttgcggttatcgcaataaaacggagacttccaacccgatgcccaagtaaacggttcgttaggctgaagctttatggctttgatttgtaacaattttgaagcaaattctcttttgagcgttgtcttttccataattcattgatatttttattttgcaaagttaaatgaaatacacaagataacaaaaagtaacgcacgaaaatgcgtggctcgttcactcaaaaacaatatcttttactgttgtaaacagcgtagaagaaatcaacaacgaaataaacagaaaacacgaaaatgtaagtgcaatataaaaaaggacaaagaacgtggacattcagacgaaaggaaagaaatacgttgtagtctctctccaaactatcgtcaaaagagaatgactgtaactatgttttttgtttttttaggtagaacgggacgttctttcgtgaaatgtctttggcggtaatgtttttaggttcttttgtgtttttcgttgttaagaatgaaatgtcatgatgttttactgttagtaggcgaaattgatgatgcgctgtattagaggatcataaatgctgaattttctttacaaacagcctctcataactcgcgtgaaaacaaccaacggcaaagttggtcgcaaatacgcgaattttgagcgatgtttgtaatttgttaatatttatagaattacgcttataccgcctcttttcttacctgtttttaccactttttggcgattaaagcattgagataagctcactatttgcatgctttaatgctgctactgcatgtgaataacacctctaatacatgttttcaagaccgtaaagtcaatgttctaacccaaaaagacgtttattttgctcaaatcatcccatttttgttggtcgtttgcctattgattttttctattttgaagattttgaatggtcgttttttggtaaaataagaggacaaaaacaacgaaatagatttatcaaaaaagataaaatttatccgaaaaagaaacagagaattttgctggataggtaatatatggctcattcattaaagggcggttttttggacaacaaatgaaaccaataaaacaaatcaactaaacaagactatgaatgcaagcgttctgcgaatgaaacaaatctgccgacaaaaacatgttatgtgcctttgctaaattcgttccattcggtgaacgccagcgttcattaattcctacaatttgattcgttccattggttttattcgttgttaaaacaaaaaaacatgattgttattgacaactacgactttataaatgaaagagccgtgattggtaatgcttatttctttgtacaccctaaagccaacacacttatcttgacccttccgtccctttgcaatgtttcggcacaagaacaaacggtagcacctgtagttacgatgtcatcgatgagcaggacatgcttccccacgatgagggtgctatcgatgagttcaaaagcattttctacattctctactcgttccaaacgattcttatgagtctgactgccatagaactgaatgcgacgcaccacattctttaagattgggatacccgtcacttcactcacccctcgtgctatctcctcgctctgattgtacccgcgctttcttcttctggagcgagttaagggaattggaacgatgaaatcgatgttttcgaagaatcctgccgcttcaaattccacagcggtcatacgtcctaacgcttcacctatctcgggatgatagtcatatttcagtgcgtaaatcacatgactcacctccgactgtgcataataataaaacaaggcagcagcacgctcaatggggatgcgtccccaaaacaatttcgccatttcgttctcgtaggggctgagttcaaaatgtgtgcgtggcaaatgccgattgcaagagacacacatcacttgttccgagacagctaaccttcttccacagacataacacgagcgcggagctaagatatctaacagtcgactaaaaaagctaatcatccgtcggtatctccatgtcatcaatgcacttgcgtatcacagacagttcgaaccccctacccaaagcgtacttcatgagtttcatggcgcactcataatcgttgcgtcctgtaatggttttccactttttcgagagcaacggcttcaacacctcgatataccgctcatcggaaatctcatccaaaactttgctaaaaatatcctttgagactcccttttgatacaaaccttgctctatcttccgccttccccacttgtcgtaagttagtttgtcgtgtgcgtaagcatgtgcaaaacgttcgtcgtcaatgtatttacccgagaccaaacgttcaagtattctttcttgcgcatcttctaccatgcaccacctcatcattttttgtcgcacctccccacttgaatgctctgctttggcacaccaattggacaatttctgccaagcctcctgttctgtcacctgctttttttctttcaacatatctattccttgtaatccatttgctatctgtctggcactgttgcacaaaccattctttctttcccgaaggcgtcttttcgaatcataacaccgatgaatcctttgtttttaagcatttccaccacagcttttcgatagagaggattgatctcaaaatacaatttcccatgtggtttcaaagccgtcttggcataatgcgcaatggcgtcatagaaaagcagaggatgattttctggcacaaagagtgcttctttcggttcatacgaaagcacattcggttccatatcttccgcctccgtaggacatatataaggaggattggagactattatatcccatttcatcgaatcttttggtgcattcagtgcgtcttggcacacgattgaaaccgcagctcctaagtctcttgcattctgatttgccacctgaatagcagtcgtggaaacgtcccaggcagtaacctgtgcatgctgaatctccaaactcagtgtaatggcaatgcaccccgagcctgttcctatgtctaagatggtaggattttttagtttcgactcttgtatggtatcaataatccacctgcacaattccgccgtttcatcgcgaggaatcaacactccgggagctacatggaaggtgcgaccaacaaattctttcaccccaagaatatattgcacaggctcgaagcgttgcagacgcaagatgatttcttgcagcgattggcgttcgtctgttgataattcactaactttgccacaaataatatcggtcagcgacatgccataacgcacctcaagtactgttcttatcaaagcctttgcctcggtttcatcgtaaaagggcgtgagttgcgaccacaactgctgataacttttcatgacaacaaaaataataaaaatatgaatatcaaccaagatgccattgacaaaatgtacatgcgccgctgccttcagttggcgaaacacggacgagcattggcaaagcccaaccctatggtgggggctgtgctcgtatgtggcaacagaatcattggcgagggctatcatatcaaatatggtgaagcccatgccgaggtcaatgcttttgctgctgttcggcaacaagacgagcacctattgcccgaaagtacgttatatgtgagcttggagccttgctgtcattatggaaagacgcctccctgcgctgacctcatcgtagagaaacgggtaaagagagtagtttgcggatgtatagacgtatttgcaaaagtgcaaggcagaggtatcgacaaactaagaaaggcgggaattgaggtgaccgtcggtgtgttagaagaagagtgcaagctgctaaatcgtcaattcaatgtgttcaataccctgcaccgaccctatattttattgaaatgggcacaaactgccaacggttttatcgatgacaatgggcatgccattgcactgtcatcgccattcacaaagaagctcgtacacaagttacgcagcgaatacgatgccattttggtggggcgtgtaaccgatgaacgcgaacatccacagctcaatgtacgtgaatggagcggtccatcacccttgcgcctcgtcttacatcacggcatctccttacccgagttgttagacgatttatatcaacgcaacctacaatcattgatggtagaaggtggttccaccacattgcagagcttcatcaacgcaaatctatgggacgaaattcgcatagagacagcacctgtcaccgtaacacaaggcaccccagctcctcgtgtaccacaagaatcaacgcttattcatcagtgcgtctatggtggaaatatcatagatactttctatcgaacgactgaaaacgaatgaacttgatgataaaaaggctgagcgaaaaccgcccagcctttttatcatagatgtttgaaacgaaccaattatcgcttcatcgctttaattgatttgtacaatcgattgtttttcatcacttggatgaaatacacaccctttgcaccattgatgcggatattagcaacttgtcctgcgccagcatcgaagacattttgttgcaacaacatgcctcctgcattgaggatgtttaccttataagttccaccttgtgcaaatcggagattaacactttcagcaaacggatttggataaacagccagttccacctccgtgttgacattgtcgatgcctgccgacacagcaatctcaacagtcttggcagaggttgcagatgcttcgccccagcggttcatgagtttgattacagcgctgtaactacctgcattcgcataagtaactgttgctgtcttaccttcctcgcctaccacggtagcttgatcgagcgtccacgctggagtggtttttacatccaagctacctacgataccaggatagcccaaagcatcgttcatggctgattgcttcttataagaagcattgctggtgttctcgccaccgctaccatccattacaaccacttgtccgtccttgcctgtagccttgccccagttggggaatacactgtcttctgttctttcttcaaaggtataatagccttgtaaatggtcaggtacagcatccttttgatagccattcattgcttgagcgatttcatcttctgtcaaaaccttgtcccaaacctgtacatcgtcaatccagccgttgaagcctgacttatacacaccaccgccaccgataaagatattggctgttaccgaggtgttgatacggctgtcgttacgtgtttcacgacgcagacatggagagaaatctgtctctgcaactttctttccgttgaaatacatcacctgatgtccgctctcattctgcgtcacggcaatgtgattccagatacgcggtgtgatgctgtagcctgtagacatcatctgctcattaggattatcgtgagcctcccaacccatgacgttgaatgacacctcattggctggatgcttagtgttgcctttccattcaggacggatttgtacccaaaggtcaccccagttattgtgtggccacttgtcggcaactgtgttcttgttaatcaagtttgtaccctgcttgtcgtgagcaaacttgtctaccttgaaccacaaggcataagtataggtcttgccttgttgtatctcaccaggaatcataaacatctgcggatctcttatctcaatagcgcgcgaaactttaccttctccgtctttcgaggtatatgtccacttcacttgttcgtcggtctttgcattctccttatcggcagtaaccgctgtaacctgtggaacagcacctgtctcttcgggagttatttgcacaaagccacgagttacattttcttgtcccttgccgtctttcacatgcaaatcgtaaagtccaatggtaggaactgttgtttgaatcatcgttgcgttggtgacggacgccatggtcttccctgttctcgggtccacaatcttgatttctgccaatggatcagccagctcgtccaaaagcttgatagtaaactgttcattcggtttaacaacaggcttgtcaataaccatggtagtgagagggttattataaggaacatccaaccattcgctccatgagatatccgatttcatctttccatcaggtgctactgcacgaacacccaatcgagccttgcgattcttttcacgactcatcaaaggtgcatcgattacataacctgcccatgaggtggttgccgttagcaccatttgcgactgtccctcttcttggaagagaatttcataataccaagtatctacatcatcattatagtatttggtatcacccgtttcttccttgctggcataacgcactttgaaatctaatgcattatagcgaccacgtaacaattgtgtctccttgatttcaggcttcagtgtattgaacgtttgtgcaggattgcgcacagccatttcacccacgtacatattgtagtcatctggagtattttcaacggcgatacccaacatggcaatctctgattcggcaggaatctgaagttcttccatgcttgcagtgaatgtgttccattcgccagccttagtggctgctggtatgtctatttccttgtactcattggtcttacccttgagtgccacaaacagtttagcatgtgtattcttcttgtcctcacctgtcaacttataagtaatagaaaattcgtaagtgggttgtacctttaggagcgtcttgaacaacttcacgcgcgagaagttagtattgccatgaagagacagacacgaaccaccgaaataagcctcatcaaaggttaagtcggcttttatcaatcctaaaaggttgcctgtcgtagcctggtcgttacggtcggtaatccaccaacgccaagttggcatcaagtcttgcgtgttgagattataccatttgtgattgaatgtaacctcaccctcattgcggaacttcaagccgttgccgagattaaagcgcgaaacaaacggaattgtctgaatggtagatttagcagataccaattctgcgattccatggaagttcttgagacttgcattagacaggttacaaccgttattgatacttggacgaaccacaggattgcggttaccaccactaaatattaactcttgcttttgcaggtatgcattttgaatagccacgtcagaggtaccattatcggtggcactctgatgaataaggctttgtgcatgtgcgccccagaagcccacagagattttcttactcttcaaaacttcccagcttcgtccatagcctggtgtggtaagtccacgcccttgaatatcgaacccagcatacgtgtcataactgctacgacccatttggttggctttgtattccgtgttggtaagatcttgggagtcccagttataattaaagaagagcatgtctgtggtaacattctgactatcgccaaacatacgttggttgtgtgttcccaacccattatcaaacgtaatctgtccattgtcgttagtaccgtcgtaccaatatacttgaaagtcccagcctaattcttttcctttttgatgacacgctctaaagaaatcctgtatttgaatcatggactcttgatctgaatggaactctgagttgacgccaatgccattgatgccatagtatttgagcagcttcaccaatctctccgcattcttaaatgtaccgtcattatttttctcagtgactttttgcatcagacgcgactctttcccatatccataccatggagtggtataaacagattgcgaccaacctatagaccataggcatcctaccttgacaccattcttagcagccacatccgaaatgcctgccgtagaccgaaaccatggcgatgtccagttgccatgaatgtccacatacgaccacagactaaagttatcgccctcgaaacaatatcttggcaacgacttccaagttactgtagggtcgtccaacggaacccataaacacatttttcgattggagtctacaccgtctactgccaaataatcaccgtccttgattcgctccttcggcttgacacgagagatgaaaaactcatcgtccatgcgagaaacaccgtctggctgttgtcctgcattccaccgatccaagtagttaatcaggttttcaaactttgcatctttaatatccaaaggatgttcaggcgtccgttgggcataaagggctgtgcatgccacagatattgcagcagctaataaaattttcttcattttggttttgatatttagattaacaaaaaaccgttaggtaattggaactctcaatattgttgcgctcatcgcattgatgttctaccaactacctaacggttatatttcatgtgattaaagttttatgtgaattatttaatcactaacttttccgttctaataacatttttattttgcatctttacaaggtaaacaccatcttgaagctcgtttcggctaagtgatgttgggtttgtaagatattgtaccatctttccgtcaacggtgtaaatccaagccttctccacattggtaaagagaatgtcattgccatttactgtcacattagaaacaccaccagcaaacacggtattgtctacgccatcagttcctgataaaccctcgggctggtcagcaataccttggtcatgttgtgtatccacatattgacgctgtccgttcttctcaccttgtatctccacatcaaagtcgatagtaaatcctttggctgtcaagccagttggcaagaaggttccgccaaaccaagcatctgcaaacacaatacgcaaacgacttgtacctacgtgagcatcttgaggtactgtaaacttaaatgtatagccgttcggatcttgtatctcaggagttgccgcacgtatctttccagcaaagaaaatctgctcacccatagggtcgtcttttggagccttaggaaagttaaatgtaccactgccgtctaagtctaaccaaccacctgcaaagcaccacttcaaaccatctttttcattgggagccttaaaggtcatcgtaatctcttgtccttgcttgacaaccaacttgtggttgcgagcatttgcatactgtgagctatcgcgtggtgattccgtagctgtataattcaaatcttttacagcaccagtagttgtaacgcttgtcaaaaatctttgttctacagctgtcttgaatccatctgcatttggattaatcttactaattccataagtatctattccaccaaccgtttcttctggcaattgagaagcatcggcacgcgtaatctctacccattcgataggagaataagtcttcaagtctgttgatacagagcgaacaccgataaatggtttttcattagcatcggcaaatacgatgtttggaacgtaggttccccactgggtagtacgacctacctctgaaatacgaccgtctttaccattcttatacataatctcgaagtggtcgatgttagcctcgcagttgtaaatcataccatagtctgcacgtacacctgtagaatggtctacatcccaatacagttttgcagaaaggctcttctgtgattcttctttcacctctaccatgagattctttacattagcaggtgtaaccttcacgtcgtcgttgagttcgagcttacctaccaacacattatacttgtctgttacgttcttggcacgcaaaccaatgtgagtaatgcggtcgcccacgctaacaggcaggctcacctttttctcttgccatgtcttgtcgtcagtagcaccaacagctacctctttccattgattgtttacctttacaatcaagtacaagttagattcgccagcttgttttgtcttcaaagcaacttttgcgataggattagccgcactcacgttaaggtcggttctaaacagaactacatcaacacccgatgctgaagacagtcctctcaactgcaagcatgaaccaccgttatacgagtcgatgtgtgtaaattctggctgcaaagcatttgaaacagtttctgttccttcgccataaaccaaccagcgataagtaggcactacatcttggttcgccatgttgtaccatgtaccagccgttttcttacctttatagttgtaacgctctccattacccaagttaaagtgtgtcaagaaaggaagatttccctgtatcgctgaacgctctggaatgaacgaagccaaaccacagaatgtcttcaatgcgttctcaccttcccattcatgtcctgtatttttaatagcaggacgattcaatggacttctgttaccgccagagaagccacgctccaacaagcgttggtagttgtactgtgcattcagagcatccgaaccagagttgtaactccagaaacggctgtcgccatgctctccccaaaggcagatacctattcgcttcacagtttcgttaggttcataagtataggtacccgtgtaccaatcgtagtttgcttttcctaccaaacctatccagtttcgattcatatcaacaatccaacctcctccgtaaaggccctctgcagttcccaaggcttcctctgcaacctttacagagttttcataaccacctgcagcgaaatcacctccagcgtagttgaggaacaaatcgaaggtcttaccagtggcttttgtaccatataaatagtcaactgccgcattcgacaggctggagccttgcgtataaagtgctgcatggaagttgttaaagcctattttctctgcttccttgtacaaagccttgtggaaagctgttacatcaggctcagagtatgagttgtcctcccagttgtagttgataccgtcgaaaccgaagaacagtaggcagttgagcatgggcttaacatacttatagctgccatccgaatttttggttgataagaagcgtacatattctgtatcatgcgatccagctgtccatccttcaaaaaacttgataccactcataatgtcggtaccattcttgtgtgccgcatcggtccatgctcccggagcttggaacaaaccatggttccaagaaccaaacaggttggtgtagttccacatagagaatacatcattggcaaagttggacgatggatagccaccgatgcccttacccgaaccgctcggaatattcataaataggttacgcttctcgtaggtgtctttcaccaaacggtctgaacgatccaagatggcacgctgcttaacgtgcgaacgcacaaaagcaatgtcagaagcttgaatacctgcagcctcaaattcagccttggtaggatagttgcgaccattctgcaaagccttatcgaaaaggttcagcagagtaacctcattaaatccagcgaaatcataaatcgtggatgttgccgttggcgacatgccggactgcgcatttgcaggtccagccaaacaagccaaaagcatcaggggtaaaaatcttttcttcatagatttggttgttttattgattaagttataaatattaaattattgatgaggggaaccgtctgatcattttcagcgaacagacggtagttccctatcactgtattgttcatttattaaaagtttcctttgcctttcacatcccaccatacacgcgtagcttgttggtcgggaccgcccaaggctttcaatccagtagcctgaatgtctttcaacgaagcatcatcgctattggggaagagaatgcgtcgaaccaaatcgccaggtttcaaactgccgtctccttcttcaacgttaagaacggggaacatcttggggtaaccagtgcgtcgcatttcgccccatgcttccatgctgttagggaagagtgcaatgtatttctgcgtaatgattttctctaacttcgtttccttgtcatcggcttcattccatttgacgccaatcttcgtcacgccttccatatctggtgatgaacctgttgggtctttatacgtataagcaacaggctcctccactcttccatattgcgaaagtactggtttaaaggaattataaaggtcagagcctggttcaaagatggaagaattttcaatagctctggtatagaacagctcggctttgccacccatgtcccatcctcgtaaggcaccttctgcacgcaggaagtcgatttctgcccacttaaagaggtacaaaggtgctttctcaatcagcatcttgttgattcggctgaacccaataaactggttagaaccgtaggactgtcccttgcccgtgtgtatgccagagcggatacctacttggtctgtttcggctggcagggtgactccttggtcattgctcaggtttccactattccgcatacaaagggagaaacggtaggggtgtgtcaaactcttcagcagactgatgaacgaagcactaaaacgcatatcactccagctttcagaaatttctactaaaggatgtacgcctccatactgcgaggggaaaagtgccacttcatatttcaaatcatcaatcactccactcttcacagcctcctctgcccacttttgtgccaactgaggctctgccttgaccatgtgcatcgccatgcgcaacttcagcgaattggcaaagcgaacccatgtttccatgtttttaacaccatttgttttgtcttgcgttacctcgctaaacttgttgacaatatcctttaccttggcttgataccacgcaggtttgctgtcaaaatagcgtagacaattaacaatggtatcaatattggcttcggcacctgtgtagatagtcttcatgtcatcgtacttgaaaggtgggtctaccttgttcgccttgaagtcattgtaaggaatggttccatacatgtctacattctcaatcgctgcatagttgtacaacaacaaggctatcgccttcacttcaggaatggaatcggacgatttatgattcagcagcggtgtcaaactggtacgtgctcccataaactgaccgttaggtccagaaatccagtcctgactggcatgataggaagatatcaactcactggcaaaagcgaagtcagaatgtggaacaacaccatattgtgcgtacacatcgggcaacgtataataacgctggtaagcatgggaaacgggatattgtccttcctttccacctcgcatacagtactgagctgccttcaacataccaaaatatttatccaagctcttggctgctgcgtctacttgctcttctgtgtacaacgctttatagttgatgagatttacagagtctgcctcacccacaatgtctccctcatcaatagtgatgtcatttggtcgaaaatcatcggtgggctcatcaaaatccaagcacgactgcagggtcatgaaccctgtagtaagtgctgctattgcaatatattgtattcttttcattgtttgaacgattgtttagaatgttagtttcattgataatccatacgaacgcgaagaaggcatgttgaacatctcgaacgctcctaatccgttaccagttgacaaagatacatcaggatcaacgggtgaattcttgtacaagaagaataagttgcgtgcaatgaacgacacattgaggctggcattgctcttaaagagattttggaacgtatagcccatagacaactcgcgtaagcggaagttagtggtatcatagatatactccaatggactcttcttcacaccaccgatacttgtgtaataactctcaatgggaactagtcgaccactaccatcgggcaggggcattgccagttgtccattggctgtcaagttgttttgctcggcatacaagcgtgcatctgcggtacgctgtgacaatcctaagttgtcaaggtacgactcggtgagcgaaatcaccttaccgccaattcgaccattgatgaggaagaacaactggaagttcttatagctaagggtgttgctccaacccatttgccacttagagttcatgttgccagcatataccgtgtattttttagaagcctcagactcaaagctcagtcttccgtctttcgtcgtaacgagtgttccgtcggcattgcgtttgtaatcggttacatacatgtcaccaatcgatccacctttcttatatcttactcgcacctcagccacatcttggaacaccaatttctcggtgccatcggggttgtaggtggtctccatgatttcgttatcgttgtacgacaggttgtaagaagtcttccaacgccagtcttttccaaagcggaagttataaccaagggtcgtctccacacccatgtttctaatttttccagagttcatcggttcaatttttccagaagcattggctccctccatatattgatcggtagagagggcatggtagaacgtgaagtcgaagtcgagacgactgccgaaccatgacgactcaatacctgtctcgaatgaacgagttttctcgggtttaggatttttgaatgacgagtatggtgacggagagacagcacctgtgaacgtgtcacgcgatgatctcgccagtaccttgttaggaatagagttacctacctctgaataagaagcacgatatttcaagtaagaaatcacctctggcagcttgaccatagagctaacaatggcattggcaccaaaaccaaagtaaccatagctttcggaagtgccacgattcttgaactgtctgaaggcacgataccagtcctgacgataggaagcatcaaagtacaccatgtctttccaaccgagttgggcggtgaacagggcagccttgtcccagttggtgcttaccgaagcacgtgtttcacctgctgtggcagcatcggtctcaaaatagttcacgagtttagagaatcttattttgttgccatctttcggagttgcagtggtataagtattttggtactttgttctgattaagtgagccacccatcctgctgttgccgatacactccatgtatctgcaaatgtcttgttgtaagacagcaagtagtcggtataaatttccgaagtacggtccaaagtctttgaatagataccataaggctcaatacctccgggggtaaaggtggtagcgtatcgttttccgtcattgtcgtacttggtgtggtcaatgctaagacgtgcttggaaatccaaaccgtcataaatgtcaatcttaccactcaccgttccaaacacacggtcggtgcgctgcttggtactattcatgcgagtaagccagtaagggttgttttggctcttctccaagtatgcccagtcttgcatcggaccattgaatgtcaaatcagtagtggtaagctcgtaaatactaccattttgctgcacgtatgcaggaacgttcttcgccatccacgtaccattttcacgatagtaatggttgcgatagtagtccatatccaagttacgtggcgctgtgtacatgtggtacactgggttcatcaccgtaccgccaccaggacggttgttggtaatggtctggatatagttgatagcagtattgatatgtagtcgtttgaggaagttgtacgactgtcggaaattcaccgtattacggttgtatgagttactaaccagcataccgttggcgtgcgagttagagaaagagaagtaactttgtatcttctctgtacctcctgaaaacgataccgagttgttgatcgtggtacccgtgcgatagaagtcgtccaagtcgttcttggcagcattacgcaaatgaacggtatttagaaaacctgattcgaatggtgcagaagagtcaaaggacgattgcaaagttaactggtctgcagggcggttagccaccttgtctccccagctaccaatatcaagaccaccagctgctttgatgcgtgcaccataaacgttttgtatctctggtgtgagcagcggcgtgtcgaaagtaatgttagaagtaacactgacagatagctttccttcctttcctttctttgtcgtaatcatcaccacaccgttagcggcagccgaaccgtagagagcggcagcattggcacccttcagtacgttcatcgactcaatatcgtcagggttgatcatcgacaaggggtcagcaccttcagaaacacctgcgtactcaatgttcgaaccattgatttgcccacgtgtaccgttgctcattggaactccgtccaatacaatgagtggagagctgtttcccaataccgatttgttaccgcggaggataatcttggacgcaccaccggcaccaccggcacttggcgtgataacgacgcccgacactttaccttccaaagagttcactgcgttgggatcttgtacacgcatcaagtcttctgcctttacctgttgtgtggcataggtcagcgatttctccttacgttgaatacccatggcggtcaccaccacctcgttgagcatgctgctttcttctttcaactttacattaatgttgttggtatttgcgacaatactttgaggcgtataaccgatgtaagaaaattccaacgttggagctgtctccttagtcaccaatgaatacttgccatcgatgtctgtcacaacacctgtctgtgcgttctttatacgaaccgtcaccccaatgagaggttctccatgggaatcaacaacagtaccttgaattgtgcgcgactgcccgattctattttgtggcgttgtttttgctttctcttgtgctttatttcgatgataaatggtaatcatcttattctcaatagagtaatctaaagaagaatcgagcactctgtctaacacttttgccacaggttcgttgttaaatgtagcggtaatctttttctgaccatttacctcacttacattgtaaatgatagacatcttcgtttgccgttcaacttccttgaggacagtcttcagcggcgttttgttgaaaacctttgtgacggtttgagcagagatgcccaatggacacagaaggagtgcaacgagaattgaataatacaagtatttctctctcatggtttcttactgttttttttattcttttagttagagttaatttatttggttattaatttaattaggcaacgatgcaatgaagattagaggctctgaatgacgacatctctacccttttgaaccaccttaatggggatggttttttctaatccttgtagaatgccatccaaattttcaccattgtttaatacaatggcaaacttttcgtttttcaattgagggctttgtatcttgatgttgacattaaatctccgtgacagtattttagccaaatctgccaacgtaatactttcaaattctgtgtttccctgtacccatgcattcgaccttacagatgtttttgttttttgcaacactcctgaagatttatcaaagacgactttttctccgggtatcatcatgaggttatgtttagagttgcttatctcaacacttccttctaacaatgtggtcgtcacatctgggtcatccgcgtaggctgtcacattaaacttggttccatgcacttttacatcataccatttcgtattcacggtgaacatggcatggttgcaatgagcaacctcaaaatagccttcgcctgtgagttgtacttcacgattattggtatcaaaagaagctggataacgtaattgcgaacctgcattcagccagacatgcgagccgtctggcaacaccacttcggcttttccaccgagcggggcaatacaagtataataggcattgctatttttattgagccccattaataaataggtgcacaatgaagcaaccaataccaaaaggacagcagctgcagcaagtttgtatcgcagtgagatgatagttctctttggctttagatttttgcacttctctattccgttccaaaactgatgccactgcttatctgtttctaaagaaggggtatgtttgtcattccacttttgctccaattcgtaaaacgcctgttgctgtgcatcatttccgtcgagaagagcgaataattccctctcttcttcgttggtaagcgtaccttcgaaaaagcgaaaagccaaatttgacaattgattgtttatattttccatatttaattcaaggactctatatatataacacgcaacattggttttaccctaactaaaaaatgaatgaagttaaaattctttcattgaagactgctattttgacaacaaaaagcacgaaaggaacaaaattgttgcgacgagactttatctgaaagaacgtaaacacgctgaagaaataagcaaagaacccctcacaaaggtcaagttgattgagaacttttgagttttcagcccgcagtatggaaggaaaataaatgctgaattttctttacaaagtgcctctcaaaactcgcgtatttacaaccaacagcaacgttggtcgcaaatacaccgaaaatgagcgaggtttataattcgttgttattgaacacattacgcttagtccacagcttttcattccatttttcaccctttcttggcgactaacccattgagataagctcactatttgcatgctttaaggctgctactgtatgtgaataacaccgctaaagagtgtttccaagcgcgtgaagtcaatgttctaacgtaaaaagacgtttatcttgctcaaatcagcgtatttttgcataccgcttgcctattcattttttctattttgaagattttgaatggtcgttttttggtaaaataataggacaaaagcaacgggcaacttcgccaaataatcattaaaaacatgactctattatataaataggttgtctgttgacaaaagcaaccattagcttttgtttcaacaacccattgaaagtagatgaaacacttagtcggtggtttgcgtttcataaaagaggcgtgggatgaagtggaattattaaagcattctcttgtaaattaggacgataatacctatctttgccaaatacatcagcgtattatgaaaacctactcaaaggattcggcccaattatttgaggatattaagtcaggaaaggcagaagcgtatgaatatgtctttaagacttactatcccatgcttaaggcgtacgctacacgatacatccctaccgaggaagacttaaatgacattttgcaagactgtttcaccaaactttggttaaatagagagcaattaaaacctatttctatctcctcgcttctttacaccatggtacgcaatgcgtgcttaaactttattcgacagcaactgataagaaaccaatggtctttagatgacctacctacccaacaagaatcagaatctctttatagtttgttctttcatcataatcctgaagaggagttggtttatcaggaattacttgatgaaattgatcaaatattaaactcattaccgcatcagtcgaaacagattttttatttgagccgccaagaaggactgaagaaccgagagattgccgaaagacttaacatatcgattaagacggtggaatatcacatttccaaagccttaaccatgctcaaagcatttgccaaaaagcaccaagatctctcgttgatgctattcatcgtggcgttacaaggcgctatcatttaagggtaactgttgtagcgacagaagaaataaattccattaggctggttctataaattaccaccgcacatagtcattaaatgtttatgaaatacgttttgttatcttttggcttctttttggttcaaaatataagttcgttcagtcgtgtagctcgctacactccttcactctcttgcattttgacctcaaaaataagctcaaaatctaacaaagctaatttatagaacctgcctctaaagaacaaagaggcgaatgtagaaaaaacgacatgagcaagatgcactctccatgcaacttgctcatgttgatttagctaagatgtgttacatctttcttattttcggtctgccttcaaacggtcagccatggctcttcctaatgcttcgcactggctttttgtttctgctgtgagtgcttgcttcatctcgacgggggttcctacaggttcaaatttcagacgagtttcattccattcggcaatggtaggcacggctttgctcacccaaccatagctgccgaaccagccgatataatggttcttgatgtcatgattggcaatctcggaaagcaattcggacatttcatgatacagtccgttgttgtacgtaggcgctccaactatcaatcctttatagcggaagatgtcacgcaggatgtaagagtggtgcgtctttgagatgttgtacatgcaaatattcttgatgcctgcttgactggcagctctggcaatattttccgccatgcgctctgtgttgccatacatcgttccataacagataacgatgccttcttccgtttcgtatttagacattttatcgtacagagcaattactttctgagcatactcgtgccacacaggtccatgggtagaacaaatatagtctatttgctggtcggctaactttttcagtgcgttttgaacaggtacaccatatttgcccacaatgttgctataataacgtaccatctctaaccaagcccagctggtatctatttcttcgtcgagtataccaccattcaatgcaccgaaacatccaaagccatcgccagagaagagcatgtggtcggtaacgtcgagcgtcatcatagtttcgggccaatgtaccattggggtcataaagaactttagtttgtgatgtccaagattcagttcttccccgtttttcacttcaatgatgccttctttgatgccataaaagcccgacatcatatcaaaagtcttcttgttaccaatgacttgaatgttggggtagaatttcttcaagagtgctaacgaaccgctgtggtcgggttccatgtggttaataactaaataatcaatgggtcggtcgcccaacacctcatgcagattttctataaattgcacaaaaaaatctacttgtacactgtcgataaggcacactttatcgtcgtctatcaaataagagttataagatactcccgatggaagaggccaaagtccttcgaagagggctttattacgatcgttcactcctacataatagactttattttttagttctatcataagtttattaaatatattttgatttgaataaatggcttgttatcgaattatgatgtttggatttcggctttcattttatttccaaaatcggttgaaatatagttgttgatgctcttgcagctttctgctgcaaagcgtaatgcacaatcaaggagtttatcccattgtgtttcggacaacccttgttccaacatactgcgtgtgattccatattttatcagtccaaaaataaaaccagcattgaagttgtcaccagccccaattgtactaacgggtgtagaagcaagtgcatcgtaggctttctcaaaccgattttctgcaaagagtctcacctgcgcactaccttgcgtgcaaataaaatgcttgcaatagaatgaaatctccgcttgataaattttagcagcatcgtccattttgtataacgtttgaaagtcttcatgactccctcgcacgatgtcagcaaactcaaggttctccaacaagttgggagtaatacggaggacgtcccgctgatgtgcgggtctgaagttgacatcatagtagataatcgccccatgactctttgcgtgttccaacaaactaacaacctgaggacgtatcacagggtttacagcatagtaagagccaaagataacaatatcgttcggctggatatcaggaagtgtaaagtcaagctggtcgtgtggatgatccttataaaacaaatattctgcatcattatcttcattcagaaatgccagagagataggcgatttactttcaggaaacacgttcacatggcttgcatccaccccattatcctctaaaaaagtggtaatcattttaccaacacggtcattacctgtttcactaataaaggtagcatggacgcctgaacgccccaaagaaatgagtccgttgaacgttgaaccaccagggaaagctcctatgggctgactatctttgaagatgatgtcgagaactgtttcaccaattcctattactttacgcataaacacatttttttacctttcgtgcaaatatactgcaaatcagtagcacgacaaaataaaatgcctataataatttcattatagacagaatgcgtacctttgtacaaggaatgaaatatcttatctaagagaattatttagtacaattcaacaaaatataaagcaatcatcatgacgaattatcataccagtgtactaaccaatggtttgcgtatcattcaccatccttctccttcgcctgtaatctattgtggttatcagattaaggcaggctctcgaaatgaaaatgctgatgaggaaggactagcacacttctgtgaacacatgacattcaagggtacaaagcggcgaaaggcatggcacatcttgaaccatttggagagagtaggcggcgacctcaatgcttttaccaacaaagaagaaacggttttctacgctgctctcttgaaggaagatgtcgcacgtgccgtagatttactcactgatattgtctttcatagtacttatcctgatgccgaaattcacaaagagaaagaggttatctgcgatgaaatcgagagttataacgactctcccgctgatttaatttacgatgaatttgaaaatacggtattcaatggtcatgccttaggacataatatcttgggaaccacactgcgagtacgtgcatttaccagcgaagacgcacaacgatttacaaatcagttttatcgtccagaaaatgcaatcttttttattgatggggatatagacttccaacgtctcgtacggctgcttgagaaggcaactgcagaccgacctacttcagtaccaattaaaccccagtccttgaatcgctatcaaggttctttacaagttcctccacccatcatcaaagacaagggaactcatcaggcgcatgtcatgattggtagtagggcttatgatatacaccaccccaatcgtattgctttatatctcttaaacaatctgctgggaggtccggggatgaatgctcgactcaatgtttctttacgagagcatcatggtttagtctatacggtagaaagttcaatggcaagttatggagacacaggaatatggggcatttatttcggttgtgacattcatgatgtttctcaatgtatcaagttagtgaaaaaagaacttcgtcgtgtcatcaatgaaccaatgacatcttaccagttgcacgctgcccagaaacaactaaaaggacaaattggcattgcttgtgataatcgagagagctttgctttagattttggaaagtgcttcttgcattacggttgggaaaaggatatcacctctttatacacacaaatcgatgccatatcagcaaaacaaatacaacaagtagcacaagaaatcatggcggacgaccgccttctaacgctcatttatcagtaacttcgttggggagcgaagagtagtccataaaattgagctacatagcacaaaatattaatgacattttgcgctatgtagctcgtactgtatcttatagaatgttatcttttctttatctcatcgcccaataagtaccgccatttactgccattcttacttggtaaagacctgcctcgttcatcgcaacattcatttgttttccttcaggaagtgttacacgtacggttccatcttcattgatgcgaaacagctccgtctgcttgcctgcaaccacttgtgaccaagcatttaaggatttgtcataaataaatttcgtcgtttgaccttctggacttgtaatttcgtagccatcctgaagggtcttcactgcataatattttccatcttgccccattacctgtttcgtctttccaacatttgccataggattgtcgccagtccagaactcaatggtgttcaaaaccaatgcatcggctgcactgcaaatgccataagcaggagaaataattaagaaaataagttcattgagaaacttgctgtctgtggctgttttgttccaactcaacagcttgttgaacaggccgaagcttccgatgcaagatgttgtcagcaaggttgctgccagcagaagggtggaaaccctaagatttttctttttcatcattcaaagtgttttagtgtgtaatcagtattccaaagatacacattaatcataggccagccatggaaatgatgttttttaacctaaaatttaatttatattataggtatgtatgctgactccctgtgccgacggcaggaaattgatgccccaccagcacatctgcagcagcgcgaagttgatgacgagtatccacagcgcggtccttgagcttcctttgccgcccagtcgcaggtggatgtaggccagataggccagccatgtggccgcggcccacgtttccttgggatcccatgcccagtagtgtccccaggcttcttttgcccacagtgcgccgaagagcatgccggttgtcaggaaggcccagccagcgtaggtcagattgtcgcagatgtccatttcactcaggctggccttctgtcgcttgatgaacagcaggtaggccgacatgacgaacgcggcgcccagcagggcgtatgcaaacatgtatacgatgacatgtggggcaaaccatgggctttgcagggcaggcatcagcgtcttgctgtgtatctcaggtttgaggatgttgatgcagatgaagacgagtgagagcagggtggagaggggaagtatccacttgtatctccatcggctgtagacgatgaggccagccagtggaaggaagagcgagtaccacagacgggtttctcccatggttcggagcggtgggcgatcaagggttatccacatccagaggatgtacatgaagaaaacggccaggccaagacccgttagggtgtatgccctgcgggatttgtccttccatgatgcccaggcgccacctgcccatagcagtgccgagaggatggcgaaagccaggaaatagtgccaggtcatgggtgttcctcctttcttctttgtgcggtgatgaaaaccatgacggctcctgccagcagcaggcagatgcctgtgtagacggcgggcagccaggggtcggcaaccagctcgaatgtgctttcgtcgctccagcgtcccattcgtttgtcgtagtccagcaggtagatcttccatccatcgacagcgaatggcttattaacttctatttcggctgtctcgcacttgccggtctttgtgaatatttgcacggtcgaggcgtagcgtagtggctcgcgttgtggcatgaagaggcggaggctgtccgttagggtcagcgtttggctggggaacaggtagcttccgtcgctaatccagtctttcttgcgggttttcccgtcgggcgaggtggcttcaacgagcaccgcactcacagcgccggatgacatccacggcacgtattgcatcgatgcgtccataattttgggagctgcctcgctgatgttctgctctattttgatgccccatcctagtagctttccttgtctcagggatggctcgagcagcaggctctggggggttccttcgggcaatgcgttgccccgtgcgtcagccatcagcagcctgggcgggtattggtcgatggtaaagctgtccaactggatggcaatgggcagctcgtgcattcgcatttggccgtctgtggcccgccattcgggctgtcccttgtagcaaatcatcttcaggcgcctcatgtcggcactgcccagtgttgcggtgaccagcacaagcagcaggccagtgtggcacagcagcgagggaatgttgcgccgtttcatcgacaacagctgatgtatggccgtctcccccaccgtgatggtgacccaaaggtatatccatacaaatggccagtacgacaacatgcgggtaaggccgatggcgtctgtcgccggcatggaggctggaacctgccgggtgagtcccatgataaccgtcatcaatgcggcaaagccaagggcagtggtggccgaataggttgtggtgagatagcggaaaaggtagacgtgtgggcgcagggcgtagattgttgccaggaccagtacggtgcatgccagtgcgatggcgttggccgggaaggcaaaaacgctccagtctatggggcctgctgtcagctggagcagttggccggtgatgacaagtcctgcgccaatggctattccttctttgtatttccagggtttgttccacatactgttgtcgtgtcaggatgtttctgcacaggggtagcataagaaagccactgcatggagcatgcgtgcagtgactctttctgttgtccccatgaagtgggtttgctctacgttgcctacatgggtttcgtcacgaatcggtggttcttgcgggcgtcgtctatccatttgggtactatgttgttgacgaaccgttgtttttgctctctcagcttcttcatgtcaagtcctatgtatgcttgtgccttggccttggtcgacaggtcgggcatgggtacgttgcccgtgaacccgtggcgtgccaacacctttgcaatctgcagacgtgcctcttgtgcggcgatgaggccgtcgctgaagatgcgcatcacctcttgcggggcgtggaagctgcccccgtggctggcaaagccgtagtcccaccgccactggctcttgcggatgagtgccagcacgggtttcatttccttttcggtagcacccttgtcccaggcaaacttggcctcgatgtgtgcggcagccagttctttttccagtcttgtgcgcttctcgctggccatgcgttgcctgtcgtagacgttccgtctcagttctttctcgctctggcggtggcacacctggcaagtgcggtctatgttggccagcgggctggtgatgtggtggtcggtgtatttcacgcctccctcgctcttgtagggcatgtggcagtcggcgcacgagacccctcgctgtgcatggatgccttgcttgaaaatttcgtacccgggatgttgggccttcaagatgggtgtcttgctcagcggatggatatagtcgtaaaagcccatcttgtcgtagtaggcctcggcagcctctaccgtaaggccgctgtcttgtgggaacgacaggtaattggtttgcttgtcgaagtagtattctgtatggcattgtgcgcagaccagcgaccgcatttcctggtgtgttgccttcttgacgtcttcccctctgcggttccatgcctcgtacagggcgggtcgggcaggcttgaggtccatggtgcgagcgtcatggcagtcggagcagcctatgctgttcatcatctggttgcccagctcgctccaggttgccttgtagaagttggcagtgcccatttcccgcatcatccttggcacgtcgggtcctttgcatgtccagcatgtacccagctgcatgtcgccgtcgccgtcgatgcctgggtgtcctgtccgcaggatgttgcgcaggtcctcgatggcatggcggtggccgcgtggtgtgttgtattcttgcgagaaggcgtatccggcccacaggatgaccatttcggggcggtcagccagttcgtcggtggctttcgagccattgaactcacttgtgaatgacgtgtcggccgtcattgcccagctctcgtattcgcgcgggaagtcggccttgaacttttcgttttgggccactatcgagtcggtcatgggcgtacggcggttgttgaagatactcgccacctcggctctccgttccatcaaggacgatgtgatgagtcccagtacgaagacgacggccattgcgccgccaaacagtagccatccttgccagcgttttagttgtttagccatatctgttggattttatgattcttacttttccttgtctaacaagctttgtagccacgagggcactggcgatccgggcagtggcacttgcgtctcggcgtggggcgtgctcgacaggctgttcatgcccccgtgtggcacgtccttgtggcattcccagcaggcaaggccctcgccgcgctttgccatcatgtagtccatgcgccccgtctttacgagttcctggttcagctgtgtgtggcagcgtatgcagttgtccatgatgacccgtgccgacgcgtcttctgccttgatggtttgagcctcgccgttggtcacgaagtagtatacgtgcttcatgccgtcttttcccttgaagtaatacttcatgaaaaggttctggtgcggcacatggcagtcgttgcaagtggcgtcgcgtccatgcgacgagtgtgaccaggtggcgtaatagggtgtcatgatgtggcaattgacgcacgcggctgggtcgtcgcctataatataggtgtgcatccggagcaggtaggcaaacaggccggcaagccccacgatgacccccagagtcatgagcccggcaactttctgtcggtaggttagcgcgtttttccagtttgacaacttacgaaggttcataggcctttcagtgaatactgtggcaaatatagggataatttttggaattggtgtcaagaaacaagaaaatattctcatttataaggataaaaatgcctttccgaaaaaggttaaagatagagaacggcctcgttgcccatgttcatgagcaggtccaggatgctaaggttggggatgaatccatgcttccgggcatagacctgatagtacggccggggtgtgaatgccccgtcgggcagtgggtgtttggggcggatggcgtcgcgcaggtctgccgtttcggccgattgtgcgtgccagtcgtcagtgcttcggtacgaagatgtttgctcaatggcgggctgtatgtcaagcagcccgcacatcttcatcgtgatttcgaggttgaaatcgtacagaaaagtccatttcttggtgaaaaaaggacggatatcgtcttcataaaattcaaaaaaaggactctcaccgtaggcagagactaaagcattccaatgcacatgccgccaattcgcatggtcgctgatgcgtacatcgcgcatcaagcattttggagtgtcgaatttttctacagggatgctcaacgtttgtacaccttgtgttgtcgctatctggcaacggttgcgataagtttgcttgatgaaatggtcgtacttctctatgtaacagcattcatggcgatagagtttctgataccactgaataggaccgaaataggtggatgacaaaagaacagatgccatttggttgtatattatcttaacttatcattacttaactgccattactctgcctgtgagctggcacattgtattcgtgttttttctttcgatgtttccatctccatagcgaatacgccttacctataatatcaccttgtctcaccaatgcgtgttgttgcccattgctgacgagtacgaattggcattcaccacaagtacaactaccatggcagtagtttggtatttgatattgttctccctttactacgatggtatcgccgggtattgctatgatgcgtcccaaagcctcttgtttgaaacggaacaacaccacgtctccctttgaaaaatgagtgtgcgaaagtctgttcaccaacactctgtcccccttctggagtgctggacgcaactcctcattgggtacaataaagatggtaaacagatatgcacgtatagccaacatcactaccgtacacactacgatggacagtatccattgtaaaatgtttcgcaaggtatggttttctatctatttaatattgtcaaccagtcgaaatagtcgattccatcgaatgcctttgaagccttttcggtcagggtcagacgaccaccaaatgaaaataggcttgcccacaatgtggtcttctggcacaaatccccaatagcgactatctgccgaattgtgtcgattgtcacccatcatccagtagtagtccaacttaaaggtataacgatgagccaacttaccgttgatatatatctgattgtttttaacttccaattcattgccctcatacaccctgataggtcgttcgtagatggcaatgttgttcatatctatctgaatactttttcccttagcaggaatccatatcggtccatagttatcacgtgtccaacccgtcacggcattctgtggatataggtcaccaacggtggcatcggtattaatccgaatgctctctacaatatctttgcgagctgccaatgtgtgaactgccttctttgtgagcggcataaagccattgcgctgcaagctggcaaggtcttccatcgaaatgcccaactcttctatgagcgactctggaatctcgtttttcagtttcacgtaataagtgtactgcacattttcgggttctttgttaggtttcccgtccagatatacaatacggttttttatctgtaatgtttgtcctggcaagccaacacagcgtttcacatagttttcacgcctatcggtaggtcgactgtcaatgtcgccaaactctaccggattgctggcaatgtactgtcttcctaaggcataaacctgctgaaaataatcgtgttgctgctgtctgttcaacgtattgagatttatttcgccgccattattttgtgcgtagatttgttgtccaaagccatacaccatattatagtattctgtttgataaggaagctctgtacaaatggtatcgcctgcgggataattgaacaccacaatgtcgttaagcttcactgcgcccagtcctttcactcgccgatagtcccaatgaggaaattccaaatagctcttcgtgttgatgacaggaagtgtgtgctgagtgaggggcattgtgagaggtgtctgtggaatacgcggtccataactcaccttgctcacgaaaagataatctccagtgagcaatgatttctctaaagaggacgatggaatgacgtaattttgaaatacgaagaggttgatgaagtacaccgccaccaaggcaaacaccaaggcatctacccaactcatcacaaatcttacaggaggttcggcatctttccaccactgccaacgtatcttcttggtgatatatacgtcaaagatgaaaggtacaaccaaaagtccccaccaactttctacccagtatagaaataaaagatataaaataagtacgacaacgaacttggtccattgtgccttcatattcagttttgctttctctttatcaatcatgatgtatctaaaaatctatatctacaaacgaagtggatgtttacttaaaatttgaaaaggtcgcttgttgtaagcagtcctgtatgctgagccgtatattcagcagccaaaacagcacctaaggcaaacccctttcggttatgcgcactgtgcgaaatggtaatctggtcggcctcactgtcataagttacggtatggatgccaggcacctctccccttctgacactgtcaatggatatttgatccgcaaccacagagttgttaccactcacgctgccgtcagctgcatgcagcactcccttctgccaaccgtgaattctatccatttcatcgacaatttcttcggccaaggtgatagcagttcccgagggtgcatccaatttatgaacatggtgggtttcttccattctcacttcatattgtggatattggttcatgattttagccaaataacgattgactgccgagaagattgccaccccaatactaaagtttgaagcccaaaacaaggtttgtccctcctcgctacacatgcgcttcacgtcttcgccgtgttctttcatccaacctgtagacccactcaccacctttacatgatgtgcaaaggctcgcaaatagttgccataggctgccgtaggtgtggtaaactctattgccacatcagccgatataaattcctgactatcaaaatcttcttggttattgaggtcgataacgcacactatttcatgccctctatctttggcaatttgttctatcatcttgcccatcttgccatatcctatcagtgctatcttcatatcacatacttttaaatgatgacaaagatagtgtaaaacgattgaaaatcaaaatattgcatttgtttttaaattttattgacgccatttcggctttttcttcacaggaatttatttttttgaaaaattttgcgtaacgtccaaaatacgcgcatatttgtcaccaacccattcctcgggcgtaaatatgcgatttttacaatgtgctaactatcaacacattaagcagaattctactattcttcattccattcaagcattgcttttggtggcttaactcatgaagtttgcactccaaagttaatgtaataacgggcttgattgcacgttttagcagccttatctcaatgcttcaaccaagaaagggcaaaaaaatcgcacttttgcctcctatttttaccttaaaaatttctatttcgcgatttgaaaaatgtcaattattttaacaaaaaggacttatttccactcgtttttagacgattttcgtaaacggttgcaaaccgaaaatagcacaccgaaaaaaataatgatgaattgatgtcacaaaatgcgatttcattcgtttacgatatagatgatagacattcaaacctttggcaagaaagttgtggcgctgcaaagcgtgttgctcaagcaggcaagtgccatgaaaccgggcaatgtagacgcacaagacttggtgcaagagacgttgctcaagctgtggggcatgcgagaaaggttggagacacatcctaaccttgaggcattggctatcaaaacgctcaaaggaatagcaatagaccattatcggcatcgccaattagagtgtgaacagcggctacaacaaccagagcagggtacagagttcacgcacgagtgtgagctcaacgacgaattgcgaatggttcggtgcgtagtacaacagctgccaccgttgcaacaacaaatatttatgctcaaggagatagaaggatatgaggcacatgaaatacaaatcctatgcggatgcagtcctgaagccttacgacaaaacttgtcacgagcacgccgatttgtcagaaaagagctcttgcgaatctccgatgaaatggggaaaaaataggtctattgagagaaaggaaaacaagatgaacgaacagaaaattaaccaactgatagagaaatatcttaacggtgacacgtcgtgtcgggaagaagatgagttgcgcatgtacttcgctactgttaaaggcgatatacctgaggcgtggcaaccccttcgacaactctttgtttgggaactacaccagcgacaacagcacaaagagtcctatccgcatcgcaggaggctacattggtcatggcttgccactgccgtctctgtggcagcagtcttcatattcctctttatgctcacccttcaatttcaatcttcatcggctaattacgtcatcatcaatggcgagaagacaacgaaccaagaaacggtgatacgggaggcggaaaatgcactcggcaacgtatcctccacccagcaagaagattttaatgcactttttcaaataggagaaaccaatcatgagaactaacctactcgctgacaaatggcaaagactgattttgtgcgtgttgcttttcggcgctacactatcaatgtcggcacaacaaaaactacaaatagaacaagtttttgaccgttttgcacgtgccaaaaactgtaagatggtgcttctacgccacacctccttacgtggtttccaacttgatgtctacaaatcgctcacctataaaaatcttgcgcccgtgatagaaccttatttgaaagctgacagaaagcaggcaaaaaagataaaagaggtgatagaagatggacgggtaatcagtggatattacatgatgacgcccttaaaagaaggtgttaaccgttacattctttttggaaaaggcacgaaaaatagcggaaccgtgatttatatcgaaggagccttaacccccgatgaaatcatgaaaatgtgctattctcaacgttgatacatcacaagcaattgacaacataaaaatttatacaatatgaaaaaactattttttgcattcatgctttgcacagccacattatcgtatgcagccgaaggaatcgataccaccagtgtgatgcttggtaagaacaaggttgtgattcacaacgattcacttggaatctctgtcagcatcttcgacagtgagggacatcaatggaaaaagactcgcgaggtgaactttgttgacggacaagaggtagaacaggtgtttgttttctctccttttatccctattcggaagaatactaaacgaacattttacccacatttccccgatttctattatggtgccaatttgctaaatgccaacagcaatgtaataatgcgtgacaccaaatcgagcgaatggggtttctcgccttgccaaataggtttgtcactcaacaagcaaaacacgcttggcttggtttcttccttgctgtttggctttgttcacaaccacttcaacacttcatctgtcatcaacagagttgaggaagaaacacgtatgctaccgctggaagaaaaagatgtgaccaccagcttcttgaaatattattacgtcaagttaccaatcatggtagaatggcaaaagcgtattgggagaagaaaaatctttgctggcggcggtctcggcttggaatatcgttataaggaagtttcaaaataccgtataggcaagcaaaagcacacggtatcacgcgatttgggcatcaatgccttaggcatcaacgcagaggcatacgtgggcttcggcagcgtaaacctttatgcgcactacgctctgacaccgctattcaaaaaaggtatcaacgcaatgccctttggtgtaggtatcggcattaccatgtaaggacatattttctgttgcacatacctcattgtccaacaatatgtggtgagactaaagattcataacaaaagaaaagagcagttgataccataaatagaaaatattttgtagctttgcagtagactttatcctgctaaagatgacagagcaactgctgcactattgttggaaacatcgactgtttcccttgacacaactggccactacggatggtcagttggttgaggtgatagatacaggattgcacaatagcgatgcaggtcctgactttatcaatgcaaagattaagttggcggacactgtttgggtgggaaatgttgagattcataacaaatcgagtgattggtatgcgcatcatcatgatcaagataccaactataataatgttgtcttacatgtatctggggacgtagatacgcctgttcgcacaacaacgggcagggaaattccacaattggagcttcaagtaccacagcaggtggaacaacaatacgaacaactgctcatggctgacgcttatcctccttgctatgaagtggtttctgaaatgcctcgaatcactgttcatgcttggttgtctgccttgcaaacagaacgattggagcaaaaaacattgcaaataaaacaacgtttggctctttgtcaaggtgattgggaagcggttttatttgttactttggcacgcaattttggctttggcgtcaatggcgatgcgtttgagcaatgggcgatgcacattcctttgcacaatgtggctcaccatcgtgatgacctttttcaggtagaagcattctttatggggcaagcaggactgttggaacgctctttgatacccgagaaataccatgcaacgatggatacagagggctattttgagcgattgcaaaacgaatatctgtatttgcaacacaaatttaacttgcagccaatggagggtaagagatggaaattcttacgattacgacctcaaaatttccccaatattcgcattgctcaattggctaccttgtatcactctcaccgattcggcttaagaaatttggtagaaagcgaatcattaaagaccttaaaagacacgatgaaatcgggcgtttcgacctattggcagacccattatgtgtttggagcggtgagtaagaaatcggaaaaaagaatatcagagtcctcccttaatgtattactcatcaacacggtaatccccatcctttttgcttatggaagatatcacgatgaggaggagctatgtgataaagctttgaattacttagaacagcttcagccagagacaaaccacattgtcaggaaatggcaagagagcggaatcaaggtggaaaatgctggagacacacaagctctcgtccagctgcagaggcaatattgtgaacgtaaagaatgcttacgttgtcgctttggctatgaatacttgaaaggcaaacaacacaacaggtaagagaatcaagggctatatgccttctataaatattattttttaaccaaagaatttgaaagaatggaatatatttttgaaacagaaatggaagttcgcgactatgagtgcgacattcagggtatcgttaacaatgctaattatcttcactacacagaacatactcgccacttgttcttgaagtcattgggcgtgagctttgctaaactccacgaagaaggtgtagatgcagtggtggcacgtatgaagttggaatataaagtgccactgaaatgcgacgaccactttatatccagactgtctatgaaaaagaaggggttgagatatgagttctatcatgacctatatcgagcaacagatgaaaagctatgtttctcttgtcaagcagatttagtatgcttaatcaatgggcgattaggacacagcgaagactacgataaagcctttgccaaatacttataaccatgctggacacgcaagaaatcatcaataccattgcgctcacacgcatcaattattttcatctcacagggatgctacagctctatcgccggttgggctctgccacagcagtgatagagcatcggcgtaatattagagacgtcttgcccgatgcctcacccaaattggttcagtcgcttcaacaacttgacgaaccgctgcatcgtgctgagatagaacttcaatgggatttggaaaatggagtgatgccgctctgcatgaacgatgagaattaccctcaacggttgagacaatgtgatgatgcaccattgatgctcttctataaaggaaacatcaatttgaaccaacgccgtgttatttgtgtggtgggaactcgacgcaatacggtttatggagaggatttgatacgtcggttcatgagagaactaagacaactgtgcccacaactattggtggttagcggacttgcttatggcgttgatatcatcgcgcatcgacaagccttgcaaaatggctaccctactgtaggggtacttgcccatggagtggactatctttatcctgctcgacacaaacaaacagccgatgaaatggtgaaaaaaggaggattgctcaccgaatttctgacacagaccaatgccgacaaagtaaattttgtacgacgcaatcggattgttgcaggtatttctgatgcctgtgtggtcgtagaaagtgccgcacatggtggaggactcatcacagcaagcttggctcgaacttacaatcgagaggtctttgcctttccaggaaacgtaggaagtcagtacagtgaaggttgtaacaacttgattcgtgacaatgtagcaggactgattagtaatgccgatgactttgtaaagagtatgaattgggatgatgacgtaaaattgcagcgtgcccaacaagtaggaattgagcgacaactttttcctgacctgtcgacagaagaacgacgagtggtcagtgcgttgaaaaagcacaacgacttacagataaacatgctaagtgtacaagcagacattcccattgctcatctcactgccattctgttttcgttagaaatgaaaggtgtgttgaaagctcttcctggtgggatgtatcatctgttaatgatgtaaatggctatcttttcattccgtatttagctcccttgtgggcttctctccctcaccgaaacttgcattgtgaactcgtcaacttgtaaactcgtcaacttgtcaacttgtaaactcgccaactctaaaatatgcaaataggaaatattgatttaggaaagtaccctttatttttagcacccatggaggatgttacagatataggatttagattgctctgcaaacgctttggagtatccatggtgtacaccgagtttgtgagtgccgaagcattggtgcgttccatcaagtcgaccgtcaacaagctcactatctgtgaagaagaacgccctgtgggtattcagatttatggaagagatgcggcttcaatggttgaagcggcacagattgtagcacaaagtaaacccgatgtcatcgaccttaactttggatgccctgtaaagaaggttgcaggaaaaggagcaggagcaggaatgttgcagaatattcccttgatgttggaaatcacacgtgaagtagtaaaggttgtacacattcccgtaaccgtaaaaactcggttgggatgggacgcaagccatctcattataaccgacctggcagagcaattacaggactgtggcatacaggcactgactattcatggacgtacacgaagtcagatgtacacaggaaaagcagactggacactgataggtgaagtgaaaaagaatccacgcattcacattcctatcatcggaaacggagacatcacctcagcaaaagaagccaagcacgcctttgagacatacggcgtagacggtgttatggtgggacgcgcctcttttggatgcccttggatattcaaagaaatgcgcaactacttagacgggaaaccaagtgatgaaaaccttgatctaaacaagaagttggacatcttgttagagcaattgcacatcaacgtggctcgcattgacgaatatcgtggcattttgcacacgcgcagacacttggctgcaagtccaatattcaagggaatacccgactttagacagacacgaattgccatgttgcgtgccacaacggtaaaagaactggaagatatccttgcgaaatgccgtgaaataattgtaaaataattactaattcaacaagatagaaagagattaaaagatgagaacacaacttaaaactttattactgcttttattactgagcatctgcaacaacatttattcggttacaaacgaaaagccttttaccattccagaaattaaaacatggaaaggaggaagtggttcttttgccataaagccacaaacgtgtattacttatcgaagtaatgagacgggagttcagcaaatagccacacaactgtcaagcgattaccaacagatgtttggtcagaaattaaacgttctgaaggggaaaaataaagtaggaaatatagaattagttgtaaagaaaaacaagaaagcaaaccccgaatcttatacaatggttattggctccagcattaaaataattgcgccaacggtgcaaggactgtattggggtactcgtacattgctccaattgtcagaacaaaacaaaggttcattaccatgcggtactatcaccgatgcaccagactatccgttccgtgggttgatgattgactgtgggcgcaagttctttcctatagatatgcttcgaaaatatgttaaaatcatggcttattataaaatgaatgcgctgcatattcatttgaatgacaatggtttcaaacagtttttcgataacgactggaataaaacgcaagccgcttttaggttggaatgtgatacttacccaggacttaccgctcgtgatggttattacacaaaaaaagaatttatcgatttacagaaactcgctgacagtcttcatgtcgagattattccagaaattgatgtcccagctcattcgttagcgtttacacattacaaacctgagatagccagcaaggagtatggaatggatcatttagacttgtttaatcccgaaacatataccttcttagatggtttgttcaaagaatatttaggaggtgttgaccccgtttttcgtggaaagtgtgtacacattggcaccgatgaatattcgaataaagaccaagcagtggtagagaagttcaggtattttaccgatagatatataaaatatgtggagagttttggcaaacaagccttggtatggggacaacaaacgcacgcaaaaggaaagactcctataaaagtgaaagatgtactcatgtacgcatggtcgaatgattattcgcaaccaaaggaaatgattgaccttggatacgatttagtgagcattccagaccgttacttgtacattgttccaaaggcaggctactattacgactatcttaataccgaaaatctttataaacagtggacaccagccaatatcaatgatgtgatattcccagagcgtcatcccaaaataaaaggaggaatgtttgcggtgtggaacgatattgttggcaatggtattagtccacaagacgtgcattatagagtgatgccagcactgcaaacgttgtctacgaaaatgtggacaggtgcaaaaccttcctttgattacgcctactttacagacaaaaagaaacaacttagcgaagctcctggcgtaaactatgcgggacgataccaaccgggtatcgtgctgactaaagatgtagtgacgccaaacgagcacaacgccatagaacagataggctggaactaccgcatttccttccatattgaagcagccgaggaagctccgggaacggtcttgtttagttcaccaaacgccaaattttacttgtctgaccctatttctgggctgttaggatttagtagagacggttatctgaacacatttggctatcaattctttccacatgaaaaggcgcaagtgacgattgaaggaaatcgtgaacaaacaagtctgtttgtcaatggcaaattagtgagtgaactgaatgttaagaaaatgaactttggaaagcgaggagacctttatttcattcgtacacttgtcttccccctgttacagacgggcagtttcaatagcaagataacccacttaaaagtagaaagcttgcaataaacaacaagttgcagcgctctttttgtaagccttgtaaccattcgcagcatgattcataagagatatttggcaaacattgataaaacaattgaaatgtcattatcgcacagaaaatatcaatgctgaacaaaaaaataaagtcagatataagatagatactaataaaaatcttaaatttgccagcaaaatacaaatgaaatcacaaatttagaaccattatatggaagcaatatctgaaagcgccacgactccaacctcatagaatggtggcgtttacagatatctttcaataatgagagtaaaagatacacacgattacgaaccttaatgacaaacaaagtgaataatacaaaggtcaagagagaaactgtctctacacaggatgaattgctccaacagcaaacaacagacaggagcaatgataagaaaaagagaagaatgccaaaggggattatatgtctgcttatcatcactggactgtttggcggaatagcaagcattatgggagtggctaacatgctcaacaccattatgcacacggctcacgacttgttgctcaatacctgcttttatctcatgggcatctgtgtgttgacaggtgccttagggaagctatttgttgagtttggagttgtagacttaatagaacgagccttgcgaccattgatgaaaccggtgttcagactgccaggagtggcttcacttggagcggtattaacgtttctctccgacaatcctgccattatcactttggcacaagacaagcattttggtagttacttcaagaagtatcagtatatttcgctcaccaatttcggcacagcgtttggcatgggtctcattgtcatcgtctttatgttaggcaacggttatttcgtggaacccctcattggttttataggagcctgcattggatgcgtagtctctacaagactcatgcaacactttgtactcaaagcttatccgcaatatcgttccgaagaagctttggatggagagaagtttcgccagcaacccattcgtcagttacaccgtgaagaaacatcggtgtttctgcgcatactcaattctctgttagacggaggaaaatcgggcgtcgacgttggtgtttccatcatccccggtgtgcttattatttctacgttagtgatgatactcacttttggagccagtgcagaaggcaatttcacaggtaaagcttatgagggaattgccattttaccagccattgctaacaaattagattggttactcaatccactctttgggttttcagacccacaccaaatcgccttccctatcactgcgctcggagcagttggtgctgcattgagcttagtgcccaactttatgtcacaaggttggttggatggcaatgccatagctgtattcacaggtattggaatgtgttggagcggtttcctaagtacacatacagcaatgcttgataccattggctatcgggaacttacctctaaggccattgtttctcatactatcggaggccttgcagctgcgcttgctgcacattggggatatctgctctatgctgcgctcttcatataaggcttttttatttgtatccaagctatccttttatagataacatgagttgatggtgcaatttacatgaatgaattgtacgattacgaagaatcgctgccgttcatgtatggagatatattatgctacatataaaattgtattttgagaagagcatttcattctcacaacgatatattaaacaggcatgtatttgggaagcattgttctaaaaaaatagacgactatttatttagattgcttcccaaatattcataatattgctcaacgatttgcaatatatcttttgttaagtagccaaaagccttttctatcaactcatcaggtatttggtaatacgcttccgctatgctcccacatataaccgcttcggcaacagaatttccactaatacttatagctatccgtagcgcatcttcgaaattctcactttctaagaaacatctaatggaccaaggtacaatctcctggcacgcagcatcattctgtccatgatgaatggtggcatatatctctcgaagactgggaatttcatacccgaaattatgtttcactgctttttctatttcctctcttcgtattctacaggtacgtagccaataaattaaagtggcaacgcactgcgcccccttaatggcttcaggatgagtatgactcacctcggcacatcttttgctttccgatagcacctgatgatagtcattgaacaaccagcccacagcaccaatgcgcttggcagcactattgtcaaatgaactgactgtagaggctttggggtctttcaaccattgtgtaatcatgtcactgtatccgccttgtggatttggataacgatgacaccagtctaataacgcctcttgataagagccattgttcataattgcatctgcaattgcaactgcacaaatcgtattatctgtaaaactacactcattagtaaacaattcgacattatcttttacgtcagtggtgttaaatctgaattgagatcctacaatatctcctatgattgcgcctgtcatgtttttgaaggttactttgtgaaactgaattgccaaacgataacaaaagatagtctaaataaggaacgctctcactcaacaatgacatgatacgctaagcgtgctatcacgtacattggatgattgtaatgctcttgtgttttttcgttagtgattgatacgcaagcgttgtcccctctttgggatacctcttgtttagtacaaatataggataaataaaagaaataagaaacgatatcaccgttaagctaatgaaatttaacataaatttgtcaatcgacgacttgtgtgcatttcgcttcttttcaacttagctgccttttaccttcttcattttctaaaaaacagtactcccaccgagaatcgaactcggatcaaaggtttaggaaacctacgttctatccatttaactatgggagcaatgtgtggaagctttctgagttggaaagcgttgcaaagataagaattttatcagatagtgccaaatattcatattcttttatctatcgcatgtcacggcgcgctcatctacaaaaggggattgatgataaaaaataatctttgttattttgtttcaacaacggatctaaactctaaacgaattgcatttaattgatttgccatcataacaagtacttctccataaaagagttgcgcctatacggcagaattcttccaaatcattgttgagtagctatggaacaacgaataacacgaaaaagacaaaaaaacttagtgaaagataatgtcaagtccgaaccaacaaaagcattttcaaaacgatgtttttgtcctattattttaccaaaaaacggtcatctaaaatcttcaaaatagaaaaatttaataggcaaatgccctgcaaaaatgtgctgatttgagcataataaacgtctttttaagttagaacatcaacttaacacgcttggaaacactctttagaggtgttattcacatacagtagcagcattaaagcatgcaaatagcaggcttatctcaatgcttcaatcgccaaaaagtggtaaaaataggaaagaaaagagctaacattgatgtaacacgcacaataacaacaaattacaaacctcactcattttcggcgtatttgcgaccaactttgccgttggttgatttcacgcgagttatgagaggcactttgtaaagaaaattcagcattgatgagccttccatgaaacattctactaatgctgcaaacgatgcttgatggaagttattctttgtataaatagcatacttaaacgaaaggatatgcgattgtcaatttccgtcataaagacgattggggcgttaagtcaacatgctctacattgacattttcatgcagaaagatttgtgccgaatccttaaagcgtgcggggttctccgttgtaaaatatcgacaagtcccgttttttgtacacttctcctccatttcaggatggcgatacagataatcttgcaagctgcgagccacatattctccttgtgccacaattcgtacacctggcttattgtatttctctatctttgccattaacaaaggatagtgtgtgcatcctaagataatggtatcgatggctccgtccttcgccatgagagcatccatgcgttttttcacaaaatagtctgcacccggactgtttgcctcgttatattctaccagcggaacccagaaagggcatgccactcctgacacttgaatatcgggataaaacttctgtatctcgagtggatagctctcgctctttaccgttccctccgtagccaatagtcctacatgtcgactttgcgtgagtttaccgatgatttcggcggttggacgaataacgcccaacacccttcgctttgcatccaaatgtgggaggtcgttctgctgtatgctcctcaaagctttcgcagaagcagtattacaccctaagataacgagatgacaccccatttcaaacagtttggtcaccgcctgaagggtaaactcgtacactacttcaaaggagcgcgtgccgtatggggcacgtgcattatcgcccaaataaaggaagtcgtattgaggcaacaaactacgaatgctatggaggattgtcaaaccaccatagccagaatcaaatacacctattggtcccggttgccgtgataattgagccatgttcatcttgtccttaactaccacttatcggtggagtacactcatcaccgcatcgttcaagttgtcaccgtaagccaagtttacgtaagggagagcatcgttatccgcattaagcacgaaagcatatccacgctctctacccaattgttgaatgatgtgcagcactttgtccttcacaggttgcatcgcattcttttcagcttgcgctaaaagtcgttgcgactctttcttgaaagctacgttcctctccatcatatcttgtaattcagcttgacgtttctgtaaaattgagggagcaaaatcgcgttgtccatcgaggaattcctcatattttttattgaattcatcttcagaacgctttgtttctgcatcgtacttagcacgcaagtcggctatattcttttgtgccacggcatattctggcaccattttgatgagtgaactcaggttgaaatatccaaacttaggaagcacttgctgcgcttgtgacagcatgggtagcatcaaaaataacagaaataagagttgctttttcattcttctatgtgttttatgtgatgagaaggagtcgtcaaagaaagcataattcgcccagtttccaaagcatctccttccctctgttgttgataaaaaaagaaaaagagttagcaaacactgtcagcgcatagcacgcttgctcatatctgccaactctatttcttatcctttgaaagtgaatacctgtcgttactaccaatcattggtatgaatcaatgactttcaagtggtagctaaaagctcaaggtcactcactttcaccgtcctatttatttcatcttgttcaattcagccttcaccttagcggttacatcttcacttaacgtctcgctaatgtagggaatacctgcggtgacatccatgatataaacatagttgcctgcctttcccactgcctgaattgctttcactaacttcgctgtgataggctgcattttttcttgttgtgccttttgcaatgcctgtgagttatcttgataagccgtacgaatcttttcattcaactgcatcagcgattcctctgtctccttttgtttggtggcattcatggtcgacttcgtcttatcatattcggaagccttacgctgcaactcttcttgcatcgccttcaagtcattctcatattgcttggcagttgcttcaatttcaccacgtgccttcacaaattcgggcatgtcattcatcacttgttgcgtgttgaggtgtccgaacttctgtgcaaacagagccattggtgcaaacaacatcaacattaaaataagctttttcattttctttgttttttattttatgattaattattaattcgaataacctaatttctgcaacacttcgttgctaatgtctattttgggagagccaaagatgatgcccgaattagaagcacggtctactacaagagaataaccgcgcaattcagatatctccttcactgcattgtatatctcgtcttgaatgggagtcatgagactttgtcgcttcttaaaaagttctccttcaggtccaaagtatttacgctttagttcgctggcactcttttctttcttcatgatttcctcttgacgagctttcttttgctcttgcgaaagaaacaccacttcgttttggtaattcttatacatggtcgatgcttcggtattcaacgcctccacttctgcttgccacttcttgctcacctgcgtcagctgttcgttggcacgctcataagctggaatgtttttaaggatatactccatgtccaccagtgcaaacttctgtgcactcatactcagtgcggctaagcacatgagactcatcaataatatttttttcattggctatctattttattgttttctatgatgacgctatttgaatcagcttcgttgaggtacgtcagatgatttaatcaaacagcgtcttcgttcatcttttttagaattcttgtcctaagataaagtggaactgactgccacctttctttccaaagacagtgtcgaaaccatatgcccagtcgattcccatcaatccaaccatcggcaagaagatgcgcacaccaacgcccgcactgcgcttcatgtcaaacggattgaactttttggtttcgtcccaagcattaccagcctccacaaagccaagaccgtagatggtagtattgcctaacaggaacggatagcgcagttccaatgacatgcggtcatacgcataaccctcataaccgcgaggggtgagctgtccattttcataacctcttagtccaatggtctcttcggcataacccgttgtatatccactcataccgtctcctccgacgtagtaagtttcaaagggtgactttttgtaacggttataactccctaacaagccaaattctacacgagtcatcagtacgaaacacttttgtccacccgacaaagccgtataagttttagccttgaacttccacttatggtattctacccacttgtatttttcttgctgttctgccaagtaagtcgacgattgtgggtcgagtgctaagttctgataatcctttttatcccacttagaccatggtggagtgagtgaaaccgaggctgtaaactccgaacctttacgtggatacagttggttatcggtagaagtacgattgatagagaagttcaagttcaagttgttggcattacccgtagagagcaagaagtaccgccaattcttcaacatatagcgtgtataggctaattgaacagacaaagtgaagtagtcatctggccatctcaggcgtttaccccaacccagactggctccaatcaacttgatgtaagtgtcagggtcgtaatagttttcataattattgtaggcatagtttccataaccgtacatataattatagtagttggtcatatacccactgttataatagttgctggacacgtcggtcgacttggagtaataagcaccgatagagaactgggtaggacgctttccaccaaaccagttggtggagtagttcatgttatacgactgataatatcgcccattcgtctgtacaccgacagacaacacctcaccatctccaatgggtaagatgcctcgacgctcactatttttattaaataggttacgaatggagaagttattgagcttcaaaccaacacgcccaatcaatccattctgtccccaaccgagtgagaattcaacctgatcattgcttttctgttgcaggttccagttgatgtcaaccgttccattctctggatctggcttcacatctggattcactttttctgggtcaaagtgtcccatggaagccaattcacgtgccgatcgcatgagcgcctctttggagaagagatcgccaggctttgtcttgagttcacgacgcaccacattttcgtacaatcggtcattaccattaatgcgcacatggttcaatctggcttgttgattctctgtgatacgcatctccaaatcaatggagtcgcccacaacgttcatctctgtaggctgcaagttataaaacagataaccattattccaatattggttgcccaccgcatcctcgtcttccgtgaggcgtttgttcatgagtgtctggttgtacacatcacctttcttcattccaagcaaagcacttaggtagtcggtaggatagacggtattgcccacccatgtgatattgcggatataatatttcgttccttcgtccacttttacatacacactcacatgtttgtcatccaccgtccatacactgtctttaacaattacggcatcacgataacccaattcgttgtatttcttaatcaggttgcgcttgtcttctttccacctttcaggcgtaaacttcttcgatttgaagagtgaacctaacttacctgcctcgtgaatctttttgaatgcgcctttcttgaacagtcctcctttgatttttgagttggtcaaagctcgattgttatcaatgataatatcgcgaacacgcattttttgcttcttatcaacaacgacatccaaaataacgctattcttattggtcacatcatctcgctgcataatgctgatatccgcattgttaaagcccttgtcatcaaagtattttttagccaagaactttgccctgcttaagatatttggcgtcacttgtccacctttcagcaagcctaatttggcttccatgtcctcacgttccgacttcttcaatccgatatagttgatttctgacacgcgtggcagggtttgcaaatagatattcaagtaaattttgtttcccactatcgaatcagctccaatggatacgtccgaaaacagtccatgcttccagtaacgcttcaccgcattggtcacttcatttccaggcactgtgatggtttgtcccacggttaatcctgaaatacccgatagcatatagtcttcgtatccttcgactcccgttacattgatgcctccaatcaccaaggtacgaggtgtccctgcataattgatatcaggatgtacgatcttatcttgcgcttgagacatgatagaactaccaagtacgagcgctatgattagcaccttttttatatgattcatctcgttgaattattagctaacttattctgatcttctatttgttgttctgtcttaccaaacctgcgttgtctgctttgataattggctatcgcacgataaaggtcttcctcagcgaaatcgggccaaaaagtgtcgcagaaatacagttcggaataggcaatctgccatagcaggtagttcgacacgcgcacctctcctcctgtacgaatgagcaaatcagggtcgggcatgaatgctgtctgcaaatatttgctcaccatgtcctcgcaaatcgcctgctcgcttatctttcctgccttcacatcggtaacaatgtcctgcaccgcctttgtgatctcccaccgtgaggagtaacttaaagcgaccaccatggtcatcgttgcattgtctttggtatgctcctcggtctcgtgcaatttcttttgcacatcctcgggaaggcgtgctatatcgccaatcactcgaaaccgaacatcatttttcatgaagatttcatcctcgagggagcttaacaccagtcccattagtgccgaaatctcatctgacggacgattccaattctccgtagagaatgtgtacagcgtcagaaacttcacccccaacttggtacatgctgctgtaattctgcgtacagtctctacaccagcctgatgtccatagcttctttccaagccacgctttgcagcccaacgcccattaccgtccatgataatggcgatatgcgcaggtattcgggttttgtctaattcatgattcattcgcttctctacattatctcctactcagcatcattatggcacgtcctacacttggcttgaaaactataggtcaaggtaagctgcaacgccgaatagctatctgtattcttaaaggctccagtactttctatctggtaagggtctttcactccgtccagttcatcgctcaacgagaagtgcattgcccactccaaacctaaattaacacggtcacctattttatatttcacacccaatcccaaaggaatgttgccagtaaagacatttttgttgttgccagaaacataggtagcccctactcctccaaagacaaaaggggtgagtcgctttgccccacgataatctcttcctgtgccatatggccaaaaattgtactcgtaggtcgcgctcaagtctcccaactggtgagcaaactggtaagacttctttccccattcggggtaatacgtcttcactgctgtggaatttcccttgagttttccgtaactacccatcacccgaagtgccatacgtggattgaatacatagcgccacactaacgaacccatgggttgcaagttcttcacaacgctaccgttgaaatctccttgatacgaaaccaagcctgcacccactcctacttccatgcgatattccacatcgtcctgcgcatgaacttgcacagcgaacaggaaacagaggatggagagtaatcgatactgcatgccaacgattgtcaattgctattctgtaaacgatttttgaacctttttccagcccaactcgttgaatctgcctttccacacttgacctgttttaccgcagatgagccacaagtagtggttttcatcactcgccatagcaaacgaagttgcactactctgaaagtcctttgggaaggttaggtttccatattgatgccaagacagtcctccgtctatacttctatagaattgagcgaagggcttcacagcactactctcacccatgccagcaccccccattgctatgagggcatcgccatttttcaccacctgaagatgattcatgttaggcaatgcgtatcggtctgccgaacgttgcgagaagaatgtccaaggttgttgctcggcattcgggtctgcatcgtctatcttactccacaaacaattatttttatcggtagttcctgctaagaacaagcggttcacaccacgatttgttttcacagggagtaccaacaaggagaagtctttttgaggcaactgtccttcttgtttgtcgaggttttctctcgtccaacttttcccttggtcgctcgacaccacaagttgtccttccgaagacaaggcatataacttattttctgtcgctccaactaaatggttcaatgccacatccgccaccttctgccagttttgagcatcggcagacgacagcaatgcgccattgttatacacataaaaagtatgtcccatcaaagccacattctgccaagcttgtgccgacaatggcacattggttgacagttcgtgccagtcagccccacttttagtagtagcagtatatagcttagcatgttcgccctccgttccaaagacatataagcgaccgttgttcactaacacacgcatacccgtcagcgcacccaatgctgaatgttgcttcactggctgtgaccacttgaagacatcgggtgcctcacgatgcacattgacatgtatcttgtaggttgtcaaggcagtacctgcttgattatacaccacaatttggcgtggctgaacaaagtttaacgaatcggttgccttgtaaaacttaaccgaatcgtttgccacattctttacgcctaatacccctgcattctttgtcgttatcgtagccaacaccttcgaagcatctatgccaaggggaaaagagtcgggattatagatttctcgtgtaagctgattgatgtaaaagcgatagtcgctggctggaaatttgacaacgtagctactatctgctccactcttagacgtagtatgcacgacacgtttcaaggtcttaattgaaaaacttgtgattgcagcgtcgctatatgctttagtttcctcatcgtcattgctgagacaggatgccagcaatggagcaataaagaacagcgagacgaggggtaggtatctccttttcattgatgtctgattataattttagctgcaaatttatatagaattccgcaaatagcccacctttttaatacttaattatgcaaaatagtgattattaggacgttttttaaggttgtttagggtttggacatctctgcaataaccacttatcattgatgacgccgaacgcctgagttcatcaatcgtcagtacaaggaagttgtttctcatgttcaatttcgttgcttcattcgcacatgagaatgtacaaaaatcaatgtcataaaattttacaccaacctcctcaaaactcgcgtattttgaagttacgaaagattgattgcaaatatcgcagaaatagcacactttgccaacactatgagaatcaatacattgagagaaaatactgttttttaacccataaaaacccaacaaaatacagcattaaagcagcctttcaatgcctttgttacattgtttttgtaccgctgaaaacatgttatagtcgcattaagtaatggagataaccgaacaaactcattgcaacagcaaaaacagagactaaaattgagcattatacctaattattttttctattttggtactttgagaagtgttaaaaaactgtcacttttattgacaaaacaggaaacagaaagattttatatcaagccttttatagatacttttcttgcgaactcacacctcactacaccaacaaacgaatgttgatcaatgaatacattaattaaatgaagaaatgcaacttttgaaaataaaagttcaaaaatttggcggaagataaaaaaaacactacctttgcaaagtcttaaaaaatgccccccaaaagggacgcatttcaaaaggcaaacaacaagctacgcagtgtcctatggtgtaatggtagcacaacaggttttggttctgtttgtagtggttcgaatccgcttaggacaacaaaaaaggtgattctttcgaatcaccttttttgtatgtccatacgagatgtttagttcaatgcgtctgcaagctcggcaccagccttaaacttagcaactttctttgctgcaatcttaatcttttgtttggtagaaggattgattccttcacgttcagcacgctctgaaacgctaaaggttccaaaaccaatgagctgaactttttcaccatttaccaaagcttctttgatagcatctgttgttccatccaaagcttttttagcagctactttgctgatacctgcagcttcagcaattctgtcaattaattctgtcttattcattacttttgagtttataaaaggattaataaaatgagttcttctgtcttcgagggacaaatataaactaaacttttcataaatcaaactaaaaaggcaaaaaaatgtgttatttacgctaaaaaagccgttaaatcactgcatatcgttcaaaaaccagagtttttttgtacatttgcacccaataaaacgactcaaattttaaccctttacaatgcgcagtatccctaccattacaaaaaatttgctcattattaatatattggcttttgcagccatgtatgcacttcgtagcactatcgacttgaatagtcttttggggttacactttttcatcgcatccgatttccgcatttaccagttgttcacatacatgttcatgcatgcctctttcgaacatatattctttaatatgtttgctttatggatgtttggttgtgtagtggaacgcgtatggggaccaaaaaagtttctgttcttctatctcacatgtggcgtcggagctggattgtttcaagagatggcgcaatatggctcttatttggtagaaggactgccagcttacgactcagtacagttagaaggcttaagaatttccatggatgagtttctgaatcgttggactacggtgggagcgtctggtgcggtttatggacttttgttggcttttggaatgattttcccagaagagcgaatttttattttccctcttcctattcctattaaagccaaatggtttgtcatcttgtatgcaggcatctcgttggtcatggcactcactaccacaggtggcaatgtagcccacttcgcacacttgggcggtatggttgtgggattcttcctaattcgttattggaaacgtcacccatacggttcctcctcgcgttcggaaggtgagcaattctttgagaatttgaaggataaatgggaaagacatacgcacaaatcagcagaaacgccgcctccacatgagtcttatcaggagcaccaaagcgattgggattacaatgctcacaaacagaaagagcaggaagagatagatagaatcttagacaaaatacgcaaaagtgggtatgacagtctatcgagtgaagagaagcgaaaactctttgacagcagtaaccgtcggtaaatttacatgattcggtttgtaaaaaaaataatactccaaatcctcgctatcgccaacgtggtgactattttggtcatgctcttagcgggatatgccgataggttagatcctactgttcatcccgctttggcaaacatgggactactactgcctgtgttgctaataatgaacgtaggttttttagtgacttgggttattttccatttcaaaaactgttggattcccatcgtcgggttcgtgctttgcttccctcctattcgcaattattgcccattgaacttacctaaagaagcgccaccacatgccatcaaagtactatcatataatgtgtggtactttgcaggctggaaagataagggaaaagcaaaccctattctcacctatctgagggcgcaagatgccgacattgtatgcttacaagaagcagagacaacggaggtggggaaagaacgcatagaggctgcactcaatcctatttattcctatcatgacttttcactgaccgaaaaagggtcggacagaatggcgatttacagtaagtttcctattttgaagaaagaagctattcactatccttccgaaggaaatcattcaacggctttctttcttgacatcaaaggagatactgtcatcgtcatcaacaaccacctcgagtccatagggctcacagaagaagacaaggatagttttaagggcatggttaaaggcgaattagaaacagactctatcaagataggttcaaagtcattatatcataagttggcaaatgccactaagatacgcgccccacaagccaaagctgttgcccagtatatagaacaacatcaagacaaaactatcatcctctgtggtgactttaacgacggtcccaactcgtttgcacggagaaccattgccaaacatctgcgcgactgctacattgagacaggcaatggacctgggatttcctatcatttaggaggattttatgtgagaatagaccagctgatgtgttcaaaaaacttaaaaccataccactgtcaagtagacaataaaatcaaaacgagtgaccactaccccatttattgctggctcgaaaagcaagcaaaataagtgcaaaatgctcaaaaatatacatttaagcgctataaatttttcatagtaacaaaaaaatagtatctttgcacgtctataattttttggaaaaaacaataatcaataataaattaaaatgcaaaacaaaggaattgtaattgtaacagccgtccttttgacgcttgcaagcatcttctatttgtcattttctgccgccacacgctattacgatagccaagctgccaagctgaaagatccgatagcacagcaggagtacaaagactctgtgaagtatttaggcatttactcttatcagaaatgtttagagactcaaatcggacttggacttgacctaaaaggtggtatgaatgtgattcttgagatttcggtacctgatgttatcgaaatgctcgctgatcacaagacagaccctgattttgtgaagtcgatgaaggaagcaagagctgaagaagagaccagtcagagcgattttatctcactctttattaaggctttcaagaagaatgcgccacagcgcagacttgctgaaatctttgctacccaacaactgcaaggcaaagtaaacccgcagagcagtgatgaggaagtagagaaagcactgcgtaaagagtcacaagccgccattgacaactcatttaatgtggtacgaactcgtatcgaccagtttggtgtagtacaacctaatatccaaaagttggaaggtgaagaaggacgtatcatggtagagatgccaggtatccgcgaaccagagcgcatgcgtaagctcttgcaaggaagcgctaaccttgagttttgggagaccttcaatgcagaagaaataattccttacttgaaccaattggatgcacaacttgcacatggcgagagtgttgcgaaagacacgactgctgctgactctacagtggctcaacccaaagctgctcaaaaggtaaagaaggcgcaacctaagttccaaatcaaagaggaaaatcaaacaaagaatgtacagactgctaatgacgcacagttggctgctgccaaaaaagagcatcctttgttggcaattttaagcacaacaggacaaaatgcactaagttgtgtaggttatgccaacgtacgtgatacagcagaaatcaaccgattgatacattctgatatcgcaaaacaaatccttcctgcagacctcaaactcctttggagtgcaaagccagcagatggtttgcaagtgaaaaactattatgagctgcatgctttgaagattactaccaccacaggacgcgctcctttggaaggtgatgtgattacagatgcagccgatcagtttaatcatctatcaggtcagccagaggtttctatgacgatgaacacagacggtgctcgtcgctggtcagccatcaccaaagcaaatatcggtagagccgtagctattgtgctcgatggattggtatatacctctccccgtatcaatggacaaatcgatggaggacaatcttctatcactggtcatttcaccattgaggacaccaaggacttagctaataccttgaaatctggtcgtatgcctgcgcctgcacgtatcgttcaagaggaggttgttggtcctacattgggtgcacaatctatccaacaaggaattatctcgtttgcattggcattcgtattactgatgatttacatgattgtgatgtacaatctcatccctggtatgatagccaactgtgctttgattattaacgtgttctttacgttgggcattcttacctcgttccaagcagcactaacgatgtcgggaattgcgggtatggtgctttcattaggtactgccgtcgatgccaacgtgctgatatacgaacgtatcaaagaagagttacgagctggaaagggtatgaaacaagccgtttcagcaggttacagcaatgcctttagtgcaattttcgactctaacttgacctctgcaatcacaggtgtcatcctcttggtattcggtacaggacctattcgaggcttcgccaccacatggttgattggtattgcctgctcattctttagtgcagtattcttgactcgtttggtttacgaatacaaactcaacaaagataagtggctcaatctgaagttctggacaggtatttctgaaaatatgatgcagaatacacgctacaactttatgaagatgttcaagacaagtggtactatctatgccattgctatcattatttgcatcggtagttttgttgttcgtggcttgagtcagagtattgatttcacaggtggtcgcaactatgtagttactgtagataaagctacgcatgtggaaaatgtacgtggcgtactgaacaatgctttcaaaaatacagtgggtaaaaatgcaggagaactggcaaccacgaatgtaatcgctattggtaccgacggaaaaacattccgtgtatccaccaattataacttagagagcaacgatcctcaaatggatgataaggcggaaaccaccctttacaatgccttgactaaagcgggcatggtgaaacaagcaaatattgaagcctttaagaatcctgatattcgtgaaggaggttccattatcagttcttctaaggttggaccttccattgcaaaggacatcaccaacaatgcaatcaagagcgttgtgatagcgttaatttgtatcttcttgtatatcttattgcgcttccgcaacatcggattctccataggttctgtagctgcattgattatcgacaccacaatggtgataggtttgttctcattgtgctacggctggataggtttctctctcgaaatagaccagacatttatcggtgctatccttacagtgattggatacgacattaacgactccgttgttgtgttcgaccgtatccgcgagaacttgaagctacatccaaaacaagatatacaaaagaccttcaatgactctatcaaccaaacattggctcgtaccattaacacctctgtttctacgctcattgtgttggttccaatattcatcttgggcgctgacagcattcgcagtttcgcctttgctatgattgttggtgtctttgtaggtacgttaagttctatcttcctcgcttctccaattgcttacttggtattgggacgtaagattaagaacgaacaagaaaaagaagcagccattgtataacaactaaataaaaccacaaaaagtggttttccaactaacggtgcagtcgaatagattgcaccgttttttatatatgaggatgtttttgtgagcatctctccttttaataaaaccaaactttcaagcgcctttgtttcaaaaaacaaatgatttattatttcaccactacgaggcaaagatttgacaagcgcagactactggcaacaaaacagcatgggcaaccctttttcaaataaaaaaataaacaaaacgtattcgcgtattaatatttttgttatttttacaaccactaagatgaaggactaaatttcaatatattatatcttaaaatcatttctgatgaataacatttctcacttgaaaccatggcttgtcctgctgctgacgctgacatccatcaaaatctggggcgcaaagcctgtgaaagacgttgtaatagatgactgtaccgacacctacgtgttcatgtctgacaacgatggcaagccaattgtgaagaacacagtgacaacacattatcagtctctctcacttcgcaatatcaatatacagccttacaccttatatggcgagtttatctctctggataaagcttctggaaaaggagccgcccaatatcgaaacgctacgcccgaaaatgttttctacgatgataccaaggtctgctttttcaatatcaacttcgaccgaaaacgccacgagagcaaggtaaagtttgaacgtactttcaaagatgtgcgctatttcacacgcatttatctttccgaagatttcaagattaaacacaagaccgttgttatccgtattcccaagcagttcaaccaattcaaactaatacaccaaaacttcactccgaacatcaaatttgaacagacagaggatgccaatgacaaagtctatacctataccatcaccgacatggaaggcatggtatcggagaatgcaatgcctccaatggcttccatttacccatatatctgtatcgtaggtgctttttccgactatcaagacatgtacaaatggtctaacgaactaacccaaatagacacgaatatccccaacctccctaccatactgaaagagattggacaaggagcaaagaccgatgaggaccgcattcgcaatacgtatgcatgggtacaaaagaatatcaggtatgttgctttcgaagctggcatcactggacatcagccagatcggcctgcagaagttgtacgcaagtgttatggcgactgcaaaggcatggcgatgctgctctgtactttgcttaaagcacagaaaatggatgcacgattagtggacatcgggacagaagacatccctttcaaagccagtgacgtgcctaccttgggagctgtcaaccacatgatttgtatgctaagccacggtggcaagacctattggctggatgccaccaatcgatttattcctgcaacacacatccctggtaacatccaagggcgagaggctatggtggagaatggtgctaactgcacgctcatgactctacccatattgaacagtaacagttctgtagacagtctttcataccattatacattagagatgaacaaccaacctcggctcgtgggacgcgtcagtaatgcttggtgtggcgacatgaaggagtttttcatgcggacacatgatgcgacacagcaaggcgataagcttcttctgctcgccaatgcgatgaattcagacgaccatgctcacgaaattactgatgtaaagtggaccgtcaaagaccgcagagagccgtgggcaatacttgaaggtaagatcatcaaccgcacgggagtgcaacaagcagaccatgaggtgtacgtagagctaaatcctcacaacgaactgttctcgcaaagaatagacactactgaccgcactcacgatgttatgctcccactccggtgccgcatcgtacgcgaagtgagtgtgcaactgccagcaggctgcaaggtcatgatacctccttcgaagaaattcgacatgccacaaggaacgatggagtgcacctttacacagaaagacaactgcgtcatattgcgccgtgtactcaccattcaccaacgtctcttacccaaggcggatattacgaagtggaacaacatgctaagcaaatggaacgatgcatgcaacgaacagctggtaatcacgaacctaaactaaaaaacagatatcatgaacagagtaagtaaaatgagagtgtgcctatgcacgttgctgttgataggcactacatgcgtgtatgcagacaagttggagaagtacaaagcctttgccgataccattaggaaaaacgtatgggcgatggatctcccacaattcaaaaacaccaacattccttccaagtacaagaatgagagtgcagtcattgtggcatcctaccgcgatgtgagtgttgcccagaagtcgcacttgaatctcctcactgtaatcaatttgagcttcaagatgaagcgaaacattatctccagcgacctcaatcgtgtatgtatacacattaacgaccaagctgcacttaagaaatattccgagtttgatttcatttcctattaccaacgctaccgattgggttggagcgagaaagtgcagcatgtgcttggagtaagagtcattaaacccgatggtaccataagggaagtcagcacagatgactatgtgaatactgcagaaggaaaaaaggacaaggagaaagggcagaaattagcggtgccgggattggcagtaggtgacaacattgacattttcacttacgaagagaagaaatttgaggagcataccatggaaccgtttatcatctcctatcaggaagaataccctatgctctggaagaaggtgcactgcacgttagacaaagacctcacctcacaatatcgaacactaaacggtgctccagacttcaaacagagtaccgatgaggacaagaatatcatccttgatgctgaagtgactaatgtggagactaccaacccagacctatggtatcatcagatggaacactcccctatgacgatactcaacattcagggtaaacgactcaaaggagagtttatcccacccagctccaaaagcaaaggacttcatgccaatccaaaagccaaggacatacaggatgatgcatttgagttttatcgtgtagcgacattagattatttcggcaaccttgaactcagaaagtactgcaaggcagctaaaaaacaatttccgaacatcaccgatagagccgactatatctacgaccttttatgcttcacatacgccaaggatcgtatcgtagatgcttcactccgtagattcgcctacaatcttcaattgcggctcttacaggctggaattaagaaaaccagaataggtatcaccacactggctggttgcgaacccatcgatcaactgtctgtttatgccaatggcgtgccgttcctctacctcaaggagggtgaacgttactattcgtggtgtccatcgattaacatagcaggagaattgagagctgacatgcaagggcgcaaagccattcttcaacccgagaatagtaaagaagctaaaaaagattatcctgtctttgtgctgcctgccagcaaagctgaggacaaccaaagtgcctatacgctcaaaacaaagatagaaaacggtacggagttggcgattaaccatgagcatcgtgccactggcaccatccgcgaacaactcggcacagagatacttacattgaaagacgtgtacgactcatacctcgaccgaatgactgatgccaaaccatttacagaggcactgggaaagagaaaggcagaagccgaacagcaaacactggacaaggcaaaagaagagcaacaggaatggctcaaagatttagtgaaaagctattgggacaatacaccgaaaaacatcagagactgcaaaatcgtatcggtgggtagctccaagaaaaaccgtaacctgacctacaccgccaactattccatggagggaatggtaaaaaaggctggtcgcaacttcatcatctcaactggcaaactactgggaggagtgttaaaagtggaaggacaacaacgccaccgcactgccgatattgatatgatttcgccgagacaaacaatatggaatatagaaatagcactgcccgaaggatacaaggtgtcggcagatgcattagagcaacttcacaagaacgtgaccaacgagtgtggctcctttgtctccaaagcatcaacagcagatggcaagctgctcatcaacgtggtgagaacctacaaccataagcatgaaccagctgccaactgggacaagatgcttagaattattgatgccaccaacgagtttacgaacatacagacggtcatcaagatgtaagcatgtaaaatatttaggctggttccatatattacggtggtaatttatagaaccagcctttagtttcgtatttagatatgaagtagtcatagcgcaagatgtaaaagctgcacacacgttgttattctcaacaatctgcaagatctaatcgtctgattctgcgcaagtgatttcatccactaacgctatgactactatcatcagaattcttttttatatcgtctccttctcttaatttctgtaagttatagaaataaacaatgctttttagaaaaaggagcaaccacagcactttctctttagggtgattgagtgactaccaaaaacaccaacaaaactgcgtatgcagcattggaggcacgctaaatggaaagtccatcaatgctgaattttctttacaaagagcctctcataactcgcataaaatcaatcaacagcaaagttggtcgcaaatacgcgagttatgagcaaggtttgtaatttattgttattgaacacgttacacaaatatcaactcttttcaatccaattcctgcccctttttggcggctgaagcattgagataagcctgctatttgcatgctttaatgctgctactgtatgtgaataacacctctaaagagtgtttccaagcgtgttaagttgatgttctaacttaaaaagacgtttattttgctgaaatcagcgcatttttgcagggcgtttgcctattaaatttttctattttgaagattttagatgaccgttttttggtaaaataataagacaaaagacatcaattttctgcatcaaaatcgttttagttttgcttcttaaagaagatgcgagcggcattgagaacggctaacaaagccacccccgagtcggcaaagacagccatccacagattggcaaagcccaacaagccaaggagcataaccacggctttaactcccaaagccaatgcaatattctgatggacaatgcgtcgggtgtatcttccaatcctcatggcacaagctaccttcgagggttgatcggtctgaatgatgacatctgccgtttcaatagccatgtcggagcctaaacctcccatggcaatgcccacatcactcaaagcaagaacaggtgcatcgttgataccatcgcctacaaaggcaacccgctctcctgctttcttaacattttggaggtgcaaaactttcccatcaggcagcaaatcaccatacgcatgagatatacctaagtccgcagccaccttggttactaattcctgacggtcgccagaaagcatttcagctcgtactggcaaatctgaaatcgctttctttgcatcttctttaatggtatcggcaagaataatatgccccatatattttccctttcgagccaccgctaccactgtctctggtatgctacgcaaggcgtcagcataagatacttgctcacgatctaacagttttaagttgcctacaagccattcatcattcttaagaccatagcctgcaatatcttgagagctgatgttttcttccgtagggcaatacttcaaaatggcttgggcaataggatgattgctcgacttctccatagcagccacggtttgcaaagcctcttggtctaatcctactacagactgaaccgcaaactcaccagtagttaaggttcctgttttatcaaatgccacaacatccacctctgtaatggcatctaagtaattgcttcctttgaacaagatgccatgttttgaggcaagacctatgcctgcaaaataacttaacggaacactgataaccaatgcacagggacaagaaataaccagaaagacaagagctcgtctgaaccagtcagtaaaaacgtagctgtactgactgtcaaaaatactatataaataaggacataccactgtcaacagtgccaaaccgatgacgattggtgtataaatgcgtgcgaaacgtcgaataaacaattcggtgggagcttttcgttctgctgccgattccaccatatttaagatgcgtgaaacagccgactcactggcaggacgcacgacctctaaatgagagacggcatccacagctatcattcctgccaacacttctctacccgtttcaaaggttcgtggtagcgactcgcccgtaagagcagcggtattaaacgcagccgaagcagaaacaagtttgccatcgaggggtactctatcccctgctttgacctcaagaatgtcacctacctgcacttcttcgggggatttttcaatgattttcccttgtacaacaaccttagctactgtaggtctaaaagcaatcagttcttgaatgttatcacgtgcacggtcaacggctctgtcttgcaaagcctctccaatacaataaagaagcatcacagccactccctcgggatattcgccaatggcaaaggcgccaatacaggcaatggtcatgagcataaattcgctaaagacatcacccttgagggctgtttcccatgcttctttcatgacaggcaagcccacaaaggcaaaagcaagtagataccaaaccagcaagaattgaggcttttctacaaaatccaacccaaagtaagggaaaagtagtcctatgaccaacattccacccgataggataacattccaccaaggcatttgttcttctgtatgttcttgttccatattcgaaagagataattgtttattttttacaaaagtacactaattaaaatgcaaccaagtgtcaaaaaatagcgaggagttcgcattgtagattttattcattatctttgcaagaactaattagatgtccaacaatcatggaagaagattttaatatccgagaagaacgcctctcatccgccgagaaggagtttgagaatgcgctaagaccactaaaattcaacgattttagcggtcagccaaaggttgttgagaacttagaaatatttgtagaagcagccaaatatcgtggagagcctttagaccatacgcttttacacggtcctccgggattgggaaagacaactttgagcaacattattgccaacgaattgggcgttggctttaagctaacaagtggaccagtgcttgacaaaccgggtgatttagcaggcattctgacctctcttgagcccaatgatgtgctgtttattgatgagattcaccgattgtctcctgtggtggaggaatatctttactctgccatggaagactatcgcatcgacatcatgatagataaagggccttctgcacggtctatacaaatcgatttaaatccttttaccttggtaggagcaacaacgagaagcggacttttaacagctcctttgcgtgctcgctttggtatcaacatgcacttggagtattatgagccgccaacattggttagaatcattacccgaagtgccaccatcttaaaagtccctattgatgaagaggcagcttatgaaattgcacgccgctcaagaggaacgccacgtatcgcaaatgcgttgctaagacgtgtacgcgacttcgcacaagtgaaaggcaatggaggaattaatacagcgattgcaaaatatgccttacaggcattgaatatcgaccaatatggacttgacgagatagacaataagattttgctcactattatcgacaaattccgtggaggtcccgtaggactaagtactattgcgacagccattggcgaggacacaggtacagtggaagaggtgtatgagccattccttatcatggaaggattcattaagcgtacccccagagggcgcatggcaacgcacttagcatacgaacatttggggcgagacccatacaaaggcaacctaatggaaccaggattatttacataactcacgaacgttcaacatgaatcaaaaagatagaattggaattttcgtgggaagctttgaccctttcactatcggacacgactccgtagtgaagcgtgcattgcctctcttcgaccacatcgtcatcggtgtgggagtgaacagccaaaagagtcacatgctctctgaagccgaacgcatagaggcaattacaaagttgtatgccaacgaacccaaaatttcggtgaagtcctatcacgatttggcggtagattttgccaaaagagaagaagctacctatataataaaaggcgtccgatcggtaaaagactttgaatacgaacgtgaacaggctgacatcaatcgccatataagtggcattgatactattttcttattcaccgaaccacagttagccagcgtaagttcatcgatggttcgcgaactgttacgctacgaaagagacgtaaaggagttcttacccgttgcacctaaaagcgacaaaccgtagcctttgagtagtaatttccataaattcaaacgaaaaaatactaattgatgataacctatagtgcagacggcgtgaagatgccgaacatcaaaaaacgagaaacctcggcttggattaaagccgtagccgccacctacggtcgaaagattggcgaggtgggctatatgttcgtagacgacaagaagattttagaggtgaacaacgaatacttaggacacgactattacacagatgtcattactttcgactatgatgagggcgacactgtgaacggcgacatcgtgattagtcttgacacagttcgtaccaatgccgaactgtttggcaagacatacgaggaggaactccatcgtgttatcatccatggcattctacatctctgtggaatcaacgacaaaggtcctggcgaacgcgaactgatggagacagcagaaaataaggctctcgccataagagcataactctcaaggaacaggattagtcagataatgagccccaagcgccctcctctcctcaaatgcagcccacaacaaaccgctcatggagaacgaatatacaaacaatactccccgaaaactatcacaaggataattttcggggagtatcgtatcgtgcgaattgaagcttatttcatcagttctaccgctttaagtacaatgtcattggtttcgttcattattctaaaatactcgttcatgccccataaatcacgtgcaacgagtgcttttaactgatttttcaacatgggtaaagtacgctgaagttctgcctcatccttaggtttcagctttgcttcttctcctgccttcatcactgcatcgatgaaagattgtggaacttcatacgattgataaaactgttcataagatgtatacttctttcgtagctgcttgcgatgctggtcaacgtatttgaggttttcattaataatgattgacttagcagccaactgccgatgaaacgatgtaaacttagccgtatccagcggaacaaagtaatcgggcatcactcctccacctccatacacaactcgcttttggcgtaaagtataatactttaacgagtctgcaaaatggatactgtcggcactgtacagctctccatgcttgaaacgctggtctaactccagtgcatagtctttacgatcgccctttttatagggcttctggatacatcgtcccgatggtgtataataatgagcaacagtgagtcgcatcatacttccatcaggaaactgtatcggactctgcaccaaacccttgccaaacgaccttcgtcctaccacttgtcctctgtcttggtcttgtatggcacctgtaacaatctcggcagccgatgcagaaaactcattgataagcaccatcactttcccagatagcaaactaccattgccctttgcaagatagtctttacgattagaacggcgacctttggtatagacaattaagtcattgcggtgtaaaaactcattggcaatctggacagcagcttgcaaatagccccctccgttatcctgcaagtctaaaataagatgttgcataccttgcttcttcaaatcactaacgcacgccataaactctgcatacgtcgtcgccccaaagctaccaatgcggatataccccaactgtggtcggataagatagctggcatcaatggtattgacgggtattctgtcgcgtatcaccgtgaagaagagcattcctgaaatgtttctacgcaagacgccaagctttactttcgaacctttctttccacgcaatctgcgcataatctcctcacgtgccatcttcaccccggcaatactactatcattaacactcacgatacggtcgccagccatgatacctactttttctgaaggaccgtttgctatggtctgaatcaccatcagcgtgtcttgcatcatattgaactgtatgccaattccatcaaacgagccttgcaatgcttccgtcatggctttggtttcctttgccgtagtgtaggatgagtgagggtctaaatggtttaacattccacggatagcctcttctaccaaccgatcttcctgaactgtatctacatataaattttgaatagctatttccgctatttccaatttgcgaataggagaattcttcccaaaattaaaattaaactgtgccgaaacggtgcaaaccacccatccgaacattatacacgctataaatcttctcatttattcaaacttcgttaaaaaataatggtgataaagttggttcagaatcagcttactaaggtggaatcttcctctgggatatcctcttcaacaaccaaattatcaataataaagttttgtcgttccatggtattcttgcccatgtaatactccaaaagcttttgcacctgatcatttttatgtaatgtcacctgttccaagcgcatatcaggaccgataaaatgtacgaattcatcgggggatatctcgcctaatcctttgaatcgggttatttcagggtcgggaccaagtgccttgattgcctcttgccgttcttcctcgctataacaatagcgtgtaatgaagtcgctctttttatccttcttatcgagcttttcatccgcttctgcaatcacatccttattctttatctttgttcttttgttacgaaccctaaagagtggcgtttgcaacacatacacatgtcctttttttatcaactcagggaaaaactgaaggaagaaggtaatgattaaaagtcggatgtgcatcccgtctacatcggcatctgtagccacaattactttgttgtaacgcaacgtatccaatccatcttcaatgtcgagtgcggcttgaaggaggttgaactcttcgttttcatacaccactttctttgtcaaaccaaacgagttcaatggttttccacgcaatgaaaacacagcttgcgtattcacgtcacggctcttcgtgatactaccactggcagaatcgccctctgtgataaagatacagctctcttctttccgatcgtttttctcgtcactgaaatggatacgacagtcgcgtagctttctattgtgcaaattcgccttcttcgcacgttctctggcgagcttcgttactcccgccattgctttgcgttcgtgttcgctggatttgattttagcctctaaaatatccgcacaatcctctttatgaatatgcaggtaattgtctacttcacgtttgatgaaatcgcccacatacttgttaatggtttcacctccaggtgccatttgcgttgaacctaacttaatcttggtctgactctcaaacacaggctcttcgacattgatagcaatggcgcctacaataccatttcggatgtcggtatactcgtagtttttatcaaaaaactccttaatcgtcttggctatatgttccttaaatgcgctctgatgcgttcctccttgcgtagtatgttgtccgttgacaaacgaataatattcttctccgtactgattggtgtgggtaaaagctatctcaatatcctcacctatcatgtgtatgattggatataatccatctgtagtcatgttatcgttcagcaaatcttccaagccattacgactcttgatgcgccgtccgttatacataatggtgagaccagcattcagatacgtgtagttgcgcaacatcgtttccacaatatcatcatgaaacgaatagttcttaaagagcgtgtcatcgggttcaaaataaatgtaggtaccagattcgtccgaagtctttgttgtcttatcggttttcatatcgcctttttcgaaggtaagttttctcactttcccctctctaaacgattctacttcgaaatgagcactcagtgcattcacggctttgatacccacaccattgagtcccacactcttcttgaaagctttggagtcgtactttccacccgtattgagtacactcacagcttccaccagtttcccctgtgggatgcctcgtccatagtcgcgcactcgaactcgcagattatcttcaatatctatctctatccgatcgcccgctttcattttgaactcatcaatagagttgtccaaaacctctttcaggagtacataaataccatcctctggcagctttccgtcgcccaatctaccgatgtacatgcctggacgagtacgcacatgctccatatccgacaagtgacggatattatcatcggtataagcaacagtatctgcttgttgctgaggagagacagacttcttgttttgttgactattttctaatttcgtgttgattttttctgtcatagttctttgtataattatagcatagagaggaggcttcattgttcacacaagccgcttgagtcacttttattgtcgtcattttcacaacgaaataaagcgcaagatttctcttctatccaagcgcatacgtacacatgagaacgtaggacaaatcaaccaaatcagaaaagatgaatactaaacgtactattttatctctttacgataacaacagcgacgcttatgattcgtaggctttaatggtccccattgactttgtacgccttcgttggtcaccaactctacttggctctccgcccatgtaaacccatatttgttaaacacgggaattaagtcggtaaacaataaggcatttgctccttttgagcgatactcaggaagaacgcctaataagagcaagtctcctccaccgccagttttttgaaatttaatggctcgtaataaataccaccaaccgaaaggtaacaaacgtcctctacggcatttttgtaaggcatacgacaaggaaggtattgaaatgcccacgcctatcagctttttgtccttattccaatcctctatgagtgttatcatattcaaatcggcaaagcgaagatacatgttcacatagtgatcgatttgcttctcgctcaactctgaataaccataaaggtctttgtaagtctcattaatgatgccaaacacctgacgtccatagtcggtggttcgcagttcacgacgggtaagtttcttgatatgtagattgtaacgattctcaacaatctctgctactttagcatatttctctggtatttccttaggaacatctaagaaatattccacatactcctgatccacttcccatccacctaattgctctaaatgttgagggtaatagggataattgtaaatggtaatcatggtactgagcttgtcaaatccccaagtcagcattccttccggatccatgtcagtaaatcctaatggtccgacaatctctgtcatcccctttgaacgaccatattcttccacttgctcaaacaaagcccgtgacacctcaatgtcgtcaatgaagtcaatccaaccaaaacgaacgctttttttattccatttttcgtttgcacgatggttgataatggcagctacgcgtcctacagccttaccgtccttgaacgcaatgtaatattctgcctcacaaaactcaaatgcagcattcttatctttccggagtgtattcatatcatccatgaaaagattagggacatcgtattcatttccctcataaaggtcgtaatgtacgtccacaaattttttcaaatcgcgccgcgactcgacctttttaatttctatagatggcattctattctaataaaattataagcaatataggctgacaaagatacgcttatttaggaaatttacaaaagaaatcacgtatttattacataaataagtgaataatggtatatttttattctgaaaaaggactattgttggacaatctgcagatgacacgataagctcaaataacaatgtatatgcgagacaaacacgctgacacagaaagccttatcgcttgaactgacattattttctcatctaatcttgctggaaaaccgtgtgagataatgattattcactattaagaaaaataatcctccgtaaacgtcgttatccttaaagaatgtttttgtacatggttctccttgcttaaggacatcccaatggcttcagagaatcctccttgagaaggatacttatttcagtgaatcaattatgtggaaatattacgctttactatctgccttttttgcagcattaaccgccatatttgcaaaagtgggtgtgcgagatattaattccaacttagctactgccatccgtacagtcatgatttttattattacttggggtgtggtgttttgggggcaccatcagcatgaaattcatctcatcgaacggcgtacatgggtgtttctcattctctctggcgcagcaacaggtctgtcgtggctcttctattttaaggctcttcaagaaggagatgtggcacgtgtagcacccattgacaagctgagtgtggtgattactcttttgttagcatatatctttctacacgaggatatcacccctaaggtgctgtttggcgctttgctcatcactgtgggtagcattttgatgatgctgaaataaccagatacgcacttgtggatgaaggtcaattttcaaaccttattttatcgacgataaagactgcaacatccaccagctaaaatgattttctgcggtgaaaaaatctaccaataatgtcaaatattttaaccgttttttggcattttattttcttcgttttagagtgcggacaataggctaaaaggaggcaaacggacgactcaaccctactatcatgctaccatagcttgtttacaggtatcggttcatggcgcaactcgctcctttttggatcacgaaagcgtgaaaacagcgagcaatctcatggagataaaccgactaagtcatgtgaataagccgattaagtcatggagataagggggttagaacatgcacttaaccgaactatcccattgcttcaaggcaaaaatggggtaaaagttgcctaaaacagtcgtttttatgggtgttgaaagagggcgcaccgtaactctcaaaatactcgcatatttgcaacgaaggatgcgagtgatggcaaatacgcgagttttgaaagggggtttgtaaagaaaattacaagtcgagaaggtgatatttttatcactgtcatcattcacttcggtggtatgaaaacatgccaaagggtgaactattttgcacacaaaaaagacagcctacgcacagactaaaaataagataattcttcaagatcgaagtttctcgccaatcaacaaccaatggttttgctcaacgtctgtcgttgcaaatatatacacctctcccccgtcacgtattttgagccgtttgcgaagctcggcaacagacagagggaagttgcgcgtcgcaatattggcttggcgaatagatgcaagttgggtcttcagcatttttttattcatcgaagaaatggctttgatacgaaacttacgaccgggaaagccttccacttcgtgcccgctgacataaaggtgcgagttgggtgctatcttatcaacttggaattgctgtgctatttccgcaaaacagccagccttcatcagcgcagcattgggttcgtagagatattgtcctatcaggtgactaccgatagggacagacatttttggcgaagcaaccgtctgttgaggataaaaaacaaaagtttgctcattgttgacacaatgcaccgcaagcgatgactgccaccgatggctcaacacaaacaacaactctttacactcgttgttcacggcgatgatatgaacctgccgcacacagtttgacaaggtgttgagctgcacaacagcttggtgccaatctaacataggtgatagcttcaccagcgtgacccaactctttcgcaacaagtccacaagcagagagagtagattgggagtgcaatcggagatggcaaccgttttagcgccagcgtcattacgacgtgctgggtcaagataaatcaccgtcgctggttgcatggtttgcaagtactgctcgccgtcacaacaaaccacctgcgcctgactcactcccaacagtggcaggttgtgttgggctatatcacacaagcaacgctgtcgctccacatacacagcctcatggaacggcagtgccatgaacgaaaagtctacccccaatcctcccgttaaatccaccaaagagcatgccttgagcagcgctgtattttcgatagaggattgttcttctaccctgttttgaaagtcagactgggcacattgccacgccaatttggctttgtactgtgccgtttgctccgaagaacattgctccatagataagtgaggcggataaagtagctcatcattcgacgcccatgacggcagtttgcgttgagctgtctgtcttccggcgatttgctgtaatgcaaaaggcatgtctacatcaggatatttgtgagccgctaatgccaacttgcgcacatcgccctctgcatgctggtgtataaaatgagacgtttcaacattcatgactttgctcttttcgtattgctatggaatagaaatcacgcaagcattagcgtatcacacgataagactttttagcttgggctcgggagcagtaattaaaatgccaccactcggtgcgcaagggcttaaaaccagcatagcgcatcaccttgcgcaacagctcacgatgacgctgtgcctgcttagaaatatgtcgactggcaaccagttgggactctttgtcaatatgtgctgcggctcccatatagtcaatcttggtacccatgtcaagggtatcgcccttcagggtacacaaggtaaggtcgactgctaacccataattgtgcaaacctccgccatgtgcagggtttgagacataaaaatatttgggcgttccctttactttattccacattttttgctgaatagccatgggacgggcggcatcatagacctttaagcacaagtctggacgcaactgttgcaaacgcttctgcgcctttaccaaagcgtgagcagcatgcggatgtaaataggcttcgcgcaaatcatcgtaaagaacggttcctgtgaaattatctgggcgcgcatacattaacgagacttgaatagaagggtccaacttttgtacgttcacgtagcctcgtttttctaacgaccgagccgtaggacttaaacggtgagtagtttgggctgtcattcctgttgttaccaacatcagccagactaatattttcttcattttatagatgtgaatatgttgtacagatggattgtgccaagaagtaagcactactgaactgttgctgcaaagataagaagtttggagcgaatagacaaatgacaaatgtccaaaatacgggcaaccatcagccctctttatcgtggcaattgatacaaaagtcccatgcgccattcataggttgtagcttttgcatcaggatggtatttgtaatgagtggttcgatgataataggttcccgataattggagtccccattgtttccaaagggtcaactttaaggtagggcgcaacatccatacagaggtttggttgtgctctccttgtgcgctaaactcctcatgcggtgttcctgctggcacctcttcgtagcctcgccaactatacattctgaaaaaacgagtgtcgaaggagagggaagagcggcgtggcaagtgcagtgaggtaaaagaataggcagtaaaaccacttcccatattgtaggttcggtgatacggttctcctaaatagtcgctccatgcaccgcccaagagcatggcattgaggaagacagattgttggaaagccacttttttagctttgttcggaatgcgacacatccaccctattcccacactggctgcctcggatagctggtaaggaggaatgcccccatgccgctcattggcattgtcgtaattgaaatgttgataaagtccaaagcgagtttgcatgcctttggtatcacgaaccgaagtggcaaataactgtcccaatatctgtaagtgattgactatctcttgttgatgccccaagaccaaggcgacatctgtcttaaaataatcatacggtcgagtttcctgtccaaacgcatctccatattctacctcaaaatgcacgtaaggcgatgtgaaacctcctgttgcattgtgccgagtgtcaacatatcgaccacccacagaaaaggaaagctgaacggggaagcggttcacatcatgatacagataatgcttttggcgtaccttccaagcttcgcctgtgatcactctattgagtcctcgaataggattgatagcagcacccaatatctcacgcaccacacgtggtaaaccttgcagacgttgatcatacactatgctcgaaagacgatatgtacactctcctattgccagccctcctatgcccgttgacagtgcatcgttaatagacgggagttcgttctcaccagcaatttcccacaacaaatcccctgcaaaggtatagggtatcgattgccaaaagttcatgccgttgctccgtgcagcattgaagaacagattgccatgataaggatggaaaaacatgttggtatggaaaacatcggcatcccaaaaccattgattgagctgaagattacgtttcagcgttcgactggttaccttggcgaagttggcatgcaagacataataatcaaaggcaagcagtgaagcattgatacccactacttgtgcggctgcacgccaagggtgtttatccttattccacggggcattctctacccacctacaaccatcgagcgaatcaggcaaagctatttgcagcgtatctatcgattttgcggatgcaaggggtacgatggtgtccacgtgtaagcgatagctttgcgcactgctgttggcagataacaaagataaaatagcgacacaacagcgatacaaccaatttgtaggattgcaagagtaaaccattcgttcgataaaatgggcgtttttgtaagtttcgccctatcatgtgtacccagtacacatacatcatcatacattaaaaaaggcctataccgcctgataatcagtactgtcaagcactgtgtccatgaggtataggtcgtatagtgtttgctacaatcaatgcaacaacatgtttgagagattacttaacggtaatcaagaaataatttttcttgcctcgttgtaccaacagatatttcccgtcaatgagatcttcagcggtaacgatttggtcgaaagctgtcagtttctctttgttgagcgatactccgcctccttttaccaacttacgcaactctcctttgcttgggaaaatctccataccgtcttgcgtaaagaaatcaacggctgtgctgccaagcaaatctttgctcaccgtataatgaggaacgccattaaacacatctaagaaagtagcctcatccagcttttgcaggttctctttcgtagccttaccgaataatatttggctggcttcaatagccatatcaaggtcttcttgcgagtgtaccataacggtcacctcttgtgccaatcgcttttgtaatgtacgacgtccagggtcttgttggtgttctgctatcagactttcaatggtttcacgctccaaggatgtgaatatcttgatatatttctccgcatcttcatcgcttacattcagccaaaactggtagaaagcataaggagtggtacgatttctgtccaaccaaatgttgccgttttctgttttaccaaacttcttaccatcggctttggtaatcaacggacaggtcaagcagaaagcctcctcattacttcccaacgtacggcgtatcaactcggtacctgttgtcatattgccccattgatcgttaccacccaattgcagtttgatgccatgtttttggtaaagatagaggaagtcataaccttgcaacaactgataagtaaattcggtaaacgataatccatcgttggcttcaccattgagtcgcttctttacactgtccttcgccatcatgtaattcaccgtgatatgtttacccacttcacgtgcaaaatccaagaatttgaagtctttcatccagtcatagttattcaccaattcggctttattaggctcattaccttcaaaatccaagaacttggacacctgtttcttgatagcttcttgattatggtacaacgtttctgaatctaagagattacgctccaagctttttcccgaagggtcgcctatcattcccgttgctcctcctaacaacaaataaggcttatggccacaacgctgcaagtgacgaagcatcataatgccacacaaatgaccaatatgtaaggagtctgccgttggatctgtacccaaataagcagacaccatctgtttctcaagtaattcttctgtaccgggcatcatttgtgctaacatgccacgccatttcagttcttcaacaaaattctttgtcatcgaatcaaatttatatttttgtttgtatttctttatttggggcctctataaagagaaacttacggcactggatcatatccactaccaccccatggattgcatcttaagatacgtttcacagctaagtaactgcctttcaaaggaccatatttcacaatggcttgccgtgcatactctgaacaagtaggggtaaatcgacaagaaggtggtgtgaaaggggtgatgcacttctggtagaacagaatggggacaagcaatatccacttgagtatccacatcacatattcttgtattttcctcaatacttccacaacttttcaacgattcgatttaagagttgcgccacatgctttgcgacctcatccgatgtatacaattcatcagccaaccaaataaaagcaattaagagttgctgttgaggtcgtgtagccataggttctgttatcaattgtttctgtaaacgataggcttccctgacctgacgcttcacacgattacgcttcacggcttgcttaaagtgccttttcgacacactgaccatcatttttacgggcacatcttgcgcttcgttctccgttagcagataaaccactcttaatggaaaggatgcgagcgattggctatcatttccattgaagagcttctctatgagttttctactacatatccgctcctccttactcaatgtaaaagagccgacagaagacattccaaactactttttatgtttcttcagatacgcttttagcgcactggtcatcgatggattttctgcatctggtgctttcaagtctaatcggaatcctgcatctgtcacagctttacaggtcgcaggaccaaaagcagccatcttgatatcaccctgttcaaaatttggcaaattcttttgtaaggcattaatgcccgtaggactaaagaaaataatcatatcatagtcaaaccctttcacctcttcttcggtcaagtcgttgcttaccgtacggtacatgacacactccgtgtgctttagcttcttcgcatccaacatatttttcacatcgtcattgtggacactgctcatgggtacgaggtatttttctgccttgtgcttggccataataggcaccaaatcagctatcttgcctgtggttccgaaaaaaaccttacgcttacgatattgtacatacttttggatatagagcgcaatactctctataacacaaaaatatttcatgtcttcaggaatagttacacgcaattctttcgctaaagtaaagaaatggttcaccgcatgacgagaagtaaagacaatcgcagaataatctaagatattaatcttttggtgacggaactctttagcagagagtccttctaccttaaagaatggacgaaagtcgcatttcacatcatattctctttcaatgtcataatatggtgatttttctgtcgttggctttggttgcgaaactaaaatcttcttcatcgtcagtgttcctaataatttattctcaaataatcatttattgtgtcaaacacgccccacatgacaaacatagggatgacttcgagcgcacaaaagtacaaaattatttgcagaaaagagcctctttggcggaaaaagattacgctcaacttatagagtgtaaggattttaaccaaagaaacaatcactatagaataaattactgcactggataccgacaaatcaaaatatgccaaaagcatgacaatgggaaataatatcaccccttccatggagactaagaaaagctttgtcttcatccactggtcatttttcttccaatcaaagaacacccagttagcaaaccagtatacaaaagcattgaataagtagtaagcaaaaaatcctatggcataaagaccaatcacttgataatgctctactacaaaggtttcggaacctaaagtacgagtgtaaaaaaacaaaatcagcgacaacagcaagcacgtttgcaatacaaaaaagaattgcgaacgtatttcgccagctgtttctgtaagactggtggtctctcctcgtggtacatagaaaaaactcttcgcttgtctaacgataaaaggtttagactttgacaaggctatcgttgccaaaataaagcaccctaacaagatacttgtaatgagataatcattggctaccgcatatggaacagggtctccaggcacgccaactcgccctccatccaactcagggtgaaataaggagtcttttgaaaagaacgactctttataatattgagggagattgatctccctaaagcttttacctattggatgtcctggtaaatgtaaggtgtcgggtctgttactccaactaatcttacttggctttatatttgcttgaatagccgagtcttgttgtgctggagtggcatctttgggtaaccatttcaatacttgtgctggcgttggctgcgaagatttcttcgcttttgttggctgaacgtgcgcactatctacccctttgattcgagcaacagagtctctctgcaacatttatatcaacgtgtatgcctgttgtcctcatccatgggacaactgatccttaaataccaaattccttctgaatgcgtgccacatcgtctaacttctcccatgtgaagagttctacctctatggtctttgactcgtggtaacgactggtaaacgttttcttcttcacttcgtattgacgccccatgtgaccgtatgccgcagtttccaagtaaatagggtttctcaaaccaaatttcttttcaatcgctttgggacgtagatcgtagagttcgctcactttctgtgcaatctctccatctgacagttgtaccttgcttcgtccataggtgtttacatagacattgataggcttcgcttcaccgatagcgtagctcacctgtaccaatatttcgtctgagacacccgctgctaccaagtttttagcaatatatcgagaagcataagcagcagaacggtctactttactggggtcttttccagagaaagcaccacctccgtgtgcacctttaccaccatacgtgtccacaattatctttcttccagtaagtcctgtatcaccatgcgggccgccaatcacgaacttaccagtgggattgacgaagtataagatgtcatcattaaacaatcgacgtgtctgttcgtcacactgtgccttgacacgaggcatgagaatatgtatcacgtcatcttttatctttgccaacatacgcgcatcatcctcatcaaactggtcgtgctgtgtacttaccacaatggtatggatgcgatttggtgtatgatcgtcgttatattcaatggtgacttggctctttgcatcaggacgaaggtaggtcatctcctttccctctttccgaatatctgccaaaactcgcatgataagatgtgccaaatcgagcgagacaggcatatagttttctgtctcgttaatcgcataaccaaacatcatcccttggtcgccagccccttgctcgtcttcattttgccgatttacaccacgatctatatcttcactctgttcgtggatggcggtcatgataccacaagaatcaccgtcgaattgatattccgatttggtatagcctatctttttaatggtattacgagcaatggtttgcaagtcaacgtattctttcgagcgtacttcgcccatgattacgacctgccctgtcgtcacaaaggtttcgatagcacaatgtgcatcacggtcgtatgctaaaaactgatctaacaatgcatccgaaatttggtcggaaactttatctggatgtccttctgaaactgattctgatgaaaataaatacgccatattctttattatattgatatctattgaatttgcaaaggtacgcaaaaaaaaatctttgagctcattacgcccttctttttaaggcatatttacatcttttaagtcgcaggttgaaaatgcttttcggtgctataaagacaatgagagcgaacaggttttcacgctgttcgctctcattttcaatcttttctgtaaattttatttgctctcatcgggcaacattgtcacggtgatgtagttgttcgacttcaagaactccttcataaagtcagagatggtttgcggtgtttgtgcgctcaccaatttcttatagtcggaatgggtatctataccatacttccgatacacaccaataacaccattccagtaaccgttggtcttggctacatcgtcggcttgcttcaacatcacggtcttaatctttgccaccatgtcggcatctaccgtttgtctcatatcctttacagcttcttccataatgcttaacgccagctctgtcttctctggtttcattggacagtagcccaacatttggataagatggtagtcatcttctatcgaagccgttgcctgcgcgccacaagtgtaagctgcactggcatcttcgcgtatctttttcaggtacaccattgacaatacctgacccgcaatagatgctctgatatcattctccaacgtataaggcatgtcttcattgaaccaaatcttgtacgaaatagctttcggagtttccattttacgcttgaacgtgttgtcaatcttacccttttgtaagaaggtgacacgctttcctttgacaatattcttctgcgaaggcaggcttgcaatgtattggcagatgagtgggcgcaacgctgcttcatcaaaattaccgataatcgtaaaggtccatgcagccgcattggcggtacgttctttcgccatttccaaaatacggtcgtaagatacatgctgcaagtctgctacctcaacgggtttcagtcgtggattgtgtccatacagcgtggcagtaagcgagtcctgtaatgccttttctggagaaagtgagcgatttttcagacttaccttgtactgttcaatcaagttggcaaacgacttctcgtccttattgatatttgtgaaatacaaataaagcatttgcaacatggtctctacgtctttcggcgtcgaagaaccgcctacagacatcttcttaaagcccatacctaagtccacattggctatctttcctgccagtgtcttttgcaactcggtagatgagaactgtcccaaaccactcacacctatcacttgatcaaagaagttggcattgacataatctttcgctccatagagagatgagccgccaaagccttcacccgacaagagtacttggtctttcttgaggtcggtatgcttgataacaaccgtggcaccattcgaaagtttcaactctgtataacccaagagggcattctttttctcgctcttaatctttccgggtgttggctttttggtaatgagaggttcgttctttacattatctacgtatgccgtcaccttcgcttgcttcgcttgcatcagtgctgtgagcaactcttcacgagttggatacacgttgccttccttctcgttgttgaagttcacaatgacaatgttactatcattcttaggaatgagttgtgacatatattggttcaccgcttcaactggaatggcaggtacgatttgtttcatcaactgataagtatagtcgatggacggcatgggctcgttggtcaagaaataacctaaacattcgttgaaaaactgcgtgttcttgcgcttgtctttgttgctataagccttatccaaactactcaacaggttggctttgtagcgtgcatattcggtggcagtgaagccaaattcaacggcacgacgtgcctctaccactgctgccttcaaggctgttgccaattgagaggggtctttgggttgcgcaaagatactgaacgcatctttcgtcttcgcaaaaatatagttgccatcactggctccagcacccacgtatgggcaatctgccttttgtgctgcctcggtataacggttgttcagcatgttgagagctgctcctctgacatagtcgtagaggatgtactctaccgattgcttcagcgagtcggggtacgtatcgtgcttgaacatcacttgtacattgctggtgcgctgttccttatccttgtcaataatgacgataggttcggaagtgtcgggtactggctcgttcaacacaggagcttggttgactgggttcttgataccaccgaagagtttcttgatcattgcctcggtatgatttacgtccacgtcgccaatcacaataattccctgatttgaaggatgataccatttctcataatagtcgcgcaattccttgggcgagaagttgtctacgacactcatcagaccgataggatagcgcacaccgtacttacttccgggatacagtttgggcagattgcgctcaaacatgcggctctgtgcgctggtacgtagtcgccattcctcgtgtatcacaccacgctccttgtctatctcctttggatcgagtgtcaaacccgtagaccaatcgcgcaatatcaacaagcaagagtcgagcgaactctgtcgagtagtgggcacattgtcaatgttgtaaactgtttggtcgatggatgtgtaagcattgaggtcgcttccaaactccacaccaatggaacgcaggtactctatcaggtcgttgcctttgaagttgtcgctgccattgaacgccatgtgctccaagaaatgcgccaatccgcgctgactttcttcctcttgaatggaccccaccttctgtgcaatgtaaaagtttgcacggtgttcgggccagttgttgtagcgaataaagtaagtgagaccattgtcaagcttacccattcgcacggcagtgtctaccggtacgggcggcatctgcatctgggcatgcaacatacctgcacacaacagaagcaaagcactaaaaagatgtctgattttcataggtgaaataattttataaaatgaaacttcttgtttgtatgcaaagatagaaattatttgttaaattatcaatctgtcgcaaaaaagaaaagaaaatacgtgttaaaatctcattaaaaattaatttcaaaaattagcttttggagattttgaacttgtttttgaaatcaatatgaaagtgaataaagagatggaactcgcaacactaccgaacagacttacgtaaaaaaagtggcttcccactcctgtcatactccttttttttgtacatttgctcggtgaggtgaaggtgttttcttttcacccacctccacatataaaattaaaaaacctactattcgagcgatatgaaaccattaaaattcaacgtaagacttcttgtgacaggactggcaggatgcactgtcacggctaccaccgcaaagaaacctgtcaaacccaacattatttatatcatgtgcgacgacatgggctacggtgacttaggctgctacggtcagccgtttattgagacaccccacatcaaccaactcgccaccgagggcatgcggttcacacaagcctacgcaggtgcccctgtgagtgccccgtcgcgtgcctgcatgatgacagggcaacataccggacacaccaaagtacgtggaaatgaggaattttggaaagacgttccgatggtgaaatacggtgaaaacgaagactactcaagggtgggacagctgccatacgatgcccatcacgtcattgtaccagaaatcttgaaaagccaagggtatcgaacaggaatgtttggcaaatgggctggtggctacgaaggctctgagtcgacccccgacaagcgtggcattgatgagttctttggctatatttgccagttccaagcacacttgtattatcccaacttcctcaacgaatacagtcgtgagcgtggagataccgctgtcagcagattggtgctggacaaaaacatccgctaccccatgtcgggtaagcaatattatcaacgccctgaatattctgccgacttgattcatcagcgtgcgatgaactggatagatgcacaagacaaccagcatccctttttcggtatctttacttatacccttccacacgccgaattggtacaacccgacgattcgcttttgacgtattataaacggaaattctttgtggacaaaacatggggcggacaacctcatagtcgctataacgccaccgaacacacccacgctcaatttgctgcgatgatttcaaggttggacatttatgtggggcaaatcatgcaaaagctgaaagagaaggggttggatgacaacaccatcgtcatcttcaccagcgataatggacctcatgaggaaggcggagccgaccctgcattctttggaagggacggaaaattgcgcggtctgaagcgacagtgttacgaaggcggcatccgcattccattcattgtgcagtggcgcaaccacattgcagctggtacggaaagcgacttacaaattgccttttacgacctcatgcctaccttttgcgagctggtgggagtgaagaactaccaaaaacgctacgccaacaagaaacaagaggtggattattttgatggaatctcgttcgctcctacgctattaggacaaccacaacctaataaacatgcccatttgtactgggaattttctgaaaccaaccagattggagtacgcatgggcgactggaaaatggttgtcatcaaaggcattccacacctttacgacctgtccaaagacctacacgaagaccatgatgtggcagccgaacaccctgaaattgtgcaacgcatgacgcaaatcattcaagaagagcatgtagacagtccgcgctttcctgtcacactgcccacaactgcccaagcatctgaacacaaaaagcaacggaaaaggtgatgtttatgccataaaagttgatgttttagagggtaaaagtgatggttctgctgccacttctcaccatcttcttgcttcgtctttcttcttacgaaggcagcaaagaggctttctttgttgcgcctttaggggttatgctccttttaaaggtcttcgccgttggcttcattatacccattttcgtaataaattacaatataatattcttcgcatttaaatgcatgtgctttaatagtaaaccatacatttctttttcctatgttttcgtcgtcagggagctgataaaaattggcttggtattgctttttattaatgctcacctcacggtaaatgtagtctttgtcggtaagctcttctgctttaacgaccttatatcttgggttgttagaaaactgattaataaggcggttgtattgtgttttaatttgctctttgtcataactatctttgtatgttactacaattcgccaaaccttgttcttattagtctgcactaaaatcgaaacatctttcccattaaactgcccttcaagaccatcaccatatttttcatctgtaaagcccttagcctttagcttttgtatcattgctttgcgactgccgtctacgggtattcctaaaaacttggtaacctgcctttgtgcaaaaatagatagagagagcattagtaaaaatgcaagagataaaatctttttcataatttatagtttgttagttaataaacagagaaattgtaatatgttataaagcaaagttacataaaacggctgtaacacgtgtagggaagagagaaaaagtttggataacctattttttattagctaaaaggaagcctttccgcccactttttcttataataaccccctttaggagatgttgtagcctctcagtgttgtgtagtggctcatctctaaagggggttacccgaattaaagcgttcctcacttatgcagaaaactgccgaccgcagcaacagccacacgagcgaaaataattcagttaccgaacattgctccatcgttacctatggcaaaatcgggtaacggattggtaactgaacttctgcttaaacctgcatattataactctttttgaaaagagcacttctatgcaaattattccgtttccagctcattatcagtcagtttacaccaacttggatatttcttcattttcgctgattagattgcctctttaagtcgctgctctaaacctacaaaacaggctatattggacagcaaaacagtctattttgctcaccaatatagcctgttttgtaggcatatatctttcagtttcaaaaccaaagggatgacgattgtgccgctccctcaaaatagattgggcgtccagtcttcaagacgagacaaggacggtatgcgctctaccccttacgaggtttgcgacgtgcccaaccttcttcggagaaatcgggggtctcgcccttgaatttcacctcaggctgctggaagaactgtcgccagtcgccggtatcttgctgctgataagaggggcgtttcgcattttttccattcttgcgtccgctctccgcacgtctacctgcagcccttccgccacctcttgtggcttgcgctttgcgcccatgaccctcttcgttggcatcattgcagcgcacctctctacccttgtaggtcgctcccgacaaagaacgcatcactttgttggcatctttttcgggcacttcgatgtaggatatttttcccaacaggtcgatatgtcccacctgctgccgaccttttacatgctggttaataaactgcatcacctctccgggatagaatccgtcgtccttacccaagttgatgaacagcctacgataacctctctcgggtgtacgagagcggcctccgcctcgctccgaacgagcttttctgccaccacgcatacccttttcctcacctctgtcgccacgtttgagcgagggtttctctatctctggcgcattcgcataataagccaagaagcgtccaaacgtcaaactgacaatcttcttgatgatgtcatccttgtcgacatattcaaagtgtcggttaatttcgaccataaaaggagctatctgctcttcgtcaacatcaatcttctcgatgtcgtgcatggctttatacaactgcttggcgcaaatttcctgtgcagtaggcaatgtgccgtccacaaattccttgccgataattttctctacggcacgcactttggaacgctcacgggtgtgaatgatgcaaatagaagtacctttcttccctgcacgtcccgttcttccgctacggtgcgtgtaattctcggtatcatcgggcatgccatagttgatgacatgcgtcagatcgtccacatccaatccacgtgcagccacatcggttgccaccaacagctgggtgacgtgttggcggaacttctgcatggtgaggtcgcgctgttgttgactcaggtcgccatgtagcgcctctgcgttgtatccatctttgataagtttgtcggcaatttcttgcgtttcaatcttagttcggcaaaagataatggcaaaaatgcgtggatagtaatcaactatgcgcttcagtgccaagtatttgtcacgcgcattcaccatataataaatgtggttcacgttttcggcaccttcgtttcggcttcccactacaatctccttgtagtcacgcaagtaggtcttggcaatcttttctatctcgttgctcatggttgccgagaacaacaaggtgttgcggtcgtcgggaacacctgctaaaatggtattgatactttccgagaaacccatgttcaacatctcatcagcctcatccaacaccacattgtttacatggtcgagctttgctaccccacggttcatcaggtcgatgagtcgtcccggagttgccacaatgatttgtgcgccatgtttgagcgcatgaatttgggtgacgatactggcacctccgtacacgggttctacgtgtagattcttgatatatttagcaaaatccttcaagtcatcagcgatttgcaaacacaattcgcgtgtaggacttaaaataatggcttgcgtatgcttactggcaacatctattttttgcaaaaggggcaagccgtatgctgccgttttacctgttcctgtctgtgctaatgcaattacatcgttcttgtttcccaacaaataagggatgacctcttcttgtactggcatgggatgtacaaaccccagctcctcaatggcgcgtcgaatctcttcgctaacgcctaattcttcaaatgtcttcaaattcttttctttaatcgggtgcaaaggtacggctattccgtggatgcacaaagtaaatgcacttatttctatctattgtaatacaaacattaacattcagcattgttttgattatcaatgctaaacaatcacgatacggcggcactacttcctgcagacttcaaagcaacaaccaacgttttgtacccataataaacacaaaactaatcctcctattttattttttttttgcaaagctaatcctttgatattcgctgtttttcagtacctttgtcctaaattaggaaaatacgatgacagatatatgttgtttgggtcatatcacgagagataagaatacgacacataaacagaccgtctccatgtcgggaggcactgcttattatgtggcttatgcttttaatcatctaccctcgaaggttcgttttcagttagtaaccaaagtgggtagcgaagatgtgcctgtgacacaagaaatgaaagaggcgggtattgacgtgaaagtgtaccccagtaaacacactgttttgtttgaaaacatctacggagagaatcaaaatacccgttcacaacgtgtattagcgaaggctgatcccttcaccattgaggagatgaagccattaacgggaaagatataccacatcggctctcttctaaatgacgatttttcacccgaggtagtgaagtatttatctaccaaaggacaaatctctattgatgcacaaggttatcttcgagaggttcgtggacaggatgtacaccccattgactggaaagacaagctggaaattttggcatgtacggacatcatcaaggtgaatgaacacgaaatggaggtcatcacaggactgaaaaacgcacgccaagcagccaaacaactacacgcatggggtgtgaaagaggtcatcgtgacactgggaagtgaagggtctatcatttatgccaacgaccgtttttacgacatccccgcctatgcaccgagagaagtagtagatgctacggggtgtggcgacacctactcggctggctttttgtactgtcgctcacagggaataggcttcgaagaggcaggaaagtttgccgctgccatgtgtacactcaagttagaacacagcggaccttttgacagaagcattgaagaggtgcgagccattattgaaaagcacgagaaataagaacacttcatcgctggcaaagatcgaacaacgccacttggttttattggaaccaagtggcgttgttcatcaaaaccccttttatatcaagtaccttatatattcatcatcataggaacgacatatttagccaagcaataaccaccgccaatgagccaaacaaataagatggctgccaacagaaaaggcttggctcctgccttcttaaacttgtcaaaactggtttcagctcctaaagctgtcatcgccatggttaagagaaaggtgtcaaactgattaatccattcaacccaagaaacgggcaacaggttgaacgaattgaacccaatgaccaccaagaacagaatggcaaaccaaggaatggtaatctttgccttagatgttccctgtccattgttcttagaaagatagcgagctgtgttccaacccaaaatcaacaacacgggaacgagcatcatcacgcgaatcatcttcacaataatagcagaattggaaacatcctttcccatggcattggcagctcctacgacatgggctacttcgtgaacagtggcaccggtcatcaatcccatttggtctggcgacaagtcaaagatgccgttgcgatacagcacaggatagagaaacattgacaacgtaccgaatataacgaccgtagaaacagccacagcggttttataaggctttacctgaagtgcagattcggctcctaacacagccgcagcgccacagattccactacccacagaggtgagcaaagcaatacctcgatccattcgcaacagctttcctatgaacactccgccacacacagtgaccgtcactacgatggcatcgataacaatagcaggcaaacccactgccgtaacgtcctgaaatgtgagacgaaaaccatagaggatgatgcctatacgaaggatacgtttggaacaaaagttgataccaggcacccaagtgtctggcaaattgtttcgcaaactgttggcatagagcataccaaggatgattccgacaatcataggactaaatgacagattcttcacaaacgccatgtcaccaatatagaaagcggcaagggagaacaaagtgattaggagtacgccatgtagcatactacttcttttttcactaaacatagacttaaaactttttattattgagttgcaaaggtacaaaatgttcccttacaagaaacaggctttgtcaaaaaaagattaaagaaaatagagttgccgccctcaaggctattgctcatcctcctgttcctcgctgtcatcgtccctttctttcatgtttcgcggatgatgttgcaatatctcttcacgcaaagtggtagtatcaatgtgcatatataactcggttgttccaatgctctcgtgtcccaacatggcttgaatggcacgcaaatccgcaccacctttcaacaattcagtggcgaaagaatgacgaagggtgtgaggagaaatcgtttttgtaataccagctgctacagcttgtcgcttgagcatgatgagaatcatggttcgagtgagatgttttccgcgtcgattgagaaacacataatcctcttctccttgctgtatcttcattaaattacgatccacaaaccaatattgcaattcccttatcgcctttgaagaaattggcaccaagcgttctttacttccctttcccatgacacggacaaagccttcctctaaatagagattggaaagtttgaggttcactaactcggaaacgcgcaaaccacacgagaacaacacttcaataatcgtcttattgcgctgtccttcgggcttggaaaggtcaatactcttctgtatttgatcgatttcatcggtagacagcacctctgggagacgttcaccgagatgcggagactctaataattcggtgggatcttgttctatttcaccagatagcaacagatatttgtaaaacgaacgaatgccactcaagatgcgagcttgtgaagtgggtcctatttggtgttcgtgtaactggactgcaaaatgctgcaagtcttccaattgcatttctaaaggattcatctcttgctgttcgcagaaggataacagccagcttaaatcgttttgataagctgccaaagtgttgggcgaataattgcgttccagcttcagatagcgggtataagacttcacaatatctgtgattgttttcttgtcactttccatttttatgcgtatttttgcaacatacacatccctttgcattcacgcagatgacttctgtttagcaagacatgtatgaacgatacaaagataactaaatcatacgaattatgaaaattcaaattatcaatggaccaaacctcaatctgttaggaagtagagaacctgacatctatggacagacctctttccaaactttttttgaggacttgcaaagccaatatccagcgatagaactatcctattatcaaagtaacattgaaggagaattgattgataaaatgcaagaagtaggcttcacctacgacgccattattctcaatgcgggtgcttatacccacacgagtattgccttgctcgactgtattcggtctctgaaggcacaagtaatagaggttcacatctccaatgtctattcacgggaggattttcgacataaaagcatgatttcatcggcttgcaaaggcgtcattgctggctttggattgaattcgtatcgattagcaatagaggcagtagttggatagttgacgagtgtacgagttcacaagttcacgagtgaatggcttgctatttgaatactcgttaacttgtcaactcgtcaacttgtcaactaaagaactcatcaactaaagaactcatcaactcatcaactaaattctccccatgaatactgatttagaaacctatcttctctcgcacatagatgccgaaggagactacctatatcaactttatagagccacaaacatccataccgtgcatggacgtatggcaagtggacatttacaagggcggctgcttaagatgttcgtagagatgatacaacctaagaatatcttagagattggtacctttagtggctacagtgccatttgtatggcagagggactgggtgaagacgggcttctttatacgtttgaaatcaacgatgaaatggaggactttacacggccatggatagaaaacagtccagttgcttcaaagattcatttcatcattggcgatgcaaacgtggaagcgcccaagctaaatatcgtgtttgatatggctttcgtagacggtgataagcgcacctatatagagacatacgaaacggtattgaaactattgcgacccggtggattcattcttgccgacaatacactgtgggatggacatgtgatagatccgcattatcaacatgatgcacagacacaagggattgctcaatttaacgatttcatcgcacaagatgcacgtgtggaaaaagttatcgtgcccattcgcgacggtttgaccatcatcaggaagaagttaaacgaataacaacaagcttctaaaaagacaaacggattggtggttacttgataatccttgactttccaaacacataccgtgctacatgcagcttttgtaagatataggcaacggtgaaacttccgactaccgtaaacagcaaagccaccaacatgaaaagcattcctgacggttcgaacaacagataggactgaaacagcttggaaagcaccgtaaacatgggtgagaaaagcaacaggataagagaattcctgccgatgaaaagggcgatttttgccatacctttgggcaaacggggatacagccaaagcaagaaagagatgacgaaatacacgatgagcatgcctcctatggtgtgccgctgaagcgcatttggcacgcaagtggcaaccaatacaatccctatgaacgaccaccatgcagggtggaatgtatcaacgaaaggtcgatgatacagacgcaacgcgacacctacacaaaaatacacggcattgatccacgtaacaagtcccaaaagtgccaacacccacaaacatagcaacacgcccaacagcatccacacacgatgatgactcgctaattgggcaacaacataagtaacaatgccacacaacatcagcgtatgcaggtaccaataaggtcccaacgggtgtaaaaacagcttatcaagaaacaagccaaaggtgagttgctgaatatgctcacgaatgggtaagacggatgccatgaccacatacccactctccatcagcaaataaggtacgaaaatccactgtatatatcgcaagaactgcggaacaggcttctgtacatggagcagataacccgaaataataagaaatccaggcatgtggaacgtgtacacaaaagccttggcaacaggataacgattgccaatatagacaagatgaaagactatcatcaagagaataaacacacacttgagaaaatctaactccaatattcttgcctgaggttttgttggaggagttgtcaccattggcacaaaaatacgaaaaaagatttaattgtcaactattataagtatctttgtctttcactaaaatgatacacccttaaaatagaagttttatgcaagaaacaagacaaaaccgcattgcaagattgcttcagaaagaacttgctattatttttcagtcacaaactcgagctacacatggtgtcatggtaagtgttacccgagtacgtgtcagtcctgatttgagcgtttgcacggcttatttgagtatctttccctccgaaaaaggcgatgaaatcttagaaaatatcaataagaacaacaaatccatacgctatgaattgggttcgagaatgcgcaaccagctgcgaatcattcccgaattacgctttttcattgacgacagccttgattacattgagcatatcgacgaactgttgaagaagtaaatccgcaaagtttcacaaaatcagtgaacaagtaacccatgaatttcccgtttttcgtatctcaccgctaccttttctccaagaaaagtaccaacgctatcaacgttatttccatcatctctatgataggcgttgccgttgccaccatgtcattggtcatcgtactgagtgtattcaatggatttcacgacttggttgcatcgtttctgacaaactttgatccgcaattagagattgtcccaacacaaggaaaatcggcagatgcacaagacaagctgttgaaacaggtgaaacaactaaaacaggttgcggtatccaccgaaaacgttgaagagatggcgattgccatgtatcaagacaagcaagccatggtaacgattaagggagtagaagacaactttgacagtttaacccatatcaaagatattctgtatggagatggagaatatcagctacatgctggcaacttagaatatggtgttcttggcatccgattggcacaatcattggatgtaggagcatcgtgggacggctttatcaagatttatgcgcccaaacgcataggtcaattggatatgtcaaatcctggagacggatttgtcgttgattctcttttatcgccaggtgtggtgttctcagtaaatcaagccaaatacgacaaagggcatatcattacctccatcgactttgcacgacagctgtttgatatgaaagggcgaattacttcgttggaactgaggttaaaagcggggagcgacctcaaggagacacaaaaggaaattcaacacatcgtaggcaataaatacaaggtattggatcgcttcgaacaacaagcagacacttttaagattatgcaaattgagaaaatcattgcctatttcttcttaacttttattttggtcattgcttgtttcaatatcatcggttcgctttccatgctcatgattgataagaaagaggatgtgataacgctgcaaaacttaggtgcgaacaaccagcaaatcacaaaaatattcctgtatgaaggacgcatgatagccgtcatcggggctgtcgtcggaattgccttaggactattactgtgctggcttcaacaaacttttggattggtatcactgggtcatcaagcaggcaatttcgttgtgaatgcctatccagtaagcgtacactactgggatgttgcctttatcttcctaaccgtaattattgtgggctgggcagctgtgtggtatcctgtgagatatttcagtaaacgactgctcaacgctaatcaataaagaacgtagtaagtcgctccgtccttgcatgacgaacattgaacatccaaaccgctgtgcctttacagcaaacctactaccccttttcagctatttccacaacattcttgcgccttagctacaaataggagaagtgtgtgagataacaatattgtgtgtcatcaaaacggctttttcttttcagaaagatatttcattgtaaaaaacaagctttgttctactgtttcaacaacagctctaccgaatgaaatcaatcgcactgtttacgtctttcgctttttgttgtttcatttattgtaacaacacggacgcttctatgatagaattgtgacttttacattcttatctttttggggaaagacatttgaggtatttgtcctattattttaccaaaaatcgaccatctaaaatcttcaaaatagaaaaaatcaataggcaaacgacatgcaaaaatcgtctgatttgaacaaaataaatgcctcttcaagctaaaacatcgatttaacggtcttagaaacactctttagagctgttattcacatgacataagggcattaaagcatgcaaataagaagcttatctcactgctttagtcgaaaaataggggtaaaaatggggataaaaagtgacgacttaaacgtagcactctcaatatcaacaagttatgaaactttctcataactcgcgtatttgcgaccaagaatgcggttggttgatttcacgcgagttttgagaaggtctttgtaaagaaaattcagcattaattattcttccatgctgcgtatcactaactttacaaacgctgccttttggacgttttccgtggtgaaaatatcacgatattgagaaggaggtaagcattgctatccatacttacctcctaccttataaatgttatcgcaccactacttttttacctttacaaagatagactccctgctgaagtttattcgcatctgtacctacctttacgccttgcaagttgtaatatgcttcttgggttgcatctgccgccgtatgaggaatacttgtaactttctcggcttgcttttcaaaggtccaaatggatgctccccaataacggggcttgagcaacactgtttggaaggcatcgggattggtgtaccaactataagtcccagatgcctcgatgatattaaaacccgagggaccttcatcagtcgtataaggagaaagcttccaactgtaagttgtgccagcatggatggtttgatctatcacactacttcccacacaggcaggtacttctcctaccctgctaataattcctaccgttccgtctgcattcttcacaaagcgccataacaaatcgtctgtggtggcggtggtacgcacgggataaacgttgttgtcagcaggattgagcttggcataataatcggtaaaatagccgttgcgtatcttataccagtacgactcgtctaaagactcaactatcgaagtgcggggaatggacaaaaactgctggtacaaggctgcatattccatgtattcggcatggctcacggcttttccgtcggcaagatgtgcatgggctggtacgattaccttcgcattcaggaaggacacagcctcatcggtgaaactaccgggttggtgaggaacattgcctgctatgagtttgtcacatttcttaaccaaagcttccagcaaaggcttgtattgagtaatccttaccaatcgccacgtgccgggattgcagagcatgggatcatcgaaagaaaccacatcgccagaaggatgtccaaacaagcgaggtgtgcttcctgtcaccgtagcagaatagttgttggcattcgtcatcaccaaagcacctgccacataatcgtattgctttgcgggtacggtggctttgtcgagacgaaataccgttgcctctgtggcattcatccgcactgccttgttataatctgccagttgtatatactgctgggtgacggcattacgtattttccatccctttcctgtcttgacaaactgccacagttcttcgggttcgttttgcggagtgtagtggaaacgcacaccttgctggttttggtacatcgttgaacccacataacgcttcttgtaataggtagatgccgatacgatttgatacacctcattttcttgcggttgaactacatcggcaactttgaagtgtgcaatggcattgccaagcacttgtacgcctgccgtcccatcctttgctttttgcaaggtttccgataaaatctgatgctcttcagctgacacatagcctgcttcgccgggcgtggtagtgtcaagcaacgtttgcgcttcttggattgccgtttgcaaagcgtcttgattgggctctatgtaatgacgggcgtagacatactccatgcggtcgagcagctcatcatgtttctgcaatcgctggtagaagctcacccagttcttcgtgctttcgggcaaccaccctgtctctgccaaagccaacagacgtggtagcaactgatactccaactgggtattgtcgttacaggtctcggtccacatgtttccttgtacacctaagcaatagtcttccctgccgctaagtgcgctcactgggttgacactgtacacagtgggtacgctgttcacgtaaccatcaccccatccaccttgataaatttcgttgacatcggcttggctcttcggcacttgcatcatgtcgaaatacaaagactggtagggcacaacgatactcttgaagcccaagtcggcagcttctgcactcttattgatgtgattccaagccatgatgactggctttaccttgttggtagcaggccaatgcgccatcaactcgtcccacacgatgattcgcttgccgtaattatcatacaaatattcacccaacagttcgacgagccacgactgaagttgctctactccactaagtccttcagcccgaactctttctaagcagtcggtattgttgcgccactggtcggttggacattcgtcaccgcccaagtgaatgtaaggaccggggaaaacagttgctacatgtccgagtacacattttaagaagtcgatagtagaatccttgcctatgttcaacacatcttttgatataccaccaggtacccgcacacgataggtcttggtggggtcacaactaagctcgggataagcagccacggcagctaccatgtgcccgggtaagtctatttcaggaataatcgtaatgtttctctcctgcgcatatttcactacttcgcgcaagtcatcaagcgtataatacatcccctctccatattcggtgtcatcgaagaactgctgactaccacctgcattcacaaacgaaccagcacgcttgcttcctacagttgtcaacttgggatactctggtatctccacacgccacccttggtcgtcggtaagatgccagtgaaatcggttcatcttgtaaaacgccatgatgtcaaggatgcgcattacttcgtgcttgtcgaagaagtggcgtgccacatcgagcataaaaccacgatggtcaagagctggcgcatcgttaatgaacaattgcggcaacgtccaagtggcaccactcacaggattcttctcataaaaggcattgggcaataactgcttaatggtttgcagggcgtaaaaatatcccgcatctgtcttggtttttatcagtacacccttagcatccaccacgagggtatagccttcatcgggcagggtgttgtctatgaccacgctgatagcgttgtcctttctgtcggtcgtacaaggctcgacattgagctgaataccagccgttgctgccaattgattggcaaattcggtggcttgctgctgggtaacgtcattcgtataagcaatggaatgcagttgactgagttcgaatgtctcgtcttcaacaagggtaagcgaagagggataaggtatcaagcgaggcaaattgcgatacgcctccaatgcactttcgggcgtgaatgacagtggattgttgacatcgccaacgtcccacaaacccacttcgtgccctacaccaggaccttcccattggttcagggcaacggcaccgttgtcgtagggtgtcacttcatatttaccactggacaaagatttgattttcaacttagtagcttggtgcttagaggaggcgaaagccatgccttgtttggcggtgctgttaagatataggtgtcgtcctgtcttgtcagtaagcgtgaatccggcactctcagagccttctatcttccacaattgtgcaggttgtcctgtcatagagtgggtttgcaccttgacaccatcgccttgagatgtgagtacattttgactgttggcaaactgaatgaagtaccaaaacgtattgtcagcagtactgatttttgggaactctgccgcttgcaggttacacaagttgcccaacaacaaaaaaagaatagtgtatagcgttttcttcatacggttaaaaattaatgataaatgcctgatgttgcatcgaaacgacatgaatggcatttctttgaatttaatatgggcacaaaaaaaggcataagccttatttgatgcctattttcttgccatcatgaatatagacacctttcatgggatggtctgtctttcgaccttgcaaatcatagtatcccttggaaataggtgccgaatccgcacttatcacaccatcgataccagttaactttttgggctgaaacacgcgcacataatcaactcttgactcatagacaaagtccatatcgggattgcttgcccattgaccattgcccacactttggttaagaatcagataaaagggcgcattgaaaggccattgacctttttgcaagtcatcatcattgctcgacttgtggtatcttcccttctctactccgtctacataccatatcaactcttcctcgttccactccaaactgtacacatgaaaattgtctacatccacatatcctgaaaagctggaggtaggattattgcgctgatgcaagttgtatgtccaattggagtgtacggtatgataagccttattctccatgttgatagtttcaaatatgtctatttcgcctgcattgggccattttgcgcatggtggctgtggtttcatccaggctgcggggaagtttccagcgtgtcgtatggtcttcattcgcacgtctactctaccatatttgaacgaaaacagatcacgtgtttccatagcacccgacagcatatctgcagaatctttcgtcttgtcgggatttttgaaacatctcagcaccaaacaaccgtccttgatgaaagctactttaggatcagaactaatgtaccgattccatgctgcatcatatcttatggctggtttccaacgcttaggatcaggaaacgtgccgtctgcctgattgaactcgtcgttaaaaaccatcacataatcgtcttcatccgtctcgttttgccccatttttacgaatgaaggttgcagttgcaagtcgccgtcaagcaaaccgggagctatatcaagcagtccatatcggcaggcagaagcatccaagaccgtctgtacatactgcgccacgccattgacgagcgagtcagttgcagcaaggttgccgtgtcgtaccttcaccgaaccgagcttgaagcccttgtcgggcttcatttgcacggtgaaagactgtccgtatggcaccttgatgccatcgacagtttgtccttcgagcgtcaataccgttccgtttttcgatgaacaagttacggttccttgctcgccatggtgtacaaacaaccgcacatctactatggctccaccgttattggcgatatgattgcctgccgaagtgttgccttcggggtcgacgttgtcccaatctatcttgtaccgcatcatataatgccccgtctcaagattatcaggaagggtgaatttgggtgcattgagtctgtcgaggctttgcaaatgctgcccatcactgctgtaaggttgcccgttgcaagtggctgcactgaagctcaccagttcgttatcggccgtgagttgtcccccatcgagaggctgtttccaattgaaataaccattcttgttcttgtccacatacacaagggtttgcatccaaccgccactgtagttgacaccaggggctacttgtgtgccagctgatgccacaaaaacgtgctgcgtcaaatcgtggtacacgtttttagggttgtcgatatttacttcctgctgattcagaagcacagcgctaagccttctggaagcgtgcttgttgggttggttcttgtcgaaaccaatgctgtagaaatcgtttgcttctggagaaccaatgctcacaaacaatccttctaccacaacatcaccgtcaataagctcagcaggtaaggtatagcaatcattttcgtcgaacgacgacttcttcacaatcacgtcacgatattgagctacgccatgaataaggctatcgccttgttgattgtagccatgtctaacgcgtattcctttgtaagtaaacccgttctcaggccgcatcttaatggttactggtttaccaaaaggcacatccttgttgagaaaattgccttctacatcgaacacttcgccattacgctgtgcattcgtgatgcgcacttggtcacggtgaacattgagtcggatgtcgacaatagccccaccgttattgataatgtggttggaagaggctatatttccgcccgcatctatacagttccagtcaaccttgtaacgcatacggtagaatcctggctgcatatcggcaggcaaggtgaatgctggtgggttgagaacattgcacttatcgccagaaatagcttgtcctatagaattgaaccctttcgagttgtctttgggattttgtgcataaaaggaataagcaaccacgtcgctgccttgtacaggctttccatcggctgccaaattcgtatcaaatcgcccgtctctgccatagtctaagtaaacatatccatgcatccaagtgccgttgtatttgaaagctggctgaagagtttcgcctgctttggcgatgaaatcaacttggtcgatagaactatagacaggcgtttgcttggtgatactgccagccaccgatgcttccttgccgttgagcgaaatactgagcaatcccctatcggtacgagtgtaatgagccttcttgttaatattcaagggatagtcttcacgctgggtttgcgtgatgggtttgtcgttcacctcaatgcaatcaatgtacacagcaaagtcttcggtgagcatgtgtggagactcattgtcgggtactacaacaagcgaatgcacgtccactccctccgctcctttgataggaaacacggcatctacccattggtcaggttcaactttgttggtagacagcacccaaaactgttccgtctcctttgattggtcgttgcgctcaacgcgtttacccaagccgatgagcatcactcgaccagccacaggtttgtgtagcatgacgtgaacgtactgcaaagtaggcttgagtttcaacggttgttgaagatcgatgcgtgctccgaaggtgttagaagcgaatcgagagcgttgaaaggccaatactttggctgatggattgggggctacgcctaatatctcatccgtctcagtgtgcgggttggcaatgataccgacattgccttgcagttttcctgtgcggaaaggtgagtgttcccatgtatcataaacgccgattgacttgtagtcttgttgctcaaaccctatagactgagccgttgttgtgagtgggaataatatcccagccattaatataaggtgtttgatggttttcatatattgtgtttgatgttttcgttatctattgttttcattgttttcaaactgccttgtgaactaaaatacactcactgtatgcagagttgggcacgccttggcgtcgtcaatgactattctcagagccttgactttgtagcctgtgccataactcttggctgtcgaaccgttgagaggaacaatgcgtttatatccaaccgtggtggttgtaacaccctgtgccacgggcttaaaggtttgtccatcctcggaaatctctaaatggaatttgcgaatacgctgtcccaaacgaatatactccatgagggaaacatatctaatggtttgtggttggttccacgtcagggtgatagtaccctttgtcacaccgtcactggctgcccaataggtatcttttttcgcatcggtcatattgcttggcttgtaatctctatttgcaccattgccacgctgatcggtgactgtgacggttgctaagcgcgcaaggtcgtttccgagtctttttctaagcaggtcacctgacgccttcaatgcctttaccgtagcgtcgggcaacagtccacacttgtcgggtggacagttaagtatcagggtggagttacgtcctacagtctcaagatacatctggaaagtacgctcagcactcatggggcgttcaccttggtgccaaaaccatcccttatcggtgaacttggcatcactttcaccggagaaccatatccatccattctccgttccgtacataccattcccctcgggagcatatcctctgtcctcgggactccagttggtttctccagcccatccttgttcattacctatccaacgggcttctccgccaactccccaaaggataatgtcggggcataccttatgtatggaatcacgcaggttgggcacatcataataagtatctcggtctacactgacggttttgttgcgtcctccgtaatagccatcgccaccattggcaccatcgaaccacatttcaaattggtcggtaccatactgcgccagctctgcacactgtctaaggaacacctcactgacatatctcggcgtaccatagagtgcagagtttcgatcccaaggtgatacataaaaaccatatttcatgtccaacgccttggcagcagccgcaaacgactgtggaagattgagcgacctgccattctcgttgcccgcaccaacaacgctgtgcttagtggtttctgtgggccacaagcagaatccgtcatggtgtttcaccacagcgatgccgcctgtcatacccgcatcacgtactgcctcaagccactgacgcggatcgggcttgtcagtaggtgcaaaaaggctctcggcttcattaccttttccccactccatatctgtatatgtgttcataccatagtggaaaaaggcgtaatactcggtttcctgccatttcatttgtcgctctgtaggcaatggaaacacgggagcaggttcgttatcgggattggataacgactgctgcaccagccggaacgctgactccgactgtgcttgcacggtcatgaacgctgcggtcatggccagtgtcaataagtagtttttcttcataaaaatacgttgcgacagatctctcattgccgtaaagaacaattaagcgaccctttgccgcatcatggagttaataaatattatagctattaaatgatcgctgatgatggttagttccacaaaattacaaaaaaagttttagttttgaaacaaaattcaattgtttgtgagcaaaaagatatgaataatgtatacatattcgtcatttatctcagattttttcgtttgttgcaaataaagaggatgaaacgccatccttgtctgacagcacctaaaaaagcctgtacactttttgtagtatacaggcttgaattatatggacagacgacagatcctcacgtcttgaagcaaattaactgcgatacaacgcctcatgaatcatcgctctatccttttccgaggcacatggtacaaaaagcaagcgatgttctcggatgttaagtttagacaagaaagcgattagtccttaagctttgccgtaatgaattcgcggttgaggcgagcaatatttgcaatcgactcattctttggacacactgcttcgcaagctctggtgttagtacagttaccaaatcctaattcatccatcttcagaaccatggctttggcacgcttggcagcctctggacgaccttgtggcaacaatgccaactgactaactttggagctcacaaagagcatcgcagagccgtttttgcatgctgcaacgcaagcaccgcaaccgatgcaggtagcacagtccattgcctcgtcggctttttctttcggtattaggatagcattagcatcctgtgcctgtcccgtacgaatggtgttgtaacctccagcagcaataattttgtcgaaagctgcacgatctaccatacagtctttgatgacagggaagcctgccgaacgccaaggttctacagtaataacatctccatcgttgaaacgacgcatgtataactggcaggttgttgcgccacgctctgtctttccgtgtggcactccattgatatagagtgagcacataccgcaaataccttcacgacaatcgtgatcgaaaacaaacggttctttaccatcctctatgagttcctcattgaggatgtcaagcatttcgaggaaagaagtatcgtctgggatattcttcatctcgtgagtatcaaaatgtcccttgtctttaggaccgttctgacgccaaaatttaattgtaaaacttatattttttgacatggtgtttattttttagttgacaagtttacgagttgacaagttgacaagctaatagactttttttcaatagttacagaaattgatagatagctatattttccaaatgcaacggtttgataatttttttgtctattgttgttgacttttaatgagtgctgttagcatttttaagacttctatatttaattgataaagttcttgataaacctccaaatcaataataaagcccaactctttgcagagaataatttgagtatccaattcagaagctgaacccaaagcaatatataagaaatgtaacaactcttttgttgttgctctgccataaccttcggcgatatttgaaggtattgaaattgcagctctacgcatttgagaggaaattcccatcagttcttcatgtggaaaacttctcgttacttgataaatctttttcacaagaatgatgctcttttgccagacaatcaaatctttgtgcgtagtattcatatcaattcgggttacatattagttataggaaaaccttactaatccactatcatcttgtctactcgtcaacttgttaactcgtcaactcatcaatttaattcttataattacgtgtttgtaccttgatggcctcgtactcgagtggctctttaatcaactcgggggcggtttcatcattattctggtacttccaacaacctacatagaaatagttttcatcgtcgcgttttgcctctccctcaggtgtttgatactcctcgcggaagtgacctccacaactctcattacgagagatagcatcgtaagcaacgagttcacccatcaataagaaatcacgcaaatggatagctttatccaactctacattcagaccttcctttgtaccaggaataaagagattggtgtaaaactccttgcgtagttccttcataagcttcagacccttttcgagtccctctttggttcgtcccatgccaacatattcccacataatgtgtcctaattctttgtgtatggagtcgacagagcgcttacccttgatgttcatcaaacggtcaatctcttcttgcacgtgcttttctgcctcttcaaactcaggaagatcggtagaaagacgtggccaaacagcttggtcggctaaatagttttgaatggtgtatggcaacacgaagtaaccatctgccaaaccttgcatcaacgctgaagcgcccaagcggttagcaccatgatcagagaagttgcattcaccgatggcaaacagtcctgtgacagaggtcatcaactcataatctacccagatacctcccatggtataatggatagcggggaagatcatcattggtttgtagtactttacaccattgatttcgttcgccatgtcaccagggaatacgtctgtaatctcttcatacatctcgaagaggttgccataacgttgcatgatttcatcaagtcccaatcgattgattgactcagagaagtcgaggaacacagccaaaccagtattattcacaccaaagcccttatcgcaacgctccttcgcagcacgcgaagccacgtcacgaggcactaagttaccaaatgctgggtagcgacgctccaagtagtaatcgcggtcctcctctggaatttcccagccttgtttcgttcctgcctgcaatgccttggcatcttcaatcttcttaggaacccaaatacgtccgtcgttacgcaacgattctgacatcagtgtcagcttcgattgcttgtcaccgtgtacaggaatacaggtagggtgaatctgtacatacgaaggattagcaaaataagctcccttacggtagcactgaacagcagcagtacagttacatcccattgcattggtagaaaggaaataagcatttccatatccgccagtggcgattactacagcattggcagagaatctctctaacttaccagtcaccaagttcttggcaatgataccacgagcacgcccgtcaatgatgactacgtcctccatctcgtaacgcgtatagagctttactttgcctgcatgtacttgacacatcagtgatgagtaagcacctaacaacagctgctgacctgtttgacctttggcatagaacgttctacttacctgtgcgccaccaaacgaacggttggcgagcatgccaccgtattcacgagcgaatggtacaccttgtgcaacacattggtcaatgatagcattcgacacctctgccaaacggtaaacattagcttcgcgagcacgatagtcgccaccttttacggtatcatagaacaaacgataaacagagtcaccgtcattctgataatccttagcagcattgatacctccttgtgctgcaatagagtgtgcacgacgaggcgagtcttgaatacaaaagttgaatacattgaatcccatctcgcccaatgaagcggcagcactggcacctgctaagcctgtaccaacaacgatgacatccaattttaatttattctttgggttaaccaaacgctggtgagccttgtaattggtccacttctcagctactggtccttcaggaattttagaatctatttgtgtcataatattcttccttatctattataagattaaacaattacgcacagcacaaactcggcgcgcagccaaatgcaaatgcgagaacaactacaaggaaaccaagcattaataatgtggcatatacctcaccgataatcttccatcggttgaaccaaattttattgctgattccaagggtttgcatagcactccaaaaaccatgagtgagatgaagccacaaagcgcacaaccaaatgatgtacaatacaacatacaaaggctgtgagaatgtttcctgaatgtaaccaaaaccatcagcaggattgcctaacggatcggcaatgtgaaagatttcggcaaacatcatattgtaccagaaattgtacaaatgaagaatcatacccaaaaccacgatgagtcctaaaaccaacatgttttgagatgcccactctactttggaactcttttgggaaacagcataacgctcgttccctcgagctcttcggttttgtgccgtaaggatgaaggcatagacgatgtgacacacagttagtgctgcaagtgcaatcgtagctactaccgcataccaattggcacccagaagttcacaaatcgtattgtaggcatctcctgaaaagagagccacaatattcattgacatgtgaaatgtcaggaatagaataagtgcgacaccggtgaccgacatcactactttcctaccaatagatgaattgattaaccacataaatgattgaaatttaagtattaaatgttagaaaaaaatatgcttactaattagatataatcaacgattttttaacaaacgttatcatctctccccttttgtgagtatgcgttacgtatgctgaagtgcaaaaatactatattttaatgataactcaaagctttttatcaaaaatactgccaaatagacacggctttttcgtataacatagattaacgatgataaaaaccaatatttgttcttttgtttccccaacaaatttaataaatcaagcacatcaaatgacttgtgtgcattgcttacctcattactttcatttgttgtacaaaaaaatgaatcttcaatgaaagagctgtgtcttttttcactgcatcattttttacaaaagtatctgacgcttttgtcctattattttaccaaaaatcgaccatctaaaatcttcaaaatagaaaattttaataggtaaacgagatgcaaaaatggggtgatttgaacaaaataaacgtcttttttagctgaaacatggacctaatgctcttggaaacactcaatagaggtgttatttacatgcttcaacggcattaaagcatgcaaattgcaagtttaactcaatgctttagtcggaaaagaatgataaaaatagggatgaaacaaagtggctttattataacaccttaaataacaataggttataaaactctctcataacttgcgtatttgcgaccaactttgcccttggatgttttgacgcgagttttgagaggcactttgtaaataaaattcagcattaatgagcagttcatgtagcgtacttccaatgctgcatctgctgtatttttgttggttttcgtggtaaaatatcattaaacgaaagagtcgtttcaaataggatgaaatatctattctgtgaaaaataaactcatacatacaaatgaatgataacattccgtctacatagtttttcgtcttcatccttattttattcaatattatttcttaattttgcgttgtttctttttcttatgacaagaaacttactctaaaaagctcagcttaaaaaaggttgattacttaaaaacaaaaacatcaaccttgccattacaaagcgatagagggagtttctataacaattaaataaagcaagatagaagtatgatatttcaatacgatgtgcttgtcattggcggaggacacgctggatgtgaagctgcaacggctgctgcgcaattaggagcaaagacttgtctcgtcacaatggacatgaataaaatagcacaaatgagctgtaaccctgccattggtggcattgccaaaggacagattgttcgagagattgacgccttaggcggtcacatgggaatggttactgacgctacctctattcagtttcgcatgctcaacaaaggcaaaggacctgcagtgtggagcccccgtgcacagtgtgaccgtagtaaatatattttggaatggagaacagtgttagatcatacacccaatttggacatttggcaggacgaagcgtgcgaattactcactgcgaaaagtgaggtaacgggtgtccgtacggtttggggtgttgagttatacgcaaaaagtattattatcacagcgggcacatttcttaatggtttgatgcatattggtaggaaaaagctccctggaggacgatgtgccgagccagctgtccatcacctgagtgaaagcattgcacaacatgggattaccgttcaacgaatgaaaacaggaacgcctgtccgcattgacgcaagaagtgtgcattttgaagacatggaaagacaagacggagaggacgacttccaccagtttagttacatgagtgggccaagaaacctccaacaacttccttgttggacgtgttacactacgccagaatcacatgaagtgttacgcaaaggattgcccgattctccccttttcaacggacaaatacaaagcacaggaccaagatactgcccttctgttgaaacaaaattagtgacctttcccgacaaggataggcatccgctatttttagaacctgaaggtgaaaataccaatgagatgtatttgaacggcttttcatcgagtatgccgttgaatattcagatagaagccttgcaccaaatacctgctttccgagaggcaaagatttacagagctggatatgcaattgaatatgattatttcgatccaactcaattgaagccttcattggaatcaaaaaacgtcaaaggtctgttctttgcagggcaggtaaacggcactacaggctacgaggaagcagcaggtcagggaatcgttgcaggtatcaacgctgctatcaactgctttggaggtgaaccttttgtgatgagacgtgatgaaagttatatcggtgtactcattgatgacctgacaacgaaaggcgttgacgaaccttacaggatgttcacctcacgtgctgaatatcgtattttacttagacaagacgatgcggacgcacgattaaccgagaaagcatatcaattaggactcgcaaaaagagaccgtttggactggtggacacagaagaaagagagcatcaatcatttgatggactattgtaataatacttcgataaaaccgaaagaaatcaacgaaatgttggaacgaaatgggacatcaacgcttaaaatgggatgtaaactttcagaacttattgcacgtccccagatatccattcaacttcttgcggaaatgataccatctttgagtgatgagatttgtaaaattccgaacagaaagagcgaaatcatcgaagcaacagagataaaaattaagtataaggggtacattgagcgtgagaaaataatagcagaaaagatgcaccggcttgaaaatataagaattcaagacaggtttgattacgaccagctacatgaactttcgacagaagctcgtcaaaaactaaaacgaattaaccctgaaacgctggcaaaggcaagtaggattccgggggtatcaccaagcgacattaatgttcttctcgtattattaggaagataaatacaacacatatcatctaaatcttacagatgtttcatgtgaaacaattgattatttcataacaacataaactattgacaatgaacaacaaattgctattagacaacttgaggtgcataccagattggcccattaaaggagtcaacttcagagatgtaaccaccctattcaaaaacgctgattgtttgaggacaattagcgatgaaatgtacgaactttacaaagacaaaggtatcacaaagattgtaggtattgagagtcgaggttttgtcatgtcgtcggcagttgccattaaattgggtgctggaattgtgctttgcaggaaaccaggaaagcttccatgtgagacagtgcaagagagttacgctaaagaatacggcattgacaccatcgagatacacaaagatgccatcaacgaaaatgacattgtactcttacatgacgacttattagccactggtgggaccatgaaagcggcttgcgaccttgtgaaaaagtttcatcctaaaaagatttattgcaatttcatcatagaacttatcaatgaaaatcttaatggaagagagaaattcgacgatgatatcgaaattacaactcttattcagatatagaagaagacactcgcaatcaaacaaagttatgaattagaaggggtacgagacagctctacccctcctaaattctttagaagatgataattcaaaatagaagatggcgaacaacaagactgcaaaatattctttattacaatgtttcacatgaaacaaagcaaagacaatagtcttaattccatacagttagaatgaccaaagaagggaacatagagagaatatccaaactaaaaaacattgttgatagcattccagagaggccaggaagctatcaattttttgacaaagaaggtagtattatatatgtgggaaaggcaaagaacttaaagcgtcgtgtgtcttcgtactttctaaaagaagtagatcgcttcaaaactaaagttcttgtcagtaaaattcacaacattacatacaccgttgtcaatacagaagaggatgctttgctgttagaaaacagtctcatcaagaaatataatccaaaatataacatattactcaaggacggaaaaacctatcccagcatttgcattacaaacgaatggctcccaagaatcataaagactcgacaaataaggaaagggaacggcagttattttggtccgtacacacagatatctcatctatacgcagtccttgatgtcatcaataaaatctataaacctcgcacgtgttcgttccctattacacctgcaggggtaaaagaaggcaaataccgtgcttgcttaaaataccacataggaaattgcttggctccatgcatagccaaacaatcccacgaagattacatgcaaaacatggagcaagcgtgtgaaattttgaaaggaaataccagagaagtacgagatattctttatcaaatgatgctgaagaaatcggaagaactcaaatttgaagaagcgcagattctaaaagataaatacgatatccttaacaaatttgtttccaaaagcgaggtagtgagctatacgataaaggatgttgatgtattcacactaaccgaggatgagagcaaaaaaactgcttatgtgaactacatgcacgtgaagaacggaacgattaaccagagtttcaccattgaatataagtctaaaattgaagaaacaaaagaggaaatactcatcactgctattcaagaactaagatccagatttaaaagtaaagccaaagaactcattgttccttttgaaatagaatggaatctccacgactgcacctttactgtacctcaaagaggggataagaaacacttactggatctctctgaaatgaatgccaaacaatacaaatttgaccgattgaagcaagcggagaagttaaatccagaacaacgtcagacccgactcatgaaagagttacaaagccaattgaatctacataccatgccttttcacatcgagtgcttcgacaactctaacatctcaggcacgaatgccgtggcaggttgcgtggtattcaaggggttaaagccttcaaagcaagactaccgtaaatacaatattaagacagttgagggacctgacgattacgcttcgatgaaagaagtggtgaggcgtcgataccaacgtatgatagaagagcaaacacccctacccaatctcatcattaccgatggtgggaaaggtcaaatggaagtagtgagacaagtggttgaagatgaacttgggcttcatatccccatcgctggactggcaaaagacaatcgacaccgaaccaacgaattgctttatggttttcctccacaagtcattggtatgaaagcagatagcgagttgtttcacatactcaccagaatacaagacgaagtgcatcgctatgccattaccttccaccgagacaagcgtagcaaacaggcactgcacagtgagttagacaacatcaaaggaataggaatacagacacagaagcagctcatgaaagcactgaaaagcgtgaaaaaaatcaaagaagctgatttacagactcttacaaacatcattggtaagtcaaaagcaaatatcatcttccaatattttcaggaaaaagaaagcacataatgtcaagaaatctctacatatatggcggtgtaaatgtaactcgtatgttccgtatatcgttgcttatcagttgattacgcaaacaaaattagataaaacaagccattctttgtcaatcaattatcaacggacaaacgaaataaagggacaccctactcaactttcaagtgacaggtgtcttactaaaaacctataaataatatacgcttatcaattttttaatgtgtaactttgcacatcagtcaaaatttatcaacacaattggtacaccgaaaaatgaaaacttggattcaactactccttcttatcgttggtatgaccttagggcatcatactacatgcaaggcagttccaagtgtgcagggctaccaaaaggaagctcacagagaactatcggacgttcaacaaaagcttagtgacaaatatcagctttatcacgaaacccttagtgatcaagaacgaggcacggctcttcgcacagattccaatcaatctactcgaatcaacgcccctcgtccacaacgctacctacccccctacctgcaactttccaagcttgatgcatataagaaatccacggaaacgtggcataacaagcttcatctctggaggaaagggcacaaaaattcacattcaacgactcccatatcaacaagagtcccagtcgattattatgtgattgcactgagacatatcattcgttgaattgctatctttataaaactccccttttagtacatcaacagatgtacgattttatccatgttttacaaataaaagatagcaaaaaaaatggcaaaattcaaaaatttagagatgtccagtacactctctaccaacccagatatcacagtttctaatggtttccttggctttggagctaaggcgatatatacccctacaaacactcctctgaaggcaatcatcaattattacaacgctgaagatggcgaaaaattagtcaaacttctgcaaatgcccgaggaacagatcgcagaaaaagcagagaaaatgcgaatgccacaaaaacaaagtatgagcaactaccgtttggaagcctgcttaaccgcagacaagcagtttattgccatacaaatatttggctatgcagattttaagaacactccgctccacgaactctgcacctataaaggcaaaacagcagaaagcatcatcaacttgctttagcccgtccgacacgacaaattcctacgtctcatgtatataacacgagacatataactaacctttcgttaactcaattgatgagtaacgaaaggttttttaatgactgtttaacaagtagggaaaagaggtaaaactattagaataacaacaaaagaaatagaactcacttttataagcccattaagtcattataataagggtacaaagtcattattataaggacactaacccattataataaaggcattaagtcattattataagggcactaacccatgtttataagggcattaacccaatgctatagcactttcatagactctcttgaccatttttagttggttattctatatcgcttgaccctattttattagaaatctactcatcaatttttccacataaaaactcatcaataaagaacataatatttggctaactgcacaaaaataaatatctttgtaatatgagaatagtcatacaaagagtttcagaagcatcggtgagcatcaaagacacgatgaaatcggccattcagcaaggttttcttatcctattaggcgttggcgaagaagataacgaggacgatatagaatggcttgtaaagaaggtagtcaatcttcgtgtgtttgatgatgaacagggagtgatgaacaaatctatcctcgatatcaatggtgaaatattggtggtgagccagtttaccctcatggcatcgtacaaaaaaggcaaccgaccctcctacattcgagccgcagggcacgagatttctatcccactctaccagttgttttgcaaacgcttgagtacccaattggggaaagaggtagccactggcgagtttggtgccgatatgcaggtgaaattagtgaacgacggtccggtaaccatctgtatggataccaaaaataaagagtaacgcaaacacccccaaagcaaggttcaaaatatggaaatcaaagaagcacagcaacaagtagaccgctggattaaggaatatggtgtacgctatttctccgaactcaccaatatggcgtgcctcaccgaagaagttggcgagttggcgcgcatcatctcacgcacctatggcgaccaaagtttcaagccaggagaaacacccaatcttgccgatgaaatggcagatattttgtgggtgctcatctgtttggcgaatcaaacaggagttgacctcacagaggcttttgagcaaaacatgaagaagaaaaccaatcgagataagacaagacatatcaataacccaaaactaaaacaacaatgacagtcaacaaaaacatacaacctacaaaggagcagcgcaatgccaagaatgcgcccaagcaaacagtcgataagtacgaacaggctttgaaaaagtacaacaccaatctcaacgatgatgaagtacgaaaaacggttaagaagctcatcgaagagaaagtacataccaatgacacccctgaggtgaagaaatttttgtttggaagcatcgaactgacctcactgaaatgtactgattcggacgaaagtatcatggcatttaccgaaaaagtaaaccagtttgacacgcaatacgctgatcttccccacgttgccactatctgcgtgtatccttgttttgctcaggtggtacgcgacaccttggaggtcgaaggcgttgaaatagcctgcgtatcgggcagtttcccctcttcacaagccctcatcgaggtaaaggtagccgaaacagcattggcagtgaaagacggagctacggagattgacatcgtgatgccagtaggcaaattcctaagtggcaattacgaagagatgtgcgaggacatacaagagttgaaagagacttgcggaaacgctgccatgaaagtgattttagagacaggatgcttgaaaacagcctcaaatatcaagaaagcctctatcctttccatgtatgctggagccgattacatcaagacttctacgggcaaagagaaagtggcagccacgccagaagcagcgtatgtaatgtgccaagctatcaaggaatactacgatgaaacgggcattcagataggttttaagcctgctggcggcatcaactcggtgatggacgccctcatctactacactatcgtgaaagaagtgttaggcgaaaaatggcttaccaacaagtggttccgtctcggtaccagccgcttagcgaacatgttactcagcgaaattgaaggaaaggaagtaaaattcttctaatgatacaatagaaacaactgaaaaaaataacgggcggttctataaaataccaccgtgaagttttatttatgcaggacggtttacgttttgtcatcttgcggtcttttttgggttcaatttgcttgttcgttcagtcgtatagctcgctatactccttcactcacaaacaaattgaccaccaaaaagagcctcgcaatctgacaaagctaatttatagaaacgccctaacctgtaaaaaagcggatatacaccttagaaatgtatatccgctttattcatttagcgtgatcaaagcgccttgatccaatcaacgatgtcttgcatcacctctggcgcaaaggtttcttctatcaatcgatactccgttgtctgccccgtagtacagtgttggaacaaatggttcagaccttcgtattctttaatcaggttctttttgttgggtttcaagccttttcgcaaggcagaaagattgtcatgcgcatctacctgcacatctttactaccattcactgccatgacaggacacttgatttttggaagatagcaagccatgtcggtagcgatgaaatcgagaacccatggagttttcatagtgataacgggtaacaaactttgccggctcaatgctgggagcgacacattggtttgtttcagcaaggagtctaacacagcttcggggtgagaaatgtctttcttggcatttctataagcataaatagcccccaataccttacaataatcacgcgcgaaagtggcaccacctctcgcctccatcgcctgatatacttgcttcaacatcaagctatcgccacgtccagcgaccccagcaagactcacaataaaatcgggtaagccctctgctgccaacatcatggcaatactaccaccctcactatgtcccatgacacctatctttccaaactttttcaggcttttcaggtaattgaaaccacagcgagcatccaccgcattgtctttcatcgtcgattgagaagcatcacctgtagacttcgcaaaccctctgtcatcgtatcgaagcgatgcaatgccatggcgagccaagtaatctgccaagactaagaaaggctgatggtcgaagatttcctcgtttctgttttcctgaccgctacctgttaccatcagtaccacaggtactttctgcttgttcatcagctcataacccacaggataagtcaatgttcccgcgaaaacagcattcgccttggcgttttgaaaggtcacttcctcagtttgataaggataaggtgcatgcggagtttgcggtctttttagttcctccacaccacgattgagcatcaaagggaaagacctaccaaactgcgtaaacgttccttgaatgtggtcaccttgctgtttgccgagataacgtgccccaatcgatgagataacaatatccacagagtcggctgtcagactgttcaccgtggcaggaacaccctttacactttggtcaggactatccatcgttacgatgaaaccgctgtttttgtccttttcaatgtgaaagacaagcgttaattgtgtaccttgaaccgacagtttgcccgtccaactaccttccaatttctgtgcttgcgatgcgcaaacggaagcacacaacaggagcataaaagtaagaaatcttgttttcatgacgatatgaatatgatatttacaggttatctatcacgctcaaaacaaaaacaaggcagtaaaaggtgtacgtacttcttatttagtacgcttcaccacatagtcgatataggcttgcaaagccgtcttaatatcagcatccgttacatgcttgtctatataatccaatgcttgtcgatgcaattcgcccatgcgttgttcggcatattcaatgcccccttgctgcttggtgaaagctaccaattgtgcgatttcatcgggcgtcaccgtgttttccttcaccttatgtgccaattggagcatggcggcattgcgagtagaattcaaggcataaataacagggagggtaagtttcccctctgccatatcattgccagtgggcttgccaatctctttcgactcaaaataatcgaaaatatcatccctaatctggaaaataatacccaacgtctgtccaaatttacgagcagcctctacctcttcgggtgtggcttttcccgcttgtgcgccaatcacggcacacgattcgaacaaggcagccgtcttctgcttgatgacttggtaatatacttcttccgaaatgtcttgattctggatattgctcaactgcaaaatctcaccattcgacaaggttctgccaaggttagcaaggttttgaataatggcttccgaatgggtgaaagaaacttgcaataaagccgttgacaggatataatcgcccaccagcaccgccactttattgtcataggtcgcattcaccgatgcttgtccacgacgttcgccactctcatccaccacatcatcgtgcacaaggctggcggtatgcagcagttccaagcccaccgcagcatgctgagctatcgaggtaaccccactaaagttcttcgctattaacaaaataagcatgggacgcatgcgctttcccgttcgttgacgaatgtgagaaagtgcttgcgatagcagaccatcagcgtgtgacaacgactcttcgaataactgattaaaatcattcagttcttgtgtaatcgggtgttgtatgagggataaatagtccatgcttaccaaatttgttacaaaaatacagaataaatccctatttgtcgctttttttgcgtaatttagcataaaaataaattcaatgtcgctttaccaagggctttaacagagaatgccccctatctggtaagccattataacacatcagcaatatggaaaaactctttcttttagatgcctacgctttaatatacagatcttattatgcgtttatcaacagtccacgaatcaattcaaaagggttaaacacttctgccattatgggcttttgtaataccctcaacgaggtacttaccaaggagcagcccacccatattgcggtggcattcgaccatggacttacctttagaaacgaggcattccctgcctacaaggcacaacgagaagccacccccgaagatattaaaaagtctgtgcccatcatcaaacagattttgggggcgtatcacatcccatgtttacaggtagaaggattcgaagccgatgacattatcggcacgttagcgatgaaatcgggcaaaaaaggcattgatacttatatgctgacccctgacaaggactacggacaattggtgggagaacatgtgtggatgtaccgaccaagacacggagggggttacgaaacactcggtaagaaagagatttgtgccaaatatagcatcgactctccattgcaagtcattgatattttagccctcatgggcgacactgctgacaactttcctggctgtcccggcgtgggagagaaaacggctatcaaactaatcaaccagtttggtagcattgatgagatgctacaacgaacgcaagagatcaaaggtaaattgcgtgagaaagtagaaaatgccatcgaggatattaagatgtcccaattcttagccaccattcgcaccgatgttccaatcgacttaaaacttgatgacttacaagtggaagaaccgaatgaggcagaacttgcaaaaattctccacgaattggaatttaagacgttagcaaaccgaatgctaaacaaatctaaaaatagcacaaagaaagctaacaaacaactcaatttatttgaagaatcctcgcccaacattcaggtcgagccgaaaaacaagagttttgagagccttaaaacagtacctcatgaatacaaacttattgataatgaggaggaaatgcgcaaattatgtgactttttcttaacaaataagattttaagtctagacacagaaaccacttcaaccaatgcaatggaggcagaattggttggtttgagcttttcggtggcgcctcaccaagccttttatatacccattccggcaaaccgtgaacaggcaataaagattattaatttattcaaaccagcgtacgaaaacgaagctatactcaaagtagggcaaaacatcaaatacgacatggaggttttaagccgttacggaatcgagctcaaaggcgacctattcgataccatgattgcgcattacctcttacaacccgagttgcatcacaacatggattacatggcagaggtatatttaaggtatcaaacgatacatattgaagaactcattggaccacgaggaaaaaatcaaaagaatatgcgcgaccttgcccccaacgatatctatgagtacgcttgcgaagatgcagatatcaccctgcaacttaaaaacatccttgaacctaagctcaaggaacgagaggtcgaccaactgttttacgaaatggaaatgcctttggtacgtgtgctgacagaaatggagatgaacggtgtacgcatagacactaaagcattgcaagaagtttctgaaagctttaccaaacgcatgaacgacttagaagcgcaaatacatcaattggctggcgaatcgttcaacgtctcttctccaaagcaggtgggcgacattctttttgaaaaattacagatagccgaaaagcccaaaaagacaaagaccgggcagtttgttaccagtgaagaagaactgcaaaaatatgccactggcaacgaaatagtaaccctcatcttggactatcgtggactgaagaaactcttgggaacgtatgttgatgcactacccaagctcatcaacccccaaacaggacacattcacacctcgttcaatcaaaccgtaacggctacaggacggctctcctcaagcgatcctaacctacaaaacatccccgtacggggcgaggatgggaaagaaatccgcaaatgtttcatccctgaagacggttgtttgttcttctctgccgattatagtcagatagaattgcgtgtcatggcgcatctcagtggcgacaagcacatgattgaagcctttcaagaagggtatgacatccatgctgccacggctgccaaaatctatggcaaggagatgaaagacgtaacacgtgatgaacgaaccaaagccaaacgtgccaatttcggcatcatctatggcatcacagtgtttggcttggcggagcgattgggcatcgacagaggcgaagccaagaaactcatcgacggctatttcactaccttcccacaggtacagacgtacatggagcaagccaaagacacggctcgagagaaaggatatgtagaaaccttcttccatcgccgccgctatctccccgacatcaacagtcaaaacgccactgtccgtggctttgcagagcgcaatgccatcaacgcacccatacaagggtcggctgccgacatcatcaaggtggcaatgatacgcatttacgaacgatgcaaacgagagaatatccaatcaaagatgattctacaggtacacgatgaactcaatttcagcgtgttgccttcagagaaagagcaagtagagcgcattgttttagaggagatgcagaacgcctatcaactgaaagttcctctcgtagccgacgctggctggggacaaaactggttggaagcacactaaaaatcgcatcataaagaaaaaagaagaaccgaagctatatgaaaattatccatattgaacaactcattgaagaccccattcacctacttgacagtgtggcggacaatggcgactccttgctcattcatcgcccgaaagacaaaagtgtggtgatactctccatggaagaatacaaccaactgaaagcctgtgaatatcgagctaaaaagaacgaaccgccaaaggctaacccctaaaattattcttgttttgagataggggcattgcgcacacacttcaagtacctaactccttagcttcaatcattttacagcgtgaacgtaaacctattatcccattgacttcataaattcaagtcaatggggtgatttttatatctacaaacagtcaacttcaaaatttgcgacaatcatcctgcaaattacagttatagacaacttaacattcaccagaagaaggctccacatacaccccaatcaccttcaaaggctcagaatgcacggcatcagctatcatggcagccgacccacccaagattccagccgtgaacttcaatgccagcaacaccgcattgatgatgctgccggcaatggtgacacggtaaatggacagttctcgctgacgatcggaatcagatttttccatcaatgttttaaaaataaagggttgctccggcaaatatagtgatttttaactacacgctgtgtacacctttagaatatctgcaaaataacatgacgcgcaatctcattttctaatgtaggtggcggctcactcacttgaaacgattgattattcaaacatttttagggtaaaccgttgtttttctggtttttatatttaattttgtgttcgtattcaccttctgcgacacgcaacagatatggctaaggtgagattttcgatgcagaaacatcatctgttcacgaaaagatgaatgtttactgcaatacgcaattgatagttaatcacggtcacgagtttgcccaagccctttgagaaacaagacggacagatgacctctttttattcattcaaaaccatcatcatgagaaattatctactttcactcctcgtcgcccttttggcggtcacgggtagcctgcctgtggtagcacaagaggcttatgccgtattaacacctgacgacggaacgctcactttctattatgacaatcagcgcaccacccgtcaggaccatggtcgcatctacgacatgcccaatagagagaaacccgcttgggcaggtgattattttaatcgccagagaagtatcatgcacgttgtgttcgacgcctccttttccgagtaccgtcccatcagcacccgctcttggttcgcatattgcatcaatttgcaggatatcgagggcatacggaatcttaacacccaaaacgtcaccgacatgagcgccatgttccaaggctgcgaggcattgagatggcttgatgtgagcaacttcaatacccaaaacgtcaccgacatgagggagatgttctatcactgcgaggcattgacatcgcttgatgtgagcaacttcaatacccaaaacgtaatctatatgttgggcatgttccaaggctgcgaggcattgacatcgctcgatgtgagcaacttcaatacccaaaacgtcaccgacatgagatacatgttcatttactgcacggcgttaacatcgctcgacctaagcaacttcaacacccaaaacgtcaccgacatgagggagatgttctatcactgcgaggcattgacatcgctcgacctgagcaacttcaataccgaaaacgtcacttacatgagcagcatgttcgaaggctgcgaggcattgacatcgctcgatttgagcaaattcaacacccaaaacgtcaccaagatgaacgccattttccaaggctgcgaggcattaacatcgctcgacctgagcaacttcaaaatcgagaaagtcgccgacatgagcgacatgttccgagactgctcggcattgacatcgctcgatgtgagcaacttcaacacccaaaacgtcacctttatggcgcggatgttctatggctgcgaggcattgacatcacttgacctgagcaactttaacaccgaaaacgtcacttacatgggcagcatgttcgaaggctgcgaggcattgacatcgatcgatgtgagcaaattcaacacacaaaacgtcaccaacatgcagagcatgttctctggctgcgaggcattgacatcgctcgatgtgagcaaattcaataccgaaaacgtaaccagcatgagcagcatgttctatagatgttcggcattgacatcgctcgacctgagcaacttcaataccgaaaacgtcaccgacatgagcgccatgttctctggttgcgagacattgacatcgctagatgtgagcaacttcaacacccaaaacgtcaccggcatgattcgtatgttctatggctgcgagacattgacatcgcctgatctgagcaacttcaatacccaaaacgtcaccagcatgaacagaatgttcgaaggctgctcggcattgacatcgctcgatgtgagcaacttcaacacccaaaacgtcaccgacatgaaccgtatgttctatggctgctcggcattgacatcgctcgatttgagcaacttcaatacccaaaacgtaaccagcatgagcagcatgttcaaaggctgcgagacattgacatcgctcgatgtgagcaacttcaacaccaaaaacgtcaccgacatgtgggacatgttctctgactgctcggcattgacatcgctcgacctgagcaacttcaaaaccaaaaacgtcaccggcatgagttggatgttctctggctgctcagcattgacatcgctcgacctgagcaacttcaaaaccaaaaacgtcaccggcatgagttgtatgttctatggctgcacttccctaaccactatttactgcaacagtaactggaaggttggtcaaaatgttgacggtcaacatatgttttatgactgtaggcagctgaaaggtaccaacactgcgttcgacgaaaacaaaacgggcattgagatggctaaccccaccacgggttacttcacaagtaaaaccacaggtattgaccacgtgaagactgccgaccgggcaggcgagggcaaagcatacgacctcagcggccgtcgtgtgaacgcgagctacaaaggcatcgtcattaagaacggaaagaaatatattcagaaatagaagtactatcccaatctaacgaaacactccactccaccctcctataggagagacgaagtggagtgttttcgaatggttacaaacaacgactggagataaattccggaagcatcacaccatttcccggatatgtttcggagcgtgataaatcatgcccctatgggtgacaccgattatccttaaggctggttctataaattaccaccgcatatagtcattaaatctttataaaatacgttttgttatcttttagcttctttttggttcaaaatgtaagttcgttcagtcgtgtagctcgctacactccctcactctcttgcattttgacctcaaaaataagctcaaaacctaacaaagttaatttatagaaccagccttaattcagtaggagtaagtaaatccttctaagggacaatcatcaaagtagtgctgccgcatgtgcaatctctttcagcttatctgccaatttcttgtcagttctcgccgtttgcatattgtatttcagctgcaatttcatcagcgactctgctggaacatctaaggcagcctcaaacatcagtgcggtggtggtgctcagtgagcgacgaccattcaatatctcattcagtacggaatagcccataccaatactatctgcaaacttacgctgcgagatgccccttgcttcaagttcatccttcaacacctcaccggggtgtgtaggataaaagccatcacctaaacttgccatatcgattttatttatcattctatttgacacatcgcgcatcatcataggaggaaaatgcgaagggtgtcgtcagtctggttctctcgaaagctttgagttcctcacaacgggagatgtatggggcgatgcgctcggcattgtcgtgtgcaaattccgcgagtcgcatcatagctcggtattgtcgcgaaggaggacgcacggaagggttgctaaggtcgtgatataccccgatggtgccgtcccaccctttctcataccacgaatcctgcgggataaaagccagggcgtaaaggcttttctgcttcaacgagaagtctgtcgagcgcgcactctcttccaacaggttgatggcataggccacaaagtccatgttgccggtcttggtgctgtcttgcgcagagctgagaccatactgcgtgagccaccagcagtcgcccaaataactggcctgataatagagcgaggccagttcgtaggccttttcgagacgctgctccgatgggcgcatgttgcgatagagatgctgcacagcaagaatacgacggcaaaactctactttccggtttgtggtaagcaggggcatgtaaccctcaaactcgtcctccgctttctgtttggtcagccatcgctccgtctcatagctgcgatgacggacataaggcacgatgttctgggtattgagaaaggccatactcaccttttcaagatagggaatagcctcggcaaacatccctcgtgccaggagtttggtgccgatcaggtcgttgtaataatcagcatcgcgatagcatttaccccacacataacgttgcaaagcatccttgggcttcttgctgagaaaacgcgcgtaatgcttaagatgctccacattaacgctgtcgagagcctcgaaatactcgcccaaatagtctgagttccatggcttgtcggcagctttaaagtcgggatgccgccagttgggcatacccacaatgcgattgaactcgttatccatcatgcagagcatcgccatggccatcgtgcggtcgcccgatttgaaatagcggggcaccaatccgttgtacacgatgcgttctttcacgtcgcgataatggtcatcggtcagcacactgtcggttatatcctgcttcgacttgccatcgagccactgcaattcggccgccatccattggcgatacttccttttcatcggctccacaaacacagagttggccgcgtagatggcgcgcgcattgtccttcatgcggggcgttccgttgagggtaagcgctttggcgaggtctattttagcctgttgatagtcgcccatttggtgctccagacaacctatggccgacatccagaggcagggcgtacggctctttccactggccagcaccttacgggcaaaatcgataaactgccgagcttcgggtttatagatgggctgtgcacctatctccttaatccagttcaccttgtcggaatcctccggataaacttctttcgagagccattcgttggcatagacatcctgcgtttcctgcaagttgttcacaaagtcctgcacaagatagagcaacgtgggcgaattgggattttcggcaaataccttgctgataccggcaaggttgcgatagttgcgcacgctgtattgcaaacttgcgaagtcttcctgcgcagcatagatttccactgcctcacgacgttgcccaaggcgcaggagacagcccgcatagaggttttgcatcaggtctcgatagacactttgcggcagtttttgtccctgccgcgtccaatagttcatggcctcgcgatattgtttcagggcgaaatgcgtgcgcatcaccatcagcatatattgcgctcgaaacctttttcccttgtattttcgggcctcagcctgaagttctcgcatggtggcctggctctgggcaatttcctccttcgacggatattcccaagcgtcgtaaaagacagaggcatcgatgtaggaattgagcaacctcaggtaggccatcatctcggtgtctcccctgcgcttggccacatccattaccacctcccggctccatcgataggaagaaaaacggggatcgttgccgacatatttgttccaaaacacctcggtctcggttccgaaacgatctcccatcaagctgcgatgaaacacgctgaaaaggtaatagttgtgggtaggcccctcaaatgcgcatgccatcgcgccgagacaaggaatcagggccaggatcagggtaactaatcctgtccgaaaattaatgctactgatagatattttcatagtcgttgggagtaaaacggttgatattcttgttgttgagatgatagagtatcacctcgctgttggcctccgggcgcagactgtccacagctcgccgggcggccatgatgtcatcaagttcaggctggcgcgtggctacactgtcaccctgcaacacgggaaaatcgtcatcaccatgcataatacccacatattttccatcgcggaacagcacacgccacgtgaatagcgggtaagcgacgttgagcggcaatttgtatcggggcaaactgtgcagataaggcctcacgtctttcatgtcgagaattggcttatggacggagagttgggtgaaatcgccggtgttgtacatcatcaggatacccttgtccacaggtggaacttcgagcgacaactggtgcagacggatggtagccgacagtgtcaacctatgctcgtggcagagatcgcgcatacgtcggagcatactgaaatagcgtttctgcgtgctcatagtccagtcgcagtctatttggatttctctgatgcccttgatgtcgtgcgtttcgttcatctgtagaatacggcgaaacacttggtcggctatgtcatcaatgcttcccgcttggaaacgattgacgataaacaccacgggcacaatctcgacaccttgcggcagggtgtcggcaaaggtgattgtggcattgggcatggggtgcatctcgtcgtctggtgtcacgtcgaaatatctgacgtagagttttttcacatggtgcatgcgaaggaaggcacgctcggcagaatcgagtcggaaagtggtgcgccagtaatatatgctgcgggtggcaacttcgtttgtttgcctgccaccacaagctgcaaggagcaaaatacaaaagagtgatatccaaagtttagtcattctccggaatttttgaataaaattataaaaatattgactaacaacaaaaacaatgaggacaaatattggcaaagaaggcaaaaaagaccatattcgagccagaacacacgagtcgcggcatgatggattccttttcagccagcacttttatacgcttttcctcgttcgtttcccaatctttttcgtaaatttgcacattataatataaacgtttatcataacgacatgtcattaaaatgtggtattgtagggttgccaaacgtgggcaagtctaccctattcaactgcttgtcgagtgccaaggcacaggcagcaaattttcctttttgtacgattgagcccaacgtgggcgtgataacggtacccgatgaacggctcaccaaactggctgagattgtgcatccgggacgcattgtgcctgccacatgcgagatagtagacattgcaggattggtaaagggggcgtccaaaggcgaaggcttgggcaacaaattcttgggaaacatacgcgaatgtgatgcgctgatacacgttatccgctgtttcgacgatgacaacgtggtacgagaaggcggtatggcggtgaatcccgtcagtgacaaagaagtgattgacaccgaattgcaactcaaagacttggagaccattgaggcacaactatccaaacagcaaaaaatagctgcttcgggcaacaaggaagccaagacgcttgttaccgtattagaagcctacaaggaggtgttggagcaaggaaagaacgcacgaactgtgtcgttcgacaccaaagaggaagaggaggcagcccacaacttgtttctgctgaccaccaaacccgtgctgtatgtgtgcaatgtggacgaggcaagtgccaaagagggcaacgcttatagtgccaaaatagagaaaatagcccaagaagagggcgccgaagccatggtgattgccgccaagacagaagaggatattgcgtctttggagacctacgaggacaagcaaatgtttttagaagaattgggattgaccgaaagtggtgtgaaccgcctcatcaaaaaggcttattcgctactcaatctgcaaaccttcatcacggctggcgaaatggaagtaaaggcttggacgtaccacaaaggctggaaagcgccacaatgcgctggcgtcatccataccgattttgagaaaggttttatccgggcagaggtcatcaaatacgatgattacatcaaatatggcagcgagagtgccgtccgtgaagctggaaaattaggtatcgagggcaaggaatacgtggtgcaagacggtgacatcatgcactttagatttaatgtttaatgaacgattattgggctgataagcctgattaggcgaattagcccaatagcccaataacaaaacaatatgatagaccacctactttacatcctgtggaatcctgatttagagatattccgcatcggcaattttgccattcgttggtattctacctgctggttgataggacttgccttggcatacttcatcgtgaaatggctctataaagaccaaaaggtgaaggatgcgtatttcgatccgctgtttatatattgctttttaggcattttaatcggtgcccgattgggacactgcctgttctatcagcccgaatactttttgtcttcgtggacgcatgtcgtcgaaatgttcctacctatccaccagatggcggacggttcatggaagtttacggggtacgaaggattggcttcgcacggcggtacgataggactcatggtggcactctatctgtactatcgcaaaacaggcatgaacttgtggcatgtactcgacgacattgccatcgccactcctatcactgcgtgctttatccgtttgggcaacctcatgaacagcgagattatcggcacgccaaccaatgtgccttgggcttttatctttgagcgggtagacatgacgccacgccacccaggacagttgtacgaggcgattgcctactttttcttcttcttcgtcatgctgcatttctacaagcgaacctccaaaaaggtgggtactggcttctatttcggcttgtgtctcaccctcattttcacgttccgcttcttcatagaatacaccaaggatatacaagttgacttcgagtcgggcatgattttcaacatgggacaactgttgagcattcctttcatcatccttggcattgcctgcatgaggggtggaaaatggatgaaaaagttgggagcgaactaatattttcgccctctctctaagatttaccaaggcatccaccctactttgaaggcagtaatgtggttgctgatgaacaaaataacaatcaacatacctttttattcatgactaacaaaaccttttttttattggcttttttagccttgagtggtgcttgcatagcacaaaatagagcggaaaaagaactttcctcatggcaattctctcgcaatggcgatgcgtggcaactagtaacagtgccacacgattgggctatcaaaggaccatttgacaagcagtgggaccgccaattcttgggtatcacgcaagacggacaacgcacccctatatggcacacgggacgttcgggcggactgccttggttgggacgtggcgaatatcgcaccaccatcaacgtaaacaacctcgatgcacgcacagaactttatttcgatggtgccatgagcgagcctgttgtctatgtcaatggcacggaagcgggtcggtgggcgtatggatacaacgcttttcgcatcgatatcacgccctacttaaaacgagggggcaatgagatactggtcaaactgaacaatttggaggagagcagcaggtggtatccgggtgctggactatatcgcccagtcacgctgattacgaccaataaaacctatatagatccttggcaaacgtatttccgcaccctctccgtttcagaacaaggagcagagattgccgtgaatgcacaaaccaaaggactcagagagaacgacaagctcaagacgcacattatcctaaaagacaaagacggtaggacagtagcacaaaatattgtggaaaacgatgcgaaaggagatgtggcaacgacgttgaacatcaagaatccacaactttggagtcccgaacatccctatctctacacgttacaaatctgcgtgaaacgaggctgcaaaaccttagatgccacctcacaacaggtgggaatccgcaccatagccattacgaaagagcacggttttcagctcaatggcatcacacgaaagttcaagggcgtatgtctgcatcacgatttaggacctcttggagccgctgccaacaaggctgccataattcggcagatacgcatcatgaaagatatgggcgtagatgccatccgtactgcgcacaacatgccttcgcaaatgcagatgcaggtgtgcgactccatgggcatgatggtcatggcagaaagctttgacgcatggaaagagccaaaggtaaagaatggttacaatcgtttttatgatgaatggtggcgcaaagaccttacaaatctgattttagggcatcgcaatcatccttctatcgtgatgtggagcattggcaacgagatacccgaacaagccaaccagcagggtactgagcgcgccaaagccatggtgaagttttgccatagcctcgattctacacgcaccgtcacttgcggtgtggacaatccagagggcagcgtcgattgcggtttctatgctgccacagacgtaccgggctttaattatcgtgtcttcctttacgaaaaactcatcgacaagctgccacaagggttcttgttgggttcggaaacatcgtcagcggtgagttcaagaggggtatataaattccctgtagaagagaaaaatatggctacctacgatgatggacaatgttcatcgtacgacgtggagaaggtgagctggggcagttaccccgatgaagactttgccaaacaagacgacctgccctactctatcggtcaattcgtgtggacaggcatcgattacatcggtgaacccactccttattacagctattggccctcacgaagcagctactttgcaccggtcgacttggcaggcttacccaaagatcgctattacctgtatcgctcggtgtggaacacttcctcgcctaccctgcacctcttgccacattggacatggcatggacgggagggaaaggtaacacccgtgtactgttatacgagttatcccgaggctgaactctttgtcaatggcaagagtcaaggacgcatcaagaagaacaaggcatccaaattagaccgttaccgcttgcgctggaacaacgtagtgtatgagccgggcgaactgaaagtagtggcttacgacgacaagggcaatgaagtggctcaacaaaccgttcacaccgctggtgcgcctcatgcactcaagattgaagtagataagcaacagctcgcaaacgacggcaaagacttgctgtattacaccattagtatggtagataaagacggcaacctctgtccagatgccaacgacctattactctttgaagtgtcaggtgctgcccgtttcaaggctgtctgcaatggcgacgccacgtcattagagcctttccacttgcccaatatgcaccttttccacggaaaattggtggtaacagtgcaaagcaacggacagaaaggacaagtgcatttaaccgtcaaagcccctaaattaggattcggcgcacgacacacactgtaaatgaaagaaagagatggttaaagaaggggcatcctatttcacccctctttcccttatatctaaaatgacgcagtgcgtttggagcgcactgcgtcatttattcttatacataagaaagtagcggatcaatctctacttccctaaaattgtacctctataatcttatcaatgcaatccttcgacaatgctgttggcaaggtaagcaccacacctgtctggcatctttccacctttacgggctgtttggtgtcatagacaaaggctttcttgatgcgctgtttgccgatgggcaacagcaaactacggtcgtgcagatttaggatatgcacaaagagacgattgcctttctgcgtggtaacgccccaatcgtgaggcttcaccatgccccctcgagtgccataaatcgtttctccatacactttcatccactgtcccaccttctgcaagcgttccaaagccacggcagggagttcaccatcgggctgtggtcctatgttcatcagcaggttggcgttcttgccagccgccttgacgatgtaacgtatcaaggtagtgtccgacttatagtcctggtcggtaatcttatatccccacataccattcatggtctcgcacgtttccaacggcaacctactgatgtcttgccccgacaaaccggcattgttctcaccaggcaaatcccgttcgaatatctgaatgtcctccccttggaaaggagtggtgtgatgattgttacccaccaagcacgcaggctgtaagcgatgaatgagctgatattgcccttccagttgccaatcgaaatcgggttgttggtcccaccaaccatcaaaccatatcgcaccaatctttccatagttggttaatagttcggtgagttggttgttcataaacgcataataatgctgccaattgccttgagggttgggacgccctgttcctcgtcctgttctcccccacactgcatcctctctgtaccagtcgatatgcgaataatacagatgcagtcggataccctgcttgtgacattcgtctgccaactccttcaagatgtcgcgcttgaaaggggttgcatccacgatattatagtcagaataccgagtcttgaacatagaaaatccctcatgatgacgggttgtaaagcaaatatacttcgctcccgatgccttgatagccgatacccaagcagctgcattaaaccgagaaggataaaaacctcctgccagtttagcgtactctttgtagttcaaattcttgttggtcatggtccactcgcccgttgccaacatgctatacaagccccagtgcaggaaaataccaaacttagcgtcttgaaacgcttggcgcgaagccatattctctgccgtaggttgataactctgaggctgaccagtagcgacctttgtctgtgaaaaggctgttgtggtgaaacataaagttaaaagaaaagaaataagattcttcatggttgtatggtttgataaatgaaaatagataagctgtaacaaatcattaaaaattaaacttcatccctccgccaatattgatgcctggtaatggtgccaaaaaactcacaagggaataatgcggacgacagtcttcgttcaacaaattcttaccataaaggtagaattctacgcctactttggcaatttctaatgtgtatcctaaacgggcattcatcatcgtataccgaggtagagcgtattcaggtagtatttgttgagataaaaacgtttttggaaagtaatgatcaacgtcaagaagggcagtaaattgacgccattttcccgtaaaattacaccctactctactaattggttgatggggcatatacacatcgctggtcaccaaatgttcctcatctacacaccattctttattctttacccaatcatagaacacattcatgctccactgtccccagcttcttaaatccatatcgtatcctaaagctgtctcaaaccctaagatattggtattggctgcacgccattttctgagagtcagtccatttggtgtaaatcctaaagaggacagatagagataatttttataataagaatcgtagaacgtaaatgagaaatgcagacctttccataacacaccagcttcaaattccatttgatgagccgactctttctgcaaagtttcatcgccctgctcatgagccaacaaagcaaagtgagtaccctgggcatacaactcattgatttcgggcgcacgctctgaataattataatgcgctgaaagatagcctaccttccacaagtcgccacgcaaagtagcgctaaattgatggagtgcaaaacgtttatcatgcgcccgttggtcttgccagccctcttgcgtggaaaaaactgcatcgtctatcagcttacgatatacctgttcgtggcgataacccaatgcggcatggatgaattgataatcgaaatattgcatactgaaaagtccccaacacaaagactgatggttcggaagataacgagcactaccctctccctccattcgctgataaataaagtcagcaccagtgataccagtccaaaacttcagtcgttgctgatgcaactcaaatcgcgtgttctgtctgagcgtcttgaactgatttcctatctcactgcctaaaagttcttggtcattggcatattgcaccaagccttgaagtttcaccgtaggaaagtagggtagcacgttaagcagttctgtttctattctcccgatatgctgatcgttacgggcattcactccaacgtagtcttctgggcgacctgcattggggtcttgagcgtgtaaagaggtggtagcgacctcggtcaaagttctcgcaaatatcggtgtaccatagttggagtgatgatattgataacctgcgcccaccttcacatgttgagatacataactcatgcctgtctctacagcgtttccccgtcggtaactgttcggtattttttgatactcaaccgtaccgtaatccacaaattgatgtggtatctgtacgtaacggtcgcgttgagggtcctgtccaggtacataaaaaggattcggtgtattttgaatggtttttcccgaaaggatttcttctgattggaaagtgaacaaatcatcataattttgctttgctggatctatgttccatcgccctgactcactgatataaggaaacaaagaataattaagtcgtcgccccgtaacaacacttcgttgcatcattcgctgtaacacaggattagactccatcagtgaagtatcgttagccaatgttgctttggtgcttcctgggatacttacttcttttacgtgatgatacaatgcaccgatatgccataaataatgctgcccaatacgaccatttagactaaaagagaggcgagatccactattcgaaccgaaatctaaaacggcagtacccgtcacatagcccgttggaacgtgcatagggactaattgagaatgcatattcaccgcacctccaatggctcctccgccatacaacacactggcagaatgcttagaaatctcgacatctgtccatttgtcttggtcgatatccaatccaaaagtaggactgatgcccgaaagattgctcacactcagcccatctgcaaggatgttaacacgatgcccactcaagcttctaataacgggaagtcctacgtttggtccaaacgacagatgctgtatgccaggaattcttcccaacgtttcacctattgttggtccttgtcgcagcgataattcttggatattgtaggagagaaagccacgcgtattgttcatgtggctaaaagtatcaacaacaagcgactgacggtgagccgaggtgtcactgtttatggcataattgttcctgtctgttgctgctccctttacaggcgtcatttccatgccaagaaacagcaatatcaaacaaaggttggtctttttcatttcagatatataaaaatttgtcctcaaaagaatggaaaaccaagcaataaccaaggtagatacccttctaaaaagggaacaagagccctattaaagcactattctgctccaatgattttcttgatttcgttgagtttgttcaatgcctccatgggcgtaaggttgttgatgtcaagcccgagtatctcatcgcgtacctgacaaagcacgggatcgtccagttgaaagaagctcaactgcatgccttccctgttctcttccaaatgtttcacgttgggcttgcccaccgaacccacctgactgttgtccgactctaattgccttaaaatctcattagagcgtttgacgatgcttcggggcatgcccgcaatctcagccacatgaataccaaagctgtgttctgagccgccacgttccaacttacgcataaaaatcaccttgccatctgcctctttcacactcacgttataattgtgaatcctcgggaaatgcttctccatttcgttcaattcatggtagtgtgtggcaaaaagcgtgcgcgcccgtgctctcggttgctcgtgcaagtactccacaatcgcccatgcaatggagataccatcataggttgacgttcctctacccaattcatcgaagagcaccagcgacctgttggtgacattgttcagtatatttgccgcctctgtcatctccaccataaaggtcgattcacctaaggaaatattatcagatgcccccacgcgtgtgaaaattttatccaccaagcctattttagcgctctctgcaggcacgaaacaccctatctgcgccaatagtactatcaacgccgtttggcgcaacagcgctgactttccagccatattgggtcctgtaatcatcatgacctgctgtttctccgtatccaagtagatgtcattaggcacgtaagtctcgcctaagggcagctgcatctcaataacagggtggcgaccttgcttgatgtcaaggacgtcggtggcgtcaatttgcggccgcacatactggttttcctctgccacctgcgcaaagccaagcagacaatccaaatgggctatcaggttggcatcaagctgtatctgcggaatgtacggctgcatatcgacaatgagttcacgaaacagcttgtcttctaacatcatgatgcgctcgtcagcccccaatattttctcctcataagccttcagttcctcggtaatgtagcgttctgcctgtgccaatgtttgcttgcgaacccaattctccggcactttgtccttatacatgttgcgcacctcgaggtaatacccaaacacgttgttgtatcccaccttcagagatgcgatgcccgtccgttctacctcacgctcttgtatctgtatcagataatctttaccgttgcgcgatatttgtcgcaactcgtcaagttcggtatcataaccatcggctatcaccccacccttgttcaccaacaggggcggatcgggttgtatctcgtgtccaatgcggtcgcgaatggtctcgcaaagctgcaactgttcgccaattctccgcaagctctcgttcgatgctttcatgcaggcagccttcacgggttgcaaggcttgcagcgcattcttcaactgtaccacctctcggggcgacactctgcccacagccacctttgagataatgcgctcaaggtcgcctatacgctgaaactgctcacccaccaactgtcggaaatcgggggctttgaagaaataatccaccacatccaagcgttgttgaatgggcgttacatctttcaatggaaacaccatccagcggcgaagcatgcgtcctcccatgggtgtgatggtcttgtcgatgatgttcagcaacgaccgtcccccctcttgcatggtgtcaatcagctcgagcgaatgaatggtaaacttgtccaaccgcacgtagcgttcttcttcgatgcgggcaagcgacgtgatgtgcccgatattggtatgttgggtaatctccaaatactgcaaaatggcgcccgaagccacgataccgcttttcatgtgttctacaccaaaacctttcagcgacttggtgccaaagtgtttcagcaatcgttggcgtgcgctctgctcggtaaacacccagtcttccaattcaaagacacagtatttggtgccaaaatgggtatcaaaattgcgcttgtcattgcgatcgtacaacacttctttgggtgcaaaactgcccaatagtttctccacgtagtcataagtaccctcacccgtgagaaattcgcccgttgaaatatccaaaaaactcacaccgcaagccgctttgccaaaatgcaccgcagccaggaagttgttttccttgtaattcaacacgttgtcccccattgccacacccggtgtcaccaactcggtaatgccacgcttcaccatcttgtcagtggcggaaagtcccttcttacctttcagttcctctcgttttttcttagggtcttctaattggtcgcaaatagccacgcgcttgccagcccttatcagtttaggcagatacgtatcaagcgcgtggtgcggaaaaccagccatagccgtttcgccactattgcccccattgtttctcttcgtgagtgtgatgcccaaaatgcgcgaaccctcaatggcatcatcgccatacgtctcgtaaaagtcgccacacctaaagagcaacaacgcatcgggatgctgccgcttcatgctgaaaaactgtttcatcattggtgtaagacctttatctttctgtgccataggggaatatttctattgaatttacaaagttatcaaaaaacggttggtaggcaaaataattgagtcatttttagtaagcaataagtttttcagcgcagcactttcattttagaatcgtatttttacaacgaaaaaacacccacaaaacaacatttgtaaacctattgatatgctgcattgaaggaaaattaatgctgaattatctttacaaagtgcctctcaaaactcgcgtgaaaacatccaaggacaaagttggtcgcaaatacgcgagttatgagcgagttttataacctgttgttatataagatattacactcaagttattttgtttcatccctatttttaccactttttggcggctgaagcattgagatagcaccattatttgcatgctttaatgctgctatgttatgtgaataacagctctaatccatgtttccaagggcgctaattcaatgttccaacttgaaaagacgtttattttgttcaaatcagccgatttttgtctgtcgtttgcctattaaatttttctattttgaagattttggatggtcgatttttagtaaatttataggacaaaagctctttataccttagccaaaaataacaagctgtaaataacgtaactttttcattgaaggagtaattgttattgaaacaaaagaaaaaagatttttttcaccaccaaccacatttcttaaatgaaagaatcataaaagctaatgcccaagtctacacccgaggttttagtaataaaatgctggggggtaccgtcgctttttgctaccctttggctacgcagtaaaataataacggctgacaactcatagagtatcagccgttatttgtacccagacccgcatttgaaatattaaatatgggaacattaaattaattctattaaacctcacaattaaatataaatcacttgtaatcaataaaataaagaagtgttacatttgttctgattgaaaataataaaaatatatttaggatgattgggaacaatttgggaacaaattagtatctttgcaatagaactaaaaacaactattatgaaggttactgcattcattcgcaagacagcaaaaaagaacgatacagatagtatggcaactatctattttcgtttacgtgatggtaaaaaagatattaaggctgcaagtgagttagttatcaatccgaatcattggagcagtgaaaagcagggctacaaggacagagtagcattggtttcagaagagaacaaattgcatttgtctcaaagcgttcaggatataatatcaacgatatccaaacaatacacggcagaagctaacaatgaatggttggctatgattattgacaaatatcatcaccccaataaatataagacagaagaagagttgatgcaggaaaataaacctaaacttttggaactcttcgccaaatttcttgttgaacataaattatctgcggtacgtgtgaagaactttaaggttattcaacgttctttggcacggtatgaaatgtatgttagaaccattaaacgtggatatcatgattttattcttgatgttgatgaggtgactgctgacacgttaagggatatgtgggatttctttgaaaatgagtatatctactatgagaaatatcctaaattgtatgagacctttccagaaaaaagggttcctctaccaagaggtaagaataccttaatagaccgattttcccgtataagaacgttctttatatggtgctacgataagaaaatcacaaccaatcgcccatttgatgagtttccattagacgaatgtacctatggaacaccgtattacattaccttagatgagcgtgaccaaatatttgatgcagatttatctgaacacccacaacttgctattcaacgagatatttttatttttcaaactttgataggttgtagagttagcgatttatatcggctgaccaaaagaaacatagtcaatgaggctatagaatatatccctaaaaagaccagagagggtaatcctgtaaccgttagagtacccttgaatagcaaagccaagataatattagcacgctatgaggattataaaggagctaaactatttccattcatatcagagcaaaaatataatattgccattaaacgtatttttcaagaagctggtgtagatcggattgtaacgatcttagatcctctgacacatgaggaggtgaagcgaccgatatatgaagtagcaagtagtcatttggcaagacgaacattcattggtaatatctataaaaaagtaaaagaccctaatctggtttcagcattatcaggacataaggagggaagcaaagcctttagacgttatagagatatcgatgacgaaatgaagaaagacttggttaaacttttagactaaattctacgatgaaagaaagttttgaagattttaagcgactaattaaagagtggcttgatacacaccctaaagaatacggttcatttattgaggaaatgaactgtaaaaacaatgctggttttcaaaaagtctttatgctagtaataaagtatgtaccgaaatacaaagacgaggtcaagaaaagaatgttcaatgatacagtaagggatttttcttctttggaaaatatgttaactaattcagaccttgcggagcgattggtacatgaatttcataatactgacaggaaatcaatagttccagcaatgctcgcatggttatattttggtcgtagctatgaatgcatggtagaacatggtgaaaccctaattcaaaacaataaaaccaaccgactacacaaatggctgctttctttaatggtaaaatatattattcacagaagtatatcattgggggaaagaacaaaggaagattggaaagagtttcaacaataccagaaagctgtagaatctgatggacttatcgaatctgctttagaagaggaagcccccatcattgataaaccagccgtaaatagtaaaaggcgtggcagacctaaggatgagagaactttagcagaacttctaaagcctgtagaaaagaaagagttgctttcaaaaattagaactcggatattgaccaaacctacagagaaagatattgtttacctcaaaatagctttggaagaagaaaacttgcttagagaatgtgatattgcaccattctatagagcattatctgatcattataatattcgcctgatagggcttcgaggtattcagaaagcctataaggaactttctgaaaccataggaaaaacaggaataaggttgatagatagaggagaagaccgtacttcgatagatgaaattaaagcctttctatcagaataaaagttcgtttaattcgcttaatatttatatgaattaagcgtttaacaaaatgttgaaaatcaattatttaatgatataaatttgcagtcgtcatctcaaatgaggtgacgactttttgttagttaaacccaccgacaacagagagtcaaacaagcaggtggaatctaaaaattatgaccgatattttgtctatcattaaaggttctaatgcacatgtgcgattagaagtatctggtgaggatctgttggcattttccaacaatcttattaaccgtgctaaagacgagctaacaactattgtcgaagaagcacgtaaggaacgatttctttcaaaagaagaggtaaaacaactttgtggtgtctgcgatgcaaccttatggcattggggtaaaaagaactacctgaagccaataaaggttggtaacaaagtcagatataaaatgtctgacgtgcagaggattttaggaaaccatactccaaacatctaatattatggcacaggaaaaatttatccgtgttggcacgaccttatacaaaatcgtgaaccaaccacgcatcaatggcggttttgtcaagaagcgtatcgtgtggaataatgaaacgctacggcaggactatggaaaggatttcattgccactgtcccgaagtacgatggcttctgtactgtacccaatcatgtgaactatcaacctgtggtcgataagtttcttaatctctatgaaccaatagaacaccaaccaaaagaaggagagttcccacacattgaatctctgataagacacattttcggggaacaatacgagttggggatggactacttgcagttgctctatctccaacccgtgcagaaactccccatcctactgatggtgtcagaagaacgcaatacaggaaaaagtacatttcttaactttctcaaagccgtttttcagaacaatgtaacctttaataccaacgaggattttcgcagtcagttcaatgcggattgggcaggtaaactacttatagtagtggacgaagtactgctcaaccgtagggaagatagtgagagattgaagaaccttagcactactctttcttataaggtggaagcaaagggcaaagaccgagacgaaatctccttctttgctaagtttgtgctgtgttccaataacgagttactcccagtcatcatagacgtgggagaaacccgatattgggtaaggaagatagagcgtcttaaaaacgatgataccgacttcctgcaaaaactgaaagcagaaatcccagcctttctctatttcctgcagcaccgaacgttgtccacccacaaggaaagtcgtatgtggtttgctcccaaactgacctttactccagccttgcagcgcattatccggagtaaccgaaataaggttgagttggaaatgtcagaactctgtttggaagtgatggatcagatgactgttaccgagttttccttctgtatcaatgacatggtgtgcctgctgaacaacacaggatgtaaggctgataaaagtcaagttcgcaggatagtgcaggatatatggaaactcactcctgcatccaacacgctgacatatcttacctatcagatagactacaacagcctgaggaactactcacccatcaagcggacaggcaggttctacaccgtaaccaaagaacaactcacgaacatgtaattatcattttgatgaaatgatgaaaaataaacataacaaattgactgataatgcctatccagttcatctttccactcatcaatataaaagaatgatgaaaggattctttgatactgcccaaaagagaaatgaatttagttcctcttttggcaggtatcgggatggaatttgcgaatccttttcccgacttcgtgtagtcggcaacatacttttgtccgcacaaaagtacaacttgctaaacaaattctatctgggtattgaaagagtcaaaaaacgatgtcgtgatttcattaaaaacagagaatcccaaatagagaaatcaagaaaagtcgaaatgacaacattatagaatgtgagttattctttatttttttggtaagttttatgatgaaaccatgatgaacaggtaacctgtttgttatgaaacgattatgtgtattttcatcaaatcatcaatttttcaaaccattcaaattcattgtaatatgaacatacaagaaattaaaactataaagttgcaggattttcttgcaagtctgggatatactcccactaagcaacaaggcaacaagctgtggtatctttctccctttcgtcaggagagccatgcttcattcaaggtaaactccgatcgtaaccaatggtacgacttcggtattggcaagggtggaaacatcatagacttagcagaactgctctacaaatcctctgatgtgtcgtatcttattcgcaagatagaggataatgttcccaattgtacatccatattttctacatcatttgcagatattaaggagaaacagcaaacaaactattttgagaatttacaaatacttcctttatctcacccagctttgatgagatatctctgggacagatgtattgatttggaggtggcatcttctgtatgtaaggaactacattatgactccaatggcaaacattacttcggtattggttttcccaatatcgcaggtggctacgaattacgcaatccattcttcaagggctgcattgcaccgaaagatatcagtcatttctatgccgacgagccaaagaaagtctgttttcttttcgagggtttcatggacttcctgtcactcatgacgctgaaaaggaaagaaaatccacagaataccggactaaggcaacaggattatttgatactcaattctgtaacgaatattcataaggcgatagagagattatcacgctatgacagtgttcaatgtttcttagacaatgacgatgcaggaagaaatgcctacctgcaattatcaaaaagactacgagattctgttacggattcatcaactatatacaatggtttcaaggacttgaacgagtatctgtgtgctgaattcaaacgttctgagaaagcagaaatcaagaaaactaaagggattaagcgatgattacaggaatatgttccgcataatctatttttcggggagcaagtttatgttttgggcataccaaaaccacttgctccacctcctatcactcggtttggaggattatcccgttggtctccatcaaatcaataaacgaaacaagtatgataagaacagaatataaaaaaggtggtcgtccaaccaagggcgtagccgaaaagaagaaatattgtatcacggtgaaactgaatacgcaggattactatacgctcaaaggcaaagccaaaagcgcaggaataaccatgagtgagtttgtaagaaaagttcttgacaaaggaaatgtcattgaacgactgaccgtagagcaagcagacttcatccgcaagctgtgtggcatggcaaataatctcaatcaattggcacatcgtgctaatgcggaaggatttcataccattgctcctttccataaaatcatcattagcaagattgatgaaatcctaaatctgatacgaagatgattgcaaagataatgaaaggttcgggcttcaagggtgtaatcaattacatccttgaccagaagaaaggaacagaactcattgatagttctggagtgagaacagacagtatcaaccatattgttcaaagtttcatcgaccaaacagaacttaatccgcgagtgggtaaggttgtagggcatatttccctaagtttctctgtacaggattcttccaaattaagtaacaagttcatggcacaaatggctcgtgagtatatggagaagatggggataaaagatacacagtacattatcggtcgccattttgacaaagagcaccctcatgtgcatatagctttcaaccgaatagataacaacggcaagaccatctctgaccgtaacgacaggttcagaagtgaaaagatctgcaaggaactgaccgccaaatatgatttatactttgctgatggcaaggagaaggtcaaggaacatcgcttgaaagaacctgataagaccaagtatgaaatctatcaggcgttgaaagcagagattgctcagtgcaggaattggaaagaccttcttgctcacttgaaaaagcaagatattgatgtccgctttaagttcaaaagcaactcacaggaggtgcaaggtatcatctttgaaaagaacggttatcatttcaacggttcaaaggtggataggggtttcagttattccaagatagactttgccctgcaacaaaataacagggaacacgaacagcagatgcaaggaacgataaatcttatatctaatgttgcaagtgttacgagcgaaattaccaacaacctcatagaaggaggattggatttgtttcaaactcatggtactgtccctgcggaggtttacaacacacttgataaaaagaagaaaaagaaaaaacgtaaaatacatttataactatggctgataataatacatttgtcctctttgaggaaatcaaaaacaaactggagacaatttacagggagctaaaggagttgaaagaaaaggagaacggttctgtttccctccctattcaatctacaccagcacaaagtgatgagcagaaagaacaggaattgctcaatcagtatgagcagcggacaaaagaagtgattaacaagtatattagtgtgcaagtgcgcatcaaagacgaggaggctaagtccatggacaaattggtggcaagtgtcttgaccatgttgcacgagtggcaggagcagaaagagcaaccacaaccgcaggaactgcttcacaggcatagctttgacatcaaatcgtcaagagtctttactactgtggtagctgtgtctatcatctgttttatttctttggtcggtaactacttcttgtggcaaagcaaacagcaatgcaaagacgatgccttgaaattccaaatcatcagagtttggagaggttgtggtccaaaggaaatcctatggctcaatgatgtgttcgatattcatcgcaatactgcaacaattaaaagaatcaaaaaacatacagatgattataatgtgggactgaaagcaaaagcagatagtctaatgcagaataatctacaaaataagaaaggcaaatagaattgtagatataagacttttgaaggaggagaaaatatctcctcttttttatttcttatgcaagaaaatttactatatttgcaaacaatcatataatatttatggaaagtccaactaatagaattaaagaggtgcttatcgagaaagggattaagcaaacatggcttgcagagaaactcggtaagagtttcactattgtcaactcatatgtttgcaaccgtcgacagccaagcctagaattgctatttcagatagcagagatcttgcaggttaatccaaaggatttgattaacaccccagatgagtaataagaagtttttcgatttacatcaagaataaagttcagacataataaaaaagaatcatggcaaagcaaaatacagctgatatcggatttgaaaaggaaatatggaaagcagcagatttgcttcgtggcaatcttgatgcttccgaatacaaatcggtagtattgggattgatttttctaaaatacatctccgataagtttgaaaccaaatatcaagaattagtcaataatggtgaaggattcgaggaagaccgcgatgaatatatggcggataatattttcttcgtcccacaagaagcacggtggagtgtggtagcaaaagcagcccatacaccagaaataggtacgacaatcgacaatgccatgcgtcttattgaaaaggagaatctccgtttgaaaggcattctgcccaaaaatttcgcccgaccagaattagacaaaaggcgtttgggcgatgtggtagatttatttaccaatattcaaatgaaagaacatggagattccaaagatatattgggacgcacatacgaatattgtctttctaaatttgcagaagcagagggtaaattagcaggtgaattttatacacctgcttgcattgttcaaacacttgtcgaagttctgaaaccttatcacggacgagtatatgaccctgcttgcggatctggtggaatgttcgtacaatctgccaaattcatagaaaggcatcaaggcaatatcaaagatatttctgtctatggtcaagacagcaatcctacgacatggaagatggctcagatgaatcttgccattcgaggcattgaggctgatctgggtaagtttaatgcagatacattctttgacgaccaacaccccacattaaaagcagattttatcatggctaatccgcctttcaatctcagtgattggggagcagacaagttgcaagacgacgtgcgttggaaatttggcattccaccatcgggcaatgccaactttgcatggctgcaacacatgatacatcatttatctcccaaagggaaaataggtatggtattggcaaatggttctttatcttcacagacaggaggagaaggaacaattcgtgaaaatatcatcaaggccgatttaatagaaggtatcgttgcactaccctcacagttattttatacaacaggaattcctgtttctctatggtttctcaatcgggaaaagaaacagaaagataaaattctgtttgtagatgcaagaaacatgggaacaatggttacacgaaaacttcgtgaacttcaagaagatgacatacagaaaattgcagacacttttgataaatataatgatggtacacttgagaatgaaaaaggcttctgtgcagtcgttacacttgacgatgtggcaaaacaagaccatattcttacgccaggacgctatgttggcatagcagaacaggaagacgatggtattccctttcaagagaagatggataaactcacaaccgaattatccgacttgtttgcacaatcgcatgatttggaggacgagatacgaaaacagttggcaagcataggcttcacaatcaagtaaaaggcagcatgttcttccatattatcaatccattaatatagaagaacatgaaagaaaaattaattttagaaattagcaatgcaatggcaggtatactaagtgtagaacaaatggcacaactcaatggagtattactgcaagtaatcagtaactacactatttcggcagacgatgagcagatgcaagagaataatgcatctaatgaacgtctgttagagatattcctgtcagccaagcaagttgaaggttgcaccacacctaccataaaatattatagttcgaccatcaagcaacttttcaagagaatgcctaagaaagttacgaactacacgacagaggatattcgtgcttatttggctgtatttcaacggaaacacaaatcgagtaaagttacaatagacaatatccgtcgtatcttttcatctttcttttcatggttagaggatgaggattacatcattaaaagtcctgtacgtagaatacacaaggttaagacaggaacacagattaaggaagtccttacagacgaaaatttagaacaactgcgcgataactgtacaagggtacgagatttagccatgatagacctcttggcttctactggtatgcgtgttggagaacttgtaaagctcaatcgtgaggatataaacttcaatgagcgtgagtgtatcgttttcggtaaaggcaacaaggaacgtatcgtgtatttcaatgctcgtgcaaagattcatttgcagcaatatcttgcagagcggaaagacagaaacaaagcattgttcgtgtctcttgccaaaccacacaatcggttacaaatatcaggagttgagacaagattaagaaagattgggaagctgtcaaagattgtccgtgtccatccacacaagttccgtcggacacttgcgactatggctatagataaaggtatgcccgtggagcaagtgcaaaaactccttgggcatgttaaaattgatacaaccatgcactatgcgatggtcaatcaaacaaacgtcaaactctctcaccgcaaattcatcagttaaatcaaaatgcaaacagcatatcacacatatagctcatatcaaccgctatttcataaaaataggcggataaatgataatttagagcagcaggctcaggcgttgttcaaatcttggtttgtgggttttgaaccatttaaggaggggaagtttgtggattcagagttagggttgatacctgaaggatggcaagttgaagaattgggaaatataacaaactcaataacggagaaagttggcaagcgaacagacataaaagttttatcaccagtctacactggagaactacttctttcagaagaatacttcacaaagcaagtatatagtaaaaaccttgcgaaatatattatggtggcgccaaatgattttgcatacaatcctgctcgtataaatatcggttctattggaatgaatacatttgatttcagtggatgcgttagccctgtttacatagtctttagatgtgagaaagaataccatcatttttttaacatctttaaagccacaaagaacttcaaagaagaagtcaacacaagagcaatcggaggagtaagacagactttgagttacaaagatttctctttaatcaagattgtttatccgccaaaagaggttgttgagcaatttaataaaatttacagtcacattatgactttgattaaaaaaaatgttttagaaaataaaagacttcatcaaacaagagatactcttcttcccaaactgatgtctggcgagctgaaaattaatgatataaacaactaaattcccatttataaaataatatgaaattattttcagaaagatacaattacataaaggtagcagatgtgattataagagaaaaaatcacacctgagattcaaaatgcaatctgttcatgctatgataaattgaaaggggtcttcatagaagccgggacatgctatagtgatacgccctatattgagatggagaaatatctgtggacctattttcttaatcaacgtgagggaaacttttatgaaggaagaaggtatcatattgttgcaacgcaatttgtagaggatgagaataacccttggtatagaaagttggacttaatagaattcaccgccaaatatttgcatactctagatacaaaatacgataggcgtatgattgttttccattcgtttgttgagcaactaaacttcgaatttaaacgattaaattttgcatatagggttgttaatacagaaatagtcgaaattacttcggatgaagaacttgcagccgtagaatcttctatgaaggattctccacacaatataagaatgcatttgagtaaagctttggaattgtatgctcaacgacctactggagattatcgaaattctattaaagaatctatttctgccgttgaagcgtattgccgtgaggttacaggagagaagacattaggcgaggctcttaatataattaatggtaaagggttggtcatacctcaaattttgaaagttgcatttgaaaagttgtatgcatatacgaatcaacctaatacaggaatccgacacgctttgatggatgagacgggcacttatactccagcttcagaagaagcattgtttatgttggtgtcatgcagttcttttattaattatctaaacaaaaaactgaaataatttcatatggaagaatacgatagaatggaaatacagcatatttgctctaatatatgtagtggcggaactcctaaaagtaccgttgaagaatattatggtgggattattccttggctaaacaccaaagagattaactttaatcgtatctataaaacagaaaagacaataacagacgaagggttaaataattcatctgccaaatggattcctgcaaaatctgtaattgtcgcaatgtatggagcaacagcggggaaaaccgctattactcaaattcctttgacaactaaccaagcatgctgtaatcttactattgattctacaaaagcggattataggtttgttttttatgctttatgtaatgattacgcttatctggcatcgcttgcaaatggtggagcacagcaaaatctgaatgcacagcaaataagagaatttgagatgccttatccttctcttgaagagcaggaatgtattgctgacatcctttcttctatagacaataaaatcgatctgaaccgccggataaatgataatttagagcagcaggcacaggcgttgttcaacgaaatgtttccccatgttactgaaggagaaaatatgataggggatctaattatgcctaaacgcggaaaaggactcctttccaagaatgcaataaaaggagatataccagtagtcgctgggggtatagaacctgcaacataccataacctagccaatacgactgctcctgttttgacaatagcagcatcaggagctaatgctgggtatataaactgt

SEQ ID NO: 100 - DNA, 113906 bp, Prevotella timonensis
  source 1..113906: mol_type = genomic DNA
tttttccataaagttacgctcatccaaccagaagtctatctgggaaatgttctcttggatatctatcacatcaaaataatctgcgagtatctctggaaagatacaacgcaacaattgctcggtcttcatgatgcaaagataacaaatacttatgaaattatgtgcatgaagagaggagggatgcaactgggttttacgactgaccccttattagtaggcgatagtggcattaaaatagcaaggatatagttcaattgtaaacagtaaaattcatgacttgatacttgtgaagtactggctttacacaaagaaataaaaatatgaatcaaacaattttgcaaggtttccactggtatacagaagggaacggagtgttttataagcacatgaagaaaatttctgatcagcttcagaagttaggtattaccatggtgtggtttccaccagcttataaagctgcaggaggtgccaactctgtgggatatgacccctatgacttgtttgacttaggagagtttgaccaaaaaggaggtattcccaccaagtatggtacgaaagacgaatatattgatgcctgcaaaaccttgcagagtaaaaagattgcggtaatggttgatgtcgtcttgaatcataaggcgggcggagacgagacagagcatttccatgtggtaaaagttgatcctaacaatcgtcagaagaacatttcggcaccctatgaaattgaaagctatacgaagtttactttcccaggtcgaggggacaaatattctaatttcaaatgggatttcacctgtttctctggtgttgattatgctgtgggagaagacaagggtatctttcaaattatcaatgaccatggagacggttgggaatctgtagtagggaatgaaaaaggtaactacgattacttgatgtacaatgacatagagcatcgtaatccctatgtaagaaaggaactcaatgattggggaaagtggtatcatgatcaagtattctttgatggtgtgcgcttagatgccgtgaaacatcaatcccctaagttttataaagaatggttgactttactccgttcgaacacgggaaaaaatatttttgcagttggtgagtattggacgccaggcttattgccgttaatgttagagtatctaaaagctaccgaagaatgtatgagtctgtttgacgcatctctgcaacaaaatttccatgtcgcttcaaagagcggagattcatatgatttacgtcgaatctttgatgaaaccttggtttctgcacgtccagataaggctgttacggtggtggctaatcatgacactcaacctttacaagccttagaggcacccgttgagccatggtttaagccgttggcttacgcccttatcttgttgcgacaagatggctatccttgtgttttctaccctgatttgtttggtgcacattacaaagacacagggaatgacggtcaagaatatgagattttcttggataaggtggatggtattgaaggattgatgaaagctcgtaaggagaatgcttatggattacaacgcgattattttgaagatgcaaattgcttagggtggactcgtgagggtgacgggtttaacagaggctgtgccgttgtgatgagtaataaagatcaatacgaaaaatctatggaagttggaaaggcttacgcaggacagtatttctatgacttattgggtcgatttgatcacaaaattcaaattgacgaaaatggctggggtaattttacatgtccagcaggaaatgtttctgtttgggttccagcgtgattcctttgctctttcttataatagtgatggggaatatgatgcaatttgttcatattccccattgttggaaggataggatgatgttcatcatagcatcagaatcgagtcatcacttcaatgacaagcttatctttttctgatatttttgcgaactgattctgctcataaaagtacttttcataattcagacggatatcagagataaagggtttgtcgatgcttaatgttacaccaccagtgagacgcgaacgtttatagtcgttgatgatgagcgttccgttttcatctttcacaccattcttataacggaacccgtcactatgatcggacatatagtcataacgaataagaggagacacctttgtaaagaaacatcttcttagtggaatgtcataattaataaaggtattgacagaattaacatcatgaaaagcttggtgtgcatacgtcttgtgaagatattccagttcagcatgccacccatgagcatgataatacatgcctgcatcgtacatcatgacagttaaatgtgctgggctaatcttttgagcactaagggtgaagttccatttccctgcaataaacgcttgtaatttggtggagaaattaattttattcgtccaaaaatctacttgatgtgtcaggccagaaccattgaagataccaacctcaagtcgcatagggacgaacatcttaaaattatatcccgctgttaagcccacatcgcgcacatcgcccacctgtttagcaatgaacgatcggttggcaaaatattgttgatggggtgaccggtgtgcatctatcgtaaacggaactcgcatttgtccaatcgttatttgcaaacgttccaaaggtgttatcttggtataggcatccaacatccttatttgtcccttgtcagagaggtctatttcggttttgtaagatacattgtttgctacgttaccagataaactaaaccgagcagtacgcacttgaaatctgcctttttggtcttgaggttggtactcatacttacctctaaaagtaccgtgaatatggggcgtgtaatctacgtcattcgtgttctgcgaaaaacaagacaagcagaggggtatcatccacattgttagttttagggctctcatgatttatttgagttgagtgatgcttattttgtcacaaaattacatgttaacttttttattgaggtaataaacttgttacatttttatgacaaaagataagaggttgcgcacaacaaacgatggaaagaatcctatttataacgacagtcacataaaaatgtaatataattgtaaaaagcaatacaacaatatttcgatattatatcttaaatttgcaacaaactaattgtatcgttgtatgaaagagaataaaaaactcatcaaggatgtcctcaagaaaaccttaaatagagaggataaattcgagaatttggtattaaatcttgccttgaaaaaaatgacaggagccaaggaggatgcggctggcgtgttctattccaagaaacaaaagcgtgtcattatggcatcgaagaccttagaaggtgtctacgaaatccctgaaggaactgaaacaattgatgataatgcgttctggggatgtgcttatgtggaggagataaagatacccgagaccgttactcgaattggtaatgaggcttttgccagatgtatgtcattgaaaaaattggtgattcctgcatctgtaaaaactcttggatacaatcctttcattgatctcaatagtcatgtagtagattgtcaatctcctcatttcgtgattgagaacaaattgttgtactcagctgatcagaaaacgctcattgcatgcttaacggatgcagccatggtcatcattccgaagactgttgaacaaatctcggattttgctttcaaccgtcgtcgaaaccttaaaaaagttgtcattcctgatacagtaaagactatagggagtgatgctttttctgactgtgatagtctcgaagaaatcgtgatacccgcatcagtaagcaccattgaaggacacgcctttgcggaatgcgataaattgaagaaaattaccttctttggagtagtagagcatgttgctcgtacgaccatttctaattgtgagtcgctcaagaaaatcattgttccagagggggcttccaagcattatattaaacagctccatgtacctttagagttggaagacattgtaatcgagaatgtgaaaaagggagacaaacatgttgaagtatcggaagaataagcttctctcttgcaattttcatcgtcaataataatcaagactgctttatgacaacacggaaaaataataagaaccacagctatgttgagcgtgatgtaagttggatgtactttaatcatcgtattttacaagaagcacaaaaagaacatgtgcctctgttagaacgtctttcattccttggtatctattcaaataacttggatgagttctttcgagtgcgtgtagcttctctcaataagattttagataatggcagaattgagactcaaaccgaaaagaaaatcaagaaaaccatcaagacgattaatcgtctgaacgaagaatacaacagagaatatacccaggtcatcaatcaggtatttgacgatttgaaaacacatcatatccgattgcttgacgatacacaactcaacgaggagcaaaaaactttcctgaccgagttttattacgataagttgaatggctctaccaatcctatatggctctcacagatagacgacatcagcgtgttggaagacaatcgaatctatttaatggtaaagcgaaccacagaagggaatcataagccaaagtatgccatcattaaagtgcccgatcgcatttatgggcgttttatcaaaataccatcttccgacggttatgacaactttatgtacctcgacgatgtcattcgttattgtttgccacttgtctttattgggataaaaggctgtacgtatgaagcttattccttcaagttcacaaaggatgcagagatggaggttgataacgaatctgattatggagtcatggaacgcatcgctataggagtgagcagcaggaaacgaggagaggctattcgattggtttatgacaagaatatgccttcagatttaaagaaaaaaatgatgcatcgcttgaatataaaagagttggacacacaattagctgcgggcagatatcaaaatcacaaagacttaatggattttccttcatttggtcacaatcaacttagttatcccaaatggccaggaatactgaagccagaattcttgtcagatgacagtatctttgaccttatcaaggcgaaagatcgatttgtccatgttccttaccattcttttaatggatatattcggctgcttagagaggcagcgttgcgcccagaggttcaggaaattaagacgacactttatcgtttggcaaaggattctaaagtggtcaaggccttaatctgtgcagcacaaaacggtaaaaaggtcacagcagtcgtcgaattgttggctcgttttgatgaagagagtaatatcaagtggagtaaacgaatgcaagaggagggtgtgaatgttatctttggagtggaaggactaaagattcactccaaattgttgcacatcacgaccaagtcagggaacttcgcttgtgtgggtacaggcaacttccacgagggtaatgccaagacttataccgattatctcatgatgaccgcccgtccacgtattgtcaatgaggttgaaaaggtgtttagctttatagacaaacctttttcacaagtacggttcagagagctgatggtgtcacccaactcgatgaagacgcgtattattcggatgttagataccgagattaagaatgcgcaggcaggacttgaggcttgggttaaaatcaaaatcaaccacatcacagatgctgatatcgttgaaaaactgtatgaagcttcttcagctggtgttcaaattgatattcttcttcgtggtaattgttcgttagtgcctggaatcaaaggggttagtgaaaatataaagattataggaattattgatagatacttagaacattcccgcattttgatattttgcaatggtggtaagccacgttatttcttaggctcagcagattggatgccccgaaatctgattaatcgtatagaggtcatgtctcccgtttatgacgatgatttgcagcaagatttattacgtaccattgaatacggaatgcaagatactgctaatgggcgaatcgtagatgggtttggaaccaatgaaattcaatctattcctgaccagcaacagcctttccgttcgcaagaagctttgtttcgagcttatcaaaatgagcaagaacgggcttaatatcgggaaaataatgaggtacaataattaaaaacttaaaagtaatgaaagcaaaaacatacgctgccatagatatagggtcgaatggtgctcgcttactaatcaagcgatttgatgacaatgctcccgagttcgaccgcattaaacgcgtcctattcatccgtgtaccgttacgtttgggtaaagatgtctttacattaggtaagatttcaaaagagcgtgaagtcatgatgatgcacatgatgaagggtttcaaacattttatgttattgaatcaggtagatgattatcgtgcttgtgcaacggcagcaatgcgtgatgcagagaatggtaaaaagataatgaaatcaataatgcaggaaacgggcatcaaactggaaattattcggggagaagaagaggcgcgtttgctgtgcaataacgtgattgagcaaaccaatagtaacagtggtagttatgcgtatgtagatgtcggaggaggtagtaccgaaatttcattgctgcatgatggggtgttagcggagagtcattcgttcaatatcggtaccttgcgcatgctcagtggaaaagtaaccaatgctaccaagtatcaaatgcgcggtatgctggacatgtatgctgaagagtttcctggcgcgcaaatcattggttcgggtggaaacatcaataaactctttaagttgacgcacaataaaaatgacgagaaagtcataaaagtgagtgaactaaaggagatataccaagaacttgctcaactcaacgaggaagaaaggaaagaaaaatatggtttgaaagacgatcgtgtcgatgttatcataccagcagcagaaatctttctaatggtagccagcggcttaaaatgcgatgccatatatgttcctaatatcagtttggcagacagcattgtagatggtatgtatcgcagtcaactcaagaagcggggataatacacatcgtttcattgataagacggtgctgttcagaatttctgatacagcaccgtccgcatgatttccatttattttaaactcttggctacgctaattgcttgaggagataggcacacttctcaggattccctaccgttttacctttatcgcacgacagttttacgcagtcgtgccattcgcgtttttctgtaattcggctctttgttagtttcacaacaatattcattggttccacattctccacatcacaggttaagaaggtccccatgccatagctgtcttgtatgcgtccattgacatattcgtgtattttgattgcctttttgatgtcgagtccattgctatacaccacttgcttggttttaggattgatacccaagcttttgtatttctcaataatcttctctgtctgttcttgctcgtcaccgctatctacacgtagtcctgtaaacatcatagccatgcgtttggatagattattgaagaaaactttatcgccaaagcagtcgtatagataaataccattatcgccatcgtagacgtcactaaattttttcatgacattaaagttgcattcaaagacaccactgatattttcttcaaattgtatcagttgatgactcatggttccgataggcgtcaaatcgtgcttcattgccaaatacacattgcttgttcctgtcaacttccctgtccatttgtgatatccagtctcgtcttgatagcccccttgttcgtaagtctctttcattactttcactaccatgtcgtgatgatcgaacgagaacctgcgacgagtacccatatctcctaagacaataccatttttcaatatctcccttgtcttttctatggctctttttcgttccgtttccaagttgtatctctcaaaatcaccacgtagatagtgcatcaattcggatatggtagccaagataggcatttcccacataatggctgaataccacttgccgcgcactgtgatttgcaaatgtcctgcttcgtcctgcgttaccgttacttcgtgaggattgaatcgataaccacgaagaaatgtaaaataccattcgggaaggtagtacatcctacgtttcatgaacgaaatctcctcctgcgttatcatgacttgcggcatatagcctaattgttcttccaccaaccctgcaaatccttctggataaatggtgtcgttgcggtcaaagaagttgtattctacctctgcacggggatatttttgtaaaatataatattggcaactaaaagtataggcgtcgttgtctgtaagatgactaataatttgtttcatattcttaggaaatgtctattcatcggttttcggcattgtagcaaacgcaaagatacatattttcttgacaaatatcaccttaagggattgattattgaatcttaacgaaatattttttattcccctttttaatagtcgtacctttgtagaaagacaataataggcatcactgttctagataaaggagcaacattcattttgaacaaggaaaagaaatctgcgtatgaatcataaaataaaagcgttgttttttgatattgatggcacactggttagttttcaaacccaccaaatacctgcctccacagtacaggcattagaggaggcaaaggctaacggtgtacaagtgtatatttcaacaggcagaccgttgtcgttaatcacggttcttggctccattcaacatttgatagacggctacatcaccaccaatggtgcttactgttttgttggaaatcacgatatttgccagcacgctattcctcgagagagcgttgactttgtcatttcgcaagctatagaacagcagttttgctgtgtcttggtgggaaccaaacatttatgtgtgtttcagcaagatgaaacgttcaatcaagttttcttagagcttcttaaggttcagggcatagataaagcggtatcacaggaggtggttttacaagaacctattttacaattgagtccttttattacgcaacagcaagaaacagaactgatgagtaagcttcccacttgtcagtcgggacgttggcatcccgcttttactgacatcacctccctttctgctgataaggggcaaggcttgcaagcgatgaccaactatttgggactttcgctcaatgagacgatggcttttggcgatggaggcaacgacattactatcattcagcaggcaggaataggggtggctatgggaaatgccgtacctgaattaaagcaggttgccgattatatcactacttctgtagacgagcatggagttcgagaggcactcatccattacggcattattgccaaagatacgctgtagcagtacttcttcattttctctaatggtttttctttgacagaaaaataggattcttttcactcttatgttcaaatcctatcgttcttttgtctaaaagctgtatctttgcaacagctaattatgttgatagacttatggaacagaaactttttgtttataataccctgacacgtaagaaggaactcttcgagcctttgcatgcccccaacgttggtatgtatgtgtgtggccctactgtttatggcgatccgcacttaggacatgcccgtccgtcgattacttttgacatccttttccgttatctcaagcatcttgggtataaggtgcgctacgtccgcaatattactgatgtggggcatttggaacacgatgccgacgaaggtgatgacaagattgagaagaaagcccgcttggaacagttggagcccatggagatagcgcagcattataccaatcgttaccatgctgctatggaagccctaaacgtgctgcctccaagcatcgagccgcatgccacaggtcacatcatagagcaagaggaactggtaaaacaaattcttggcaatggctatgcttacgagagcaacggttcggtttattttgatattgagaaatataacaaagatcatcactatggcattctctctgggcgaaacttggacgatgtcatcaataacagtcgtgaattggacggtgtaggcgagaagcgcaaccaagtagactttgccctttggaagcgtgccatgcccgaacatatcatgcgttggcccagtccttggagcgatggtttccctggctggcactgtgagtgtaccgcgatgggacgtaaatatttgggcaatcatttcgatattcatggtgggggaatggaccttgtcttcccacatcacgaatgtgagatagcgcaagctgtagccagtcaaggcgaccagatggtacgctattggatgcacaataacatgattactatcaatgggaagaagatgggaaagagcttgggcaatttcattacgctcgaacagttctttacaggcgaacacgatagtttggaacagccctattcacccatgacaattcggttcttcatcctatcggctcactaccgtggaacggtagatttttccaatgaggcattacaagcaagtcaaaaaggtttagagcgtttgatgaatggtgtacacgatttggaacgtttgcaagcagcggcaacctcagacgaggctacacataagtttgttgccgaattgcgccaacagtgctatgatgccatgaatgatgatttgcaaacaccagttgtcattagtaagttgttcgaggcgtgccacatcatcaacactttgctcgaccacacaggcagcgttgatcaaaaagatttagacgaattgaaagaagtgatgcacttgtttgctttcgacttgttaggacttaaaaatgagcaaggcaacgacaacgatgcgcgtgaagctgcatacggaaaggtggtagacatggtgcttgagttaagggcaaaggcaaagcaagctaaagattgggctaccagcgaccaaatacgtgatgccttggctgctaatggcttcgaagtgaaagatacgaaggatggtgtaacgtggaaattgaatagataaccccgtatttcttgtatagtttatcggcacagcgagtaagatagaataccgttcaaggtcttacttgctgtgccgatagcatttggcgacttgctcactcaccgctcaattcatcgcccactacttcgtaacctcttctccaaagagggttgctgaggtacttctcatgatgcgcacacgtaccgtttcaccgatgtgatgcttgcctttgtcaaacactaccatcttgttttgctctgttctgccacagagttgttctctgctacgcttgctaaatccttctactaacacctcaaactctttgccttcatcctttttattagagatggcactcagttcggtttgtagatgtatcatctcgttgaggcgtcgaatcttctcctcctcgggtacattgtcgggcaaatgtttcgaggcgtaggtgcctggtcgttcagaatacttgaacatgaaggcagagtcatagcccacggtgcgcatcaattggagcgatagttggtggtcttcttctgtttcaccatgataacctacaaatatatcggtagaaatgccgcaatcgggaatgatacgttgtatggcacgaatgcgatccatataccattccacagtgtatttgcggttcatcagctttagaattttgttgctgccactttgtactggtaggtggatatgcttgcatacattgggctcttcggcaatgacgtgcagggtgtcgtcgctcatgtccttgggatgcgatgaggtaaaacggatacgaatatcgggtacttcatgggcgacacggcgcaacagttgcggaaagtcaatggtgtgggcagcaatagtctctccattgtccaactgtcgttcgggaacagtgaagcaatatgaattcacgttttgtcctaagagtgtgatttccttgtaatgcttgtcgcgcaaatcacgcacctcacgcaggatgctctcgacatctctcgaccgttctctgccgcgcgtgtaaggaacgatgcaataatgacaaaagttattgcaaccacgcataatgctcacaaagccactcactttgcctatcattaggcgttgaggcactacatccttgtaggtctctgtttttgaaagctcaatatcaatagccttgttgcctgtctcggcttgtgccatcatgtcgggcaagttcagatacgagtcaggaccacacaccaagtcggtatgatgattgttcagcaagtcgtctttcacgcgctctgccatacagcctaacacacctaaaataagatttctacctttcttgcgttctgcatgcaaggcatctaagcggttgtatattttgttctcagcgttctcgcgcacactacatgtatttaagaagatagcgtcagcctcttctgcttgttcgcaaagttcgtagccagccatttgcatgaccgatgcaacaacctcactgtcagccacattcatttggcatccatacgtctctataaagagttttttcattgtctttgtcattagggtacaaaggtacaaaataattttgatatggttgtattcagtatttggtacttctctactatgatttctaaagaaattcatgctgaattatctttacaagtgcctctccataattagcgtatttgtcagcaagtggggaagtggtgctgaatatgcgagtattggagaagtttggtcttgcttgataatcagtaagttagttgttttgttggtttttcgtgccacctaaagcaatgctttaagcccattaactcatggagataacactgttagatggtgctttcagcagtgttataaacacgagatagcgccattaagtgcatgttttagcagattttgttcataaaaacaggaaaaatgactccttattttacatcaaataacccatttttttgtgtagaatgaggagtgtagaagtgttaaatttcagtcattttttaggacaaaagtgcatgtagagctaccccttcatgttcctactgatatacattaaaaaaaagtaaaaaatcactcctgtgatgagaccagcaaaggcatcaatggcataatgtgcctgaatgtacacggtcgccatacacaaaaagaggtaaaatgggagcatgatgtagagcaacatcctatttttggtatgccttatgagcattagacagatggtggaaatgcctacgtgtgaactgggaaaggcggctgtgggacgctcgccagcggctttggcatcctctacaagatgataaaagaagccttcgtggtatcccggactgggcaaacagtcttgatgaaagttgaaataatcgtacataggagggaagactccttttgctgcttgttcgagtccgatggctttgaaataaaaggttggacccacaacgggcagcaatacataaatggcataaaagagaaagaacgcggcagtgaggacaaaggcacttcgttggaactcttttcggtgaaaaaacaagtagaaaagaggcacagctgctaccaaggggtagtacgaagcataacccatatccatcaattcgctgatgatgggcgaggagaagtgatgtgcaaaagccagtgcaggttgcatcccgaagagttgttgctcccaagtggcgaagagatgatcaaggtttggaagtactctgttaagctcgtaggtgtcgggataccaccacactaacaaccccatttgtacgaaggagcgtatcaccttgatgaaccgacagggcaacaagcggtagactccccataaagccatggtaataatggcaatttggacacgccctatgagcattgactgtgggtttaccaacttggtataagtcaacaaaatcatgagaaacgtaaatcccatgtaaagaaacatagcccactctatgggtaacagtccacgtacgggtttcttttctcgtgtgaaaaagtcagaaatgaaatagttcattttgattcagttctttaagataagcaggaaaagggggctataaccaatgattttcccgataccatttaatcgtttgaggcacgccatcggacagtgtataatgtgggtgataccccaattcgtccatggttggttctatgttacagcgccagttgcgttggcgtatgatgttatatttgtctttgttcagcgtcgttgccttgcctgtatattttcccaagtattcacaaagattggcaatgaggcgcaataaccatatcggtgcatgtagatgtagacaccatggattgcccaattcctttctgataaggtcgttgaacgcattagactggtacactttcccatctgtaatgaagtatttacgaccgttcatacctcggtccaaagctaaaaaaacggcttgaaccacatcgagaacgtaaacgaaagtgaggtcttgacgttgaaagcctactgaaaaatctacgtgatttttgatgcttttggcgaccagataataatctttttcgcgtggaccataaatgcctgtagggcgtagaatgacgtatggaaaatcgttgccaatgcggtcaagatactgttcggctgctaatttgcttttgccataatgggtattgggctttggaacatcgtcttcgttgatttcatgatagggcatcgtgtccttgatagcaccaaatacacctaatgaactgaggtagatgaaccgtttcatgggcatgcgaagttggagtagggcatcaacaaggtgttttgtcccttcggtgtttactttgaaaaagtcttctgcatgcacgctcttcgttattcctgcggcatgtaccacatagtcaaacgtataatctttgagttgtttgacgagtgtttcggtagatgataggtcgagtgtaagaaaatggatacgcttgtcttggaggtattcacgtgaagaagaaggcctcacagccgcccatacctccatacctcgttgtaaggcttcgctaacaataaaactgccaacaaaaccacttgcacccgtaataagaatattcatcaataaatataattaaggtgcaaagttacagaaatatcttcgaaacccaaatttaatgcaaaatattcgatacaaaacggtgtgttatcaattcttttttgttaatttgcaattatcattataaaatagaaaacgttatgggaaaaggaaaaaaaggtgggaaacgaatgtcaaagaaacagttaagtgaaaaactggaaggcttcttctctacacaacccgggcaaacctttggtttgaaggacatctttcgctcgttgagattagacacacatcctttgaaaatgttggctattgacatcatggaagagatggcgtgggatgactttctgaccaaagtatctgacaactcttatcgtctcaacgagatggggcagattttggaaggtatattttgccgtaaagggaatggtaagaattcgtttatcccagacgaaagtgataagcccatctttgttccagaacgtaattctatgtctgctttgaacggtgaccgtgtgaaagtctcgcttttagcacgtcgggaaaagcacatcagagaagcacaagtcatagaaatattatcacgagcacgcgatcagttcgttgggaaattgcgtgtagagaaagatattgcttatcttgtcacacaagaaaatttgtttgtacacgacattttgattccaaaaagcaagctcaaaggaggaaaaaataatgagaaagtggtggtcaaagtaaccaaatggcccgatccagagcataagaacattgtgggacaagtcgtggatatcttgggtgatacaggcgacaacgatgctgagatgaatactattttagcccaatatggcttgccttataagtatcctaaagctgtagagcaggctgctgataagatttcaggcgacatatctcaagcagaattgcagactcgggaggacttccgggacgtctttacctgtacgatagaccccaaagatgccaaggattttgatgacgcactgtctattcggaagttgagtagaggcatgtgggaggtcggcatccatattgcagacgtcacacactatgtgaaagaaggttctatcatcgacagggaagcacaaaagcgtgccacttcggtctatttagtcgaccgtactattccaatgctcccagaacgattgtgtaactatatctgttcgcttcgacctaatgaggagaaactttgttatagtgtcatcgtgagtatggatgagcaaggtgtggtagcaaacactcggatagtgcatactgtcataaaaagcaatcgtcgctatgcctacgaagaggtgcaacaacttcttgaagagaatggagttaaggatggaacagggcaacctgctccccaaccacataatggtaaatatgtaggagaaaatgccgaagagcttattatgctcgataaattggcaaagaagttgcgtgaggcaagatttaagaatgatgcagtgaagtttgatagtgaagaacttcacttcgatatagacgagacaggaaagcccatcagatgttattttaagcgctcgaaagatgccaacaagctgattgaggagtttatgttgttagcgaatcgcacggtggcagaaagcgtgggaaaggtaaagaaaggcaagaaatcaaagaccttgccttatcgtgtgcatgatgtgccagacccacagaagcttgaaaacctaaaagactttgttgttaaattcggctataaggtgaaaactgaaggtacaaagggcgagatggcacgcagtctcaataaactcatggacgctgtagagggaaaagacgagcagaaattggtacagacggtggcattaagggcgatgatgaaagcaaaatacaccattcataacataggacactttgggttggcattcccttattacacccattttacatctcctattcgtcgttatccagacatgatggtgcatcggttgttaacccgatatgcgcaaggtggacggagtgccaacaaggaatattacgaagaactgtgtgagcatagttcggagatggaacaaattgctgccaatgcagagcgtgattctatcaaatataaaatggtagaatttatgggagagcatcttggtgaagtatttgatgcacacatcagcggcattcagaattatggtatctattgtgaaattgatgaaaatcactgcgaagggttagtgcctatacgcgacttagatgatgactattacgactttgatgaaaagaattatctattagtagggcgtagacatcatcataaatatcagttaggagatgccattcgcattaaggttgcacaggctaaccttgagaaacgacaactcgatttcacgattgtaaaatagttgttcatcaatagaagtagggctacttgccgtcaacagtgggggatgaaaataactttcgagtaggtgaatgtttaccacaccgacagtcagctcatgataatgaagcggcagtaatttcagtgagataacatgaagtatatagataaacatttaatggaaggtgaacaggttgtttacattccgcagttgcactcttctctttattggggagcattgtcttgggctgttttcggaatcattatcatggtgtttcctactgatggaacactcttcaaaattcagctgtcagcaagtcttatcctaattctgatcagtgttctgaagtgcataaagatgtacggaggtcgtcaatatgtactcactaaccgcagaattattgccaaaaaggggttggtgcagcgtgactcgcttgaactcttgttgcgcaaatgtgaaggtgtacagataagacagagtgtcttgggacgtatctttgactatggaacagtgatagtaactacgggtgaagccaccaactactttgaatacatcaagaatccgattgcgtttagtagtgctatcaatcagatgatagactcattgaagtcgtttgaataaatctttcatcggcagacaaaagatgttggttctgtctgccgatgataggaaaaagaaagaaaatctttgtggatatgcgtttctttatgcgttctcgttgatgaaatgtgctatttcatcaagggagtttgctatctttatttgtcggtgatagtcgcctctaatcattcccttttgtgtcaaatcatccagtagggcaatgagcgaatcccaaaatccattgatgttgtataaaataacaacgtgatggtggtagccaatagaatgtgcagaaacgatagaaaatatctcgtcaagggtgccaacaccgccaggaagtgcaattgaaatgtcactttgcgcaagcatcagctcttttctgtcactcaagttgtcgcagggaatttctatgtcgacggcatctgatacctttccattcttttcaatgatggacggaatgaccccaattgttctgccacctctttggtgtactgccttggcaatacaatccatgagtcctaagttgcatccgccaaacaccaaatcgtggtgttcttcagccatccagttgcctaattcttgcgttctttcaaagtaaacagggtcaatgtggtcgttggcggaacagaaaactgcaattttcatattgtcttttgttgtagataagatgctgaaaggaatttctttatggtctcttgatgtttttacaatttcataaattcgctgtggatacgttccgcaatagcagtgaattcttcttcagaaaagatgattccttttttatggaaatctacatcgccctcattatccatagggatgaggtggatatgcgcatgcggcacttctaaacctaaaacgacttgagccactttcttgcatggataagcgctcttaatagccttagctacctttttcgcaaacacttggaaagcagctaattcctcatcttccatgtcaaaaatataatcaacttcacgacgtggaatgactaatgtatgcccttctttcaagggattgatgtctaaaaatgcataaaattgagcatcttctgcacatttatagcttggaatttcaccagcagcaatttttgaaaatatatccataagtcatcaaatttattcaatagagatgttgtcaatacgtagatgaatggtgccagctggaatcttaatttcaacttcatcacctaccttcttgtttaataatccctgtgcaataggagtcttgatagagattttccctgctttcaaatccgcttcgctttcacttacaatggtgtaagtcattttagatttggtctttagattggtcatctctacctttgacagaatctgaaccatgttagcactcaaccgagagacgtctactatctttgcttctgcaatggtcagcttcattttgttaatcttatcttcaaggtgagcctgcgcttctttagcagcatcgtattcagaattctcacttaagtctcccttatcacgcgcctctgcaatggcagctgatgcctttgggcgctcgatagactcgagcctattaagctcggctacaagattgtcgtagccttcttgcgacatgtaagccataacgttataagtatttttgttattaattgtttttcttgaggactataaaacaaagaattccgacaatcaacttatgtgtcggaattctctttcctcagatttcttatatttatttctttttgcaaagatagcgattctttttcaattaacaagtattttcacattaattattatacatcgaaacagctttgaaatgcaataaaaaagtcataatgattgatttatatcaagaaaacagcactttttggtatttgtttgcgtaaacagttgataatattgtagtaatcctctatctttgcatcgtgtttttcatagtattagatttaaggttaacaaagattgggactcagcggagtcctttttttatgcccatacgttattgacgacactgatagaaagcccatttgtttactatcgttggcaacgtaatcaaattcctcttgtttgttaaaatatttcgtattttaaggctccataatttgaatattttgaatcaaacagttagttggtctcaaatacgctaaaaatataaagtgttgatacacaggtgtttgttaaattcatgtgctctttacgttgcttaaagcattgagttagggtggttaagtcattacttcaaggcaacaactccatgtagatatccacccaaaagagtgcttataagcgtgctaaagagttgttttaacctaaaaacatggtaaaaattggttggaaagacgcacattcggactggttttctttctaaaatcaaaaaaataaaaaacgcgatttgtcaagataattcacagttttacgacttgccgttgctgtgacttttttcctgtacatcgctctcttatatatgctggcaaaacacctcgagtactgttgaggaaggagagaccacaaaaaaaagcaaccatttctggttgcttgataagttttccttttactgaaaggagttcgacttacaaaccgaacttgtaacccaatgttacttggaatacactgttttttgcttttccgttttcccatgctttggtaataccccagttgtaacgtccgtcaatgaagacatttgcaaactcgtatgaaacacctacaggcatagagaagtcaaaagtcttgttattatagtcgttcttgccaactaagaatgcaggttgaacacctaattttacagccaatcctggtacaacatatacgttagccattacaggaacattgatgtagcctaaatccagcttagtatctttcttctcaaattctttaccaaagaaatttaatttaacaccgtcattgaactttacaccttgctgtgcatacatagcacctgcagaaaggcttacaatgtcagtaagctgatattctaattcagcacctgcaacaaatccaaccttcatcttggtgttatcaaactcggtcatggtagcacccgttacacctacttgaggtttcaaagacagtgaacctacttcattttgtgcaaaagcacctacagacgatagcagtactactgccattaaaatcatttttttcatcttcaatcttttttacaattaaatactttacctaattatattagaataataatttacatttcctttgtaattgttcgctggcaaatataggcttaaatatgcgataggcaagcattagcccttgtcttttatggtaaaaaaatattattacaaatttattaacgcaaatgatgagggatctgctctataagagctttgaacaaaggattggcagataaaatgggctgattgcctaaaatgataagctgtttgcgtgcgcgcgttatcgctacattcaacttcctgtcaatcagtttgtcgtcctcataaaaactattggacgtgagaaaatctaattgatatcggtgctggacagtgaacgaatagatgatgatgtctcgttggctgccttgatatcgctctacggtgtcgatgcacacgtctttcagtgccgtgttgcccgtcttctctatctcctgtcgtatcattgcaatctggttacgatacggcacaataacgcccacagtgcgtaaagggtcaaagtttttttgtgtcaatgtatagatgcggttcagcaaatctgccactttctgcgcttcgtcgatattcactttgtccgatttccccatggtttcattctttttagagggatagtagagccgtcgatgctgtaccagttgctggtctgtctcgtccttaggcttgcccaagtaaccaatatcaaccgacaattggtgagggagtggtacgggttgtagctgctctttgaagtaaaacatgcgattgggaaaagccgaaagttcaggatgcattcttccttgtttgtgcaatatgcccgtgaagtcggttcgcccttgttgctcttcccaatgtatgagacgttcaaaaagcgagttgcgacagttggaaagtccgatggaaagtagttcagggacgtccacctttgattcctcttcactttgttgaacaacggcaggtaattgtttataatcgccaatgagaataaatttgtcgatgctgggtttgtttccttcgttcgatgtcgtggcatttacagtagaacagtgatgcgccaagatgccgatgaggttgggttcgagtatctgactggcttcatcaatgatggctaagctaaaatgtttcaatgcaaagatgaagggtttgtgcatcatcattgaggtggtgctgacaatgatgcgtgtcttttcaagtcgtctttgcaggtcggtgagctttgtatgctgtttaatggcttgtcccaaaagatgagatgtgaagcgtggctcgcagctaaattcattgcctaaacgcaagtaatcaaggtcagcacttgtcaacatactgcaaatttcatcaaccgctctattcgtgtacgccattagtagcaagttagtacctgaacaggctaactcttcttccaccatatagcgcagtgccatggatgtcttacccgtgccgggaggtccaactaataagaaatagtcgcatgcctgtttcgcctgaagcaacacatcgtcataatcagggtgatagcttttcgtcagcgttcttgtcttgtcagcctgtggtttgcgttgaccaagcaacaaatcacgcctatctttttgtgttgtcatcagcgtgtgcaaggcatgaaaagccgaactaccactggcatcggaggcactatgttccacagcatacaccaaaggcgtacgacgaagatgtgtgttctcgtcacgatgaacaaagaggatatcttcattttgttgtgcatcggcaagatggatcacgatttcatgggttttgatgtctttcataaaccccttaaataggatgcttcgccgcacatcgggtatggcattgggatgataaccatagagatataccatgtctccacgtctaaagttgggcaggaattctgcaccttggtcgggtacggcgagcgtgatttcatcaaaacctcgttgtcctgtccgtgttttcttggtgatgtgtagcccagtgtagatgttccccatttcccttttttcactcagaggcatactccacaagtcggcattgctgcgcccattgccatcggcagaccctgcttttgaaatgagttgttctttcaaaacaaatgtcatcattctacagaaatacgctttttcaagcgaagacatctcctgtagtggttgcgtaatagcttttatctgaggcaacagatagcgattgtagaagaaagtgtcgttttttgcggtgttcagtgtctgtgcattcaacaggttcagtatgtcgccaaagccgccgacaccactgttcatgtcggtagccacgataagattgcggagcttgatggtctcttgtagcagcatgtccaatctggcaacagaaagcaaaccagcagggagcggatatttagaatacaacaaaaaaatctgggtcgcactgttggacagttgaaaattgtatttcagcacaccagcatatagtaacgcctgaacataatgcgactcaacgtgctgcgtgccatgtgagttgcgacggttgtactctaagttcatattctttcccgacttctgttctactaacaatcggaagtctgttgtcatcaagtctacacgtccctgaatgcctaaggtctcgcaaacaaatgacggttctaatatggcatggttgcgctgataagtattgaagagttccgtgacaatctgctgcatattctgcgcttgcttggcagcgtcggtcttgaacaaagttgggttgagtgtggtgcaggtgcagtattccaaagccttttcttgatagttctctttcaaggtctccgccaaactaaacggacggtctggctgtgcaaaaaccatattgtctaatgcgcaccccgcaaagtttcctaaaatggtatgttgcgtatttggcttctccctcatgcgatttagcgtgtagacggcagggtgatgaccgtaatctgtaaagcaagcggcaagagaactaatgtcaatgaggcaatcgggttctacaacaatcaggcgaggtgtaatgagatactcttctatctggcaatccaaaaggttgagttgcatgccagttcgcaggatttcttggagatacgacatatctgcaaactgttgtttgctggcgtattccacttggaggagctgttcgtccgtatcaccatctggcagtacccatatatattggttgtcccagtgtctcacgatgcaacggatgtagcgtttgtccagtcgtaatcctttctgtaactcctgcccacgagcaggtaatttttccaccaaaaaggaggggatggcttcacgaaacaccgcagagataaatacacaaagtgaacgaagatcgtacaaaacatcctcgggcaataaacgtgaactgctgttggaatgacgtcgcatcctatgaatggcgtgggtgtcttgggctgatatttggcattgtgagcagagacggtctacccttgcacgaaggtcgccaaagctgtaagtactgtttcgtaagccagcagcacacgttaagaccaaggtttcatgcatcattttattgacaagtgcaggagagtgttcatttgtttcaatgattttccccacttgttgataaagctctttggctgtgatataggtatctgtctggttcatacatcaaaagttcacctccatggtgtgcaagttaaatagtgtttcgtttgcgttcatcgtccgcatggagtgcaaagataaccaaaaatatctacttcatcttggcattattctttcatttttggttatatttgtgtgcaggatagctgcaatccttacaatataacaatgatgaatcaaaaagatattatgcgcagggcgatagccttgtccgaagagagtgtgttgtcgggtgggggaccctttggtgctgtcatcgcaaaagggggcaatattatcgcagaagcctcgaacacagtaacgatagaccatgaccccacggctcatgcggaggtgaatgcgattaggaaagcaacgcaaaaattggggacattcgatttgacaggatgtgatatttacacctcgtgtgaaccttgtcccatgtgtttgggcgccatttactgggcacatttggatcgtatcttttacgccaacaatcggaaagatgccgcccgtataggttttgatgacgactttatttatcaagagatagccttgagtcccgctgagcgacacaaacaaatgcaagttttactacccgatgaggctcgaaaggcttttgacagttgggaagagaagttggacaaaacggaatattgatgccctttaggaatgccgtagtgaagaaactacggcagcctttgtatgtttttagcaagaatggattattgtccgcccaacctattaaaataggtgatgagttcttcccacgtcttgaattcgtcgctaccatacaccaaacaagtgcccatgaaatcgttttctaaggttggcgtaatgagataatcgcccaagagcaaatgcttttggttggtaaaaattacgttgttgtatgctggtgtagatagatattcctctacccatgtttgtacatcggtcaaactcgtatgctcattcgttggtgcaggtgcagtaatcaacacttgatactgctctatgagcatttcataagccttgtgcatgctcgatgtggcgttgccgaaactgtcatgcagagtctcgtaatcaatgtaaataatgggtctttcacgcttttcttgcttgtcgtcaatccatcgaatgacgggaatgagataatgaaatgccaccttgttggttaattgatgcgctccgtgaaagcgtatcgcgttggggtagtgttcatagaacatgtcaaaagtatgcaccagtgggtctttatcgccaaataagccatacactctttgcctttcttcgtccgtgatagcctgaaaacattgttgggttatctctttatactcattgactaaagatttcgttacgatgacttcttgaaccccgtctttacgtggattcaaaaatgtttgtttacccatcatgttgtggtcatgcatggtatcgcccatttggaaagcaggattcaccacaatacggtcgtaacctttcagcatctctgtgtacatgccccccatggaagagccaatgatgagatcgggttgatgctcttggcacagctttttcaataattcaatagcctcggctgggtgtattggcaaatcttctgcaatgatatttgcttcggggagcaattctttgagaatgctgaccgttcccgattgagcggatgacataaagccatgcacatacataatggtcttaccaaccatcaaatcaggatattgtttttggcgtacggtgtccatctttttagaatttagtgatgtgcaaatgtagctttttttgaggaattgtacaagtgtcccttgtcgtctcttccttttttttaatcaataaggctattgaatcagcgaaaaaacgttatctttgtggcagtaatgctaacctcataggatagtttgtagaatttatacctaaccactactcacatgaaaaaaatacttttaatagctggatgtctgtcgtttttgggattcccagcaagcagtcaaggttttccaatcgaagaacagagaataaccaccgatacagaatggcgagacttgcaagataatgaagtaaacaggttcaagttgcatactaattattttgcgtatgaatcggtggaaaaggcattgtctggtgatcgtaaggcatcggaaaactacctttcacttaatggcacttggaagtttcattatgcagaaacccctgatgaccgactccatgacttttacttaaataatcatgatgactcctcatggaaaagcatgcccgtgcctggcttatgggagttgaacggatatggcgaccctgtatatgtaaatgtgggctttgcttggcgtggacatttcaagaacaatccacctttggttcctattaaagacaaccatgtgggtagctatcgccgcttcatcaatattcctgacaattggatgggacgacaggtaattgcccattttggaagtgttacctccaacatctacttgtatgtcaatggcaaatacgttggctatgcagaagattcaaaggtggctgccgagtttgacattacacctttcttgaaaaaaggacgtaacttaatagccttccaagtgtttcgttggtgtgatgggtcatattgcgaagatcaagatttttggcgattaagtggcgtggggcgtgattgtttcctgtatgcacgcaataaagacgtgcaagtaagtaacttgaaaattaacacagacctgcagaatggttataaggatggtgtgctatctgttgacttagaccttaagggaaatccgacagtagacttcaatttgctcgatgccaatggggtttcggtgtccaaacaaacggtaaacttcaaaggattgcaacatggaaatgtgcaattcaacattcaaaacgttaagaagtggacagcggagacgccctacctctttaccctactgacaacagtaaagaaaggtaacaaggttgttgaggtgataccgcagcgcataggcttcaagaaagtagagataaaaaacagtcagttgctcgttaatggacagcccatctatataaaaggagtcaatcgacatgagatggaccctgatggtgggtatgttgtgagtcgagaacgcatgatacaggacatacaaatcatgaagcaattcaatatcaatgcagtgcgaacttgccactatccagacgacccgcagtggtatgatttgtgtgatgagtatggactttatgtggtggcagaagccaaccaagagagtcatggcttccagtatggagaagattctccagcaaaacaacccatgtttgctaagcagatattggaacgcaatcagcataatgtggagatgtactacaaccatccgagcatcattatgtggtcgatgggaaacgaaacggttgatggacctaacttcacggcagcattcaactggattaagagtgtggataaatcgcgtcccattcattgggaacgtgcagaaaagggtgccaacaccgaagtgtattgccccatgtatcgttctcaacaggcatgtgaagagtatgcaaagtctactgcccccggtgatcaaaagccgctcatccaatgtgaatacaatcatgccatgggcaattcgggcggaggtttgaaagaatattgggacttggtacgcaaatatcctaaattccaaggaggttttgtgtgggacttcgtcgaccaagctttgcgtgataaaaaacgtggaatctatgcatacggtggcgattataacgattacgaccccagcgataacaactttaactgcaacggacttatcagtccagaccgtgtacccaatcctcatatgtacgaattgggctatgagtatcagaacatttgggtacaaccaattgacttgatgcaagggaaaataaaggttaaaaatgaatatttcttccgagacttgagcaattatgcgttagtgtggacagtgcttgccaatggcaaggcggtgcaatcgggaaccgtcaacgagctacaagtgcaaccacagcaaagtgttgaggtggtgcttccatgtcatttggcacaaatcaccagcctgcctgaaaatgaggatgtgcagttcaatgttgattttgtattgaagcagccggaacctctcatgcagaaagggcaacgagtagcctaccaacagtttcctgtgaaagattattatgtagaaaagagcactacgccacttcccgagatggaaccacttgtgtggtatgggaaattgaagaaaataagcaaaaagaaagatgcacaattgacatttgccagtcgtcaagtaactgtggcgtttgataagcaaactggtttacttgctcaatacatggtgaatggtgtttcttacttgggtgaaggaggtacattaaaaccttgtttctggagagcagtgacggataacgacatgggtgctgggcttaacactaagtatcaggtatggcgtaaccccgctttgaagttcatagacatgaaggtgaaacaacttaaaagcaaggataagaaaattcaggttgtaacctctacttacgatatgcccgaggtaaaggcgcagttgatagtagattatgctatctatccttctggtgagatgcgaatagaacaaaagttacaaacaacacaaggagtgaatgttcccaacatgttgcgctttggcatggtgatgcagctgccttacgacatggaacaaagtgagttttttgggcgaggtccttttgagaattacgctgaccgtaagttctcgcagcgcataggcgtgtacaaacaaacggcagacgaacagttctatccatatatccgaccacaagaaacaggtaccaagagtgacatgcgttggtggaagcaaaccaacaaaagaggtatgggactattagtgcgctcggataagcctttctctgcatcggcattgcattatacggtagaagatttggacgatggtgttgccaaggaacaaaggcatgtgcaacaagtaccaaagtctcttttcaccaatctttatatcaacagtgagatggctggtgtaggaggagtagattcgtggagtgccaaagccgaggctttggaagcctatcgtgtggtttatggcgacaaggcgtttcgctttacactgctccctattgggcgttaatcaaacgaaatcttcaaaaatcctctgtcattcgtcagctgagtggcgaatggcagaggacgaaagttgagggagaatgttgttagcgtaagtttacaagaacatcttacgtgcgaactcccacacaacaatgccagcagtaaccgagacgttgagcgagtgtttagtgccaaattggggtatctctaaacatccgttgcacgcatcaacagtagtttggttcacacctttcacctcattgccaaacactacggcatatcgctgatgacggttgagtgtgaggtgttgtagctttgtggagccttctacctgctcaatgctgtacacgaaatatccgttttctttcaattcttctaccgcttctgtggctgatgcaaagtatcgccacgctacactatcctctccgccgagggcagtcttgtgtatttcgggatgtgggggcgtggcggtgatgccacacagatataccgcttctactcgaaaggcgtcgcacgaccgaaatacagaccctacattatataacgaccgcacatcgtcaagcacaacgatgagtggtagtttgtcggcttctttgaactcttctaccgacaagcggttcatttctatggtcttgagctttctcacttttttgataaatgattataacagcttggattgatacaccacagcatacattttcatttgttttgtcattgccaacaatccattggcacgcgtgggcgagagatgttcacgaagtccgatgcggtcgatgaaatacaactctgcatcaatgatttctttcggcgtgtgattgctcaccacgcgaataagcaaggctataatgcctttaacaatcagcgcatcgctgtctgcggtgaatatcaatctgccgtctttctcatcgcattgcagccaaaccctactttggcagccatctatcaagtttgattctgtcttgtattgctcatctaatggttctaattcattgcctaaatcaatgagcatctggtacttgtccatccagtcggtgaactctgaaaactcttctattacctcgtcttgcagttcgtttatggtcatatctttctcttttttccttgtttttttatctcttgctttgtgtttttaccaatttgaaaagcttgtcattagggcgcaccttgtcgggaacggcaatggagatgcgccaacctttttcggctttcggcacgggttgtaactcgtagcgtatctcgttggcgtcaaagtacatcacgccagtggtgggacccgtaatgagcaagtgatcgccaacctcaatttcagcggcttcaactgccaactcagctacgcccaacttagagaaatacttcactaccttgcccaccaagatttttttctcggtggctttgttgccatagttctttgtccattcgcccaacttctgcccctgatagtagccgtcccaaaagcctctgttgaagacggcagacagacgttcgtcccaggcatctttcttctcctcggtgaaagtaccgtcgatgaccgactgaatggcttccttgtaacatgttaccacgttgtacacatactctggaccacgagccctaccttcgattttgaacacgcgtacccctgcctccatcatgtgatcgatgaagcgaacggtcttcaaatcctttggactcatgatatatttgttgtctatctccagttggttgcccgtttcgttatcggtgacggtgtacgaacggcggcatatttgcacgcattctccacggttggcggagcgattggcgtcatgaagactcatgtaacattttccacttattgccatgcagaatgcaccgtggcagaacatttcgatacgaaccagtccaccatgtggcccacatatctgttgcgccactatctgttggtggatttctttgacttgattcatgttcaattcgcgtgccaataccactacatcggcaaagcgtgcgtagaactttaaggcttctatgttcgaaatgttgagttgcgttgacaggtgtacttccacacctttctccacgcaataggtcattacagcaacatcgctggctatcactgccgagatgttagcgtcttttgcggcatcaatgatttggtgcatggtgtgaatgtcctcgccatatataacggtgttcaccgtgagataggttttgatgccatgcgctttgcaagtatcggcaatgtcgtgcaaatcgtcaatcgtaaaatgattggctgagtgcgaacgcatatttaattgtccgatgccaaaataaacggcaccagcccctgcttgtatggctgctgcaagactttcacgagagccaacaggagccatgatttcaaaatctgatagctgatagttcatggttgcaaagttaaggttatttgtaataatcacaaaacaaaaccgctttgttttgttcatgagacagttcaataaaggatggataattgggctatagcgtcgcccttttttttctgaaaaatttttactacggggttcaaaactcgcgtatttgcgagcaactgttagttgggtcgcaaatttgcgagtattttaactgctttattatcaatcacttcgtgtttttacttgccgaacataggtgttgaagcattgagttaaggtgcttagagtaatgtaataacaccacaaaggtaatggagtagtgagccaaaacagtcattatagcgcgattaactcattacttttgcgcaaaaaatgcgttgtggcgaagataaaaatgctatttttgatgccaatggaaagctagaatcaatttttatttttctgaattatatttacaatttgtttgttttctttttcatgaatgtgtgtgatttttatatgcttctacagattggcggcactggcataattaaattgcttgattttctttgttattcttcagaatactgctaactttgcttttgcatgaatagaatatggacagtctgtttgttagtcatcgccattttagtgggatgtagccaccctcttcctccaacacgtgtggacgagaggtttaccgacgatgtactcatcaagacaactcccgtaaaaaatcaaggagcgagttcgctgtgctggctttacgccatgttaggaaccattgagtctgagcgtttgatgatgggggactcggtaaatttatcggtcgactatttggcaagaaagttgttggaggagcaaacacaagcggctttctttatgagaggtaagaagcccattcagttgcgaggagtttcatccatgacacttgatttgatacagcgttacggattgctgcatgaggactcgtatccggctaaaaatgtgaattacaatgtgttgcgtagaaaaatgcgacatttggcttcttgcgcctcctcgctaagtcaattgcggcatctcatggaggataagttagaccaagagcttggctctttgcctcgcttcgtattctttttacacgccgaatatacgcctttggaatttgcgcacagtgtgtgtttgcctaatgaatatctctcattgaccagttttacgcaccatccttatcggcattcgtttgttttggagataccagacaatcagtttagacaagcgtttaagaatcttcctttggatacattaatgacgcatctcaaaaaagcgttgcaagctggacatccagtttgttgggaaggtgacatcagtgaacccggcttctcgtttgccaatggtgtggcaacgttggaaaatacgcctgttcatgtgaccgcagaaatgcggcaacgcgcgtttgaaaccctaaaaaccacagatgaccattgtatggttttagtggggatggcacacgataaacagggtagagtgtttttaaaggcgaaaaattcgtggggaacaaactcccgttatcaaggttatatgtatctcagcgaagcgtatgtgcgctttaagaccattgcgctgtatatgagtcaagcagcttaccaccaatcaaaggcacggtgatgttgtgaatgtcaatgacttatcgtgtcattcaataaaaaacggaacatgataacgcttatcatgttccgtgtaaataaggagtgagttacttatgcatcaatgttcgcataggtagcattcttttcaataaattcacgacgtggttctacgtcatcgcccatgagcatggagaaaatctcatctgcatcggcagcattctcaatggttacttgcttgagcaagcgagtcttggggttcatagtggtttcccaaagttgttcagggttcatctctcccaaacctttgtagcgctgcgtgtgaacgcttttgctgtcttcttcgccattggcgtatttgtcaatgaatgcctgtcgttgttgttcggtgtagcaatactcgctggctttgttcttgtacgaacatttgtagagcggtggagtagcgatgtaaaggtgtccttcttcaataactttcggcatgaaacgatagaagagcgtcataatgagggtgtcgatgtgtgaaccatcgacatcggcgtcggtcatgatgataatcttgtcataacgtagtttgtcaatatttgcctcacggtcggcttctccttctacaccaaagcgcacgccaatactttgaatgatgttcattaccgactctgcttcaaagacacgatgccattgtaccttttcgacattcaaaatcttaccacgtaaaggcaaaattgcttgtgtgtatctatctcgtccttgcttagcagaaccacctgcagagtcaccctcgacgaggaatatttcgcaatcttttgggtctttgttagaacagtctgccaacttacctggcaatcctccgccactcataaagtttttgcgctgtacactttcgcgtgctttgcgtgcggcaatacgtgcggttgcggctaatacaaccttctcgcaaatctgtttagcctctgtggggtgttcttcaagatagttgctgagggcttctcctaccgcctgttgaacagcaccagccacctcgctattgcctaatttagttttcgtttgaccttcaaactggggttctgccaccttaatggagatgacagcagtgagtccttcacggaagtcttcgccagcaatctctatttttgctttctctatttgtttggagatagtaggctcgctgtctgcatacgttttcaacgtacgtgtcaatgcggcacggaaaccagtaaggtgagttcctccctcgatggtgttgatgttgttgacgtatgaatggatgttttctgaatagtcagtattgtacatgatggctacctcaatagggatgccttgcttttcggttttgagatagataacatcatcaaaaaggtgtgtgcggtgcctgtctacgtagcgaacaaactctttgagtccgtccttggcatgaaatacctctgttcgtgtcttgccttcatcgttaggacgcatatctgtaagcgtgatgcggatgccggcgttgaggaaagcaagctcacgcatgcgccttgcgatgatgtcccactggaaatgggtggtggtaaaaatagaaccatctggccaaaattgttggcgtgtacctcgcttgtcggtttctccaacaacctttacagggtagagcgcttttcccctttcgtattcttgttgatagattttgccatttcggaatacctgagatgtcatgtgagatgataatgcgttgacacaactcacacctactccgtgaagacctccactgactttgtaggagcctttgtcgaactttccgccggcatggagtaccgtcatgaccacttctaaggcggacttgtgtagtttttcgtgttggtcaacggggataccacgcccattatcttgcacggtgatagactcatcgtcattaatagttacctctatgtccgtgcaatagcctgccattgcctcatcaatagagttgtctacagtctcgttgatgagatgatgaagacctttctcactgatgtcgccgatgtacattgcagggcgtttacgaactgcttccagcccttccaatacttgaatattactggctgaatagttattttcggtattttgtttttctgccattttatatcttgtaaaattatatttgcaaattgaagaaaacttaaagcagacaagttttctttgtctgcagaaatacttcgtacattgttgcaaagatacgaaattaatgggaattgatgaaatgttttacaactaaaaatgcctaaaaacgagggctgtttccatcgaatttttattaaatttgcaggtagaaatcatggtgcaaaaaattacttttttattcgtcctaggtttattcgccatttcttcaatggcgggtgttgtatttactacgacacagaaggtcagctttcaacgacaacgttatcaagtatctgttgagtttccgttagaaggtgagcctaaagctgtaaggagtattcggaattggatcaacgatgtggttggtgtggaagacgaacaggcgatcgatgagcgtgcattcgtgcaggttttagagcgtagttatcaagattatcttgagacaaatcctgaagggagtcggcacatcgagatttatagagcttatgaggatgaagactgtgtgacctttcaatccgtcatttcagagcaagactctgtggtttggaaaacttgtgattgtgctacatttagcaaaaaagacgggcatcgcctaaaggtgaatgaaatttttaattgttctgaagaaagaattaaacaattaatgtgggaatggcgtggcgatttacctgtggaggtggattcggctaacgacttgatagtgggagaagtgggatttattgatggctggattgttgtgataggtcctgcacgaaattatacgggtgcaccttttcggattcgttatcaggctgcagaaccttttttgttgggctccaaacatggtggatattaccacgatgtgcataccaagtcttcgagaaaatagtaaaaggccacatttcataagagatgtgacctttgaatattttcaatgttcaaatagacttatccgaggctattaatgtgttgtgacaagcttgatttcaagtttgcagccttattcttgtggatggtattagtcttagctaatttgtctaacattttctgtactacaggaaatagcttgatagcttcatccttgttgtccatagcacgcaacttgcgcactgcattacgcattgtctttgcataatacttattgtgcaaagtcttaactttgtcctgacggattcttttaagtgatgatttgtggtttgccatcttctttgattttctttttatttcagtagtagtccctagcagaatcgaactgctcttttgagaatgaaaatctcacgtcctaaccgatagacgaagggaccgtgccatttgattagcgggtgcaaaggtaggacaattttctttatgtaccaaatattatctgatattttttaataaatcaatgaaaattagtatttttgttcttcaaattcagaatttatgttggtaaaaacggaagcaattgtactgcgtgcacttaagtatggcgatgctcaattgatcgtggatttattcacagaacgaatgggttgcgtcactttcatacaccgtgtcaagaaaacgaagcacggtcgcataggagtacagttttttcaaccgcttacacatttagagatcgaatatgatgcacttcacaacggacgtcttccacgcttgaaagaggtgcgtatggttaatccatatttaagtattccttttgacgcattgaagctttccatctcgcttttcattgccgaatttctgtatcaatgtctgaaaggagaacaagccagtggggcgttgtatcaatacgtaacaacaagtgtacattggttagatgctgcgacagcaggctttgctaatttccatttggtttttatgttgcatttgactcgatttattggattttatcctaacttggaggacaacacgggtcatgatttctttgatttgcgcaatggcgtttttacgcctaatcaacctgcacatggggattttattgtgccgagtgaggcttcaaaaattcgccttctcatgcgaatgaattacgattccatgcatgtttttaagtttaccaggcaggaacgcaatcgttgcgttgagatgatattaaagttttatcgattgcatgtaccttcgttcccagagctaaaatcgctctcggtgttgcaagtgctatttcaataaaatacgttcttttgtgctaaattgtgagtcatatcgcctgttatgcggacagtagtggcaacgagtgatgaaacaactgcgtaagaacttattgaaaaatgttagatgtttacggttgattggagttaaaaagttctgtaaatagaccaaatttggtcttacgatattaacccttgataaatcgaatgcgttgcaaccgataacgtataaataaaactacgaaagggaaaagcgacaacaaaccgaagagaaatgcgaagaaagaattagaacctatataataaagataaaactgactagctaaaaatgtcagacaacaaaataagcaggtgatataaataggcaatggctctttttcaagttttatcagttgttgacagtggggacatgtggatgtgctatctttacctctaaaataatatctgttcaccactttgggaggtagtattttcccacagtgaggacatatgtgtgcggaactcgctttactcttcttttccattatttagcaggttaaaatcaatttcttgttataattgaaaataatactcattgctaagaatagacgtcccatgtagatgcactgtattcttcaaaacatcatgcagccaaagttagcccaaacttatcttcccaaccaagattcagggttcagtttagcggtgccatggcgtagttggaattgtagaatgttatcttttcctacggtaccgagtgcctgccgcgtacttactttttgtcctttcacaactctgacggaactcaaattacagtaaacagaaatgtacgaaccgtgacgaaccatgatgaccgttgttcctccgtacgtcatgacggcactcacctcgccatcatagatagagcgagcttgacagccagcacttcctaagatattgatacctttattatcaagcgtcacatttttgagtccttccacttgatactgtccaaaatggctcacaattctataacctcctgtgatagggataggtaatcttccccgattggcttcaaatccaccactcaacattctatccacagaactcattttcaagctttcgtccgctctcttttgggctctttcaatgttttctttgttgcgaacagcatcgcttaccgcttttcgttcggcagccacacgcgctgcttcagcttctcgagctttttgctcagctgcttctcgagcttgtgctgccgctcgtgcttgcgcctcagactgttcttggcgagctttctctgctgcggctgctgcagctcgtgcttgcgctttttgttgttcttctcgcagtttggcttcagcgatacgtcgtgcgttctcacgggcttcagcttcggcttcagctttcttcctggcaacctctgcagctctctttcgtgcagcctctgccaatgctgcttttctcttcgcctcggcttcggcacgtgcctttgcctttgctacttctatggctatcaacttatcaatttcggcattcagagcagcatctttttgtcgctgttgggaaataacaacttggatggttttttgttctttctgcagactgcttaccttctgcttctgttcgttttgttgaccttcaagtgtttccttttccttctttcctttccaaagcaaattattcttctgtccttttacgcgatgcagttgtgcttgtttgtcgtttacttgttgctgtttggctttcaaactttcaccttgggcacgttggtaggcagcatagtcacgcacaaactgatagcgacggtacatttgtgcaaagtcttttgccgaaaagataaacattagtttttcttgaatcgtatgactacgcgtcatatacgccatcgatttgatatatttcttctttcgttcagccagttgttcctctaaggtttggagctgtgtatgcagtatttggatatttccatccaaatgctgaatatcactctcaatggtctctatgtttttttgtctgtccgtgatggcagtgttgagaatgagaagatcttgcaaacgcttcttcacatcagattgatttgctctcaatgcacgctcttgttgcttgattttacgctggacttgactgcgttgattctctaagcccttgatggatggcgtagagtacttggctgtcttactattttttttcttgccgtttgtggtcttctttgtagtcgttgtggtctttgccttccttttaataggagtccgtttcttctgtgccgaaagagaaatcgacaaagacagtgctacaagtataattagatatcgtttcatttactgtataaaagctttcctattatgtcctctgcatctactcgttgatagcggttggaaacggtggagcgttcttcccaatcagcatctgtttttatttcatccattgctatcgttacttctccatgctgacgggcctttgcaccttggcgagtcgtaaaagtaaacgactgtgttgaaggaaaatattgcaaaccaatactcttaaagttttgataattccatgtcagaacagatttttcctgttgactattcgcataatttatcaccgccgtagttattcgcccattgtttttgttggcattccaaagataggtcatagctcccttcaccaaagtaatagggtaaaagtctccagcttgagttagattcactctaaagttttctaagtcagatgctttaacttgtttttcgccaggaatcatcaattgattccaaaacagtgcctgcaagctataaaagtttaatccattgcttcgaagaaatgcaacatcgtcataagtggctttgacatattctttgtgaatcctatcaataaccagcactccatcgggcgtaaattctatcctacctacttcactacccaagaatggaatgaacagttgcaggcgtatcaccttgtctttacgcattttcaatgaacccggtgcagagatgcgctgactgcctcgtgttaattgaaaagatatttttcccacaatgttcggtgcatataccccattgtctatcaccttcttcacgaagaggtgtttactcatctcttccgcaggtatttgagtggattgcttggaaatttctccttttacgggttccttcgtcatactctttttagatgcacaagaggtaatgaagagaagcccaaaactcaagtatagaaagtgtatgatgtgtttcattttttgatgtatttcttcagttttatctttctttcaatgaaagccttgtcatttttatctgccaattttaaggctttcgtccaatactccaatgcttgctgcatctgaccgttcattgcataaatatctccagcatggtctataataacactgctttgcaaagagtctgtgtcattttgaagagcttggtcaatatacaacttcgcctctgtatatcgctcttgtaagaataaaatccaagcgtatgtgtccaaataagtggcattggaaggctctgccttgatggttcgataactcatctcctcggctttagacaactgcttcccatcttcacttaggaagtatgcgtaattgttcaggcaactgatgttgtcgtctttccactgcaagcaactatcgtaggcagcaaacgcttctgttttttcaccttgttggtgcaataggtcgcccatcatggcataaaactcactcactaagccagcatcgctattggcgttaatcgtactcacgcctttccttaaagcctcaatggcttgtttttgatgatcttgttgaacgtgcgcccatgctaaatagtagtagtaagccatttcattaggagtgaattgtgctccttgttcgcaaatttctatgattttctgccaattctttttgggcacatatgtctgcaagagttgcagtcgagcagtcgactgttctggtgcgatatcaatcacatgctgcaaagtcgcctgtaccgtgtctgtaggcatgtgtttcaagtacatgtacgttgcagccaaagaggcgatatctgcatctttgggattagctttcattactttttgaaacaggttgagtacttctgtactgtcacgttgatgcgcttcattgtcgcgaatcacctgttgaaacatcgttaatttggtttgcaatggcgtttgcttactcatcaaaatacgatctcgcaaatctactgccttgtctttatcgcccaccgtgttgtagtaatcgtacagtgaagccagtactgtagcattgttaggctcttccttgtaagcttgtgcaaataattgataagcctttttctgtttatcgttctgcatcagccaattgcccaacattactcgatattcaacatcattcgggaaagattttgtcaatgctttcaatgtttcataggctcgggtcttgttaccctgcatctcatagacattcattctcgacaaagtcagttctgcacttttgccttcagccaattctattctatctatgattgacagcattttgtcataatccttctgttgattgtataactgtgccaaaatattgagcacgtccgaccgctcatgatggctttcatagatttgctcataagcagtaattgcttttttgtaagcacccgtaccgatatagtattgtgccactcgctcttgataatcggtgttctttggctggagtgaagcagccttttcaaaattttgaagtgccaacgagtcattgcgctgtttggcgtacagctgtccttgtaagaaataagcttcggcagcttgtgggtgaatggcaaggcattgtttcaacaagtcaaaggctaagtcatttttcccattgagttgttggcacactgcttgcaagagcagatagtcatagcgtgtttgagcatcatcccaaagcatggatttcagttcttcttcggtcacaacttcatcttgtttctcttgtgcaagcatgggcttagagagaaacagaagcatgaataaaatccatgtccaaggggtatgatattgatacaatattttcaacttattctatatttacgtctaaccatcaattatttgacaccagtatgaccatatcctcctgctcctcggtcggtttcgtctaactgtgtcacttcaacaaattgtccttgttcatgttgagctatgaccatttgagcaatgcgctcaccatcgttgataacaaactccttgtcagagaagttcactaacagcaccattatctcacctcgataatcggcatcgattgttcctggtgtgttcaatacagttatgccatatttcagagccagtccactgcgtggccgtatttgtgcctcatagccttcgggcagtgcgatatacaaccccgtagctatgagtttgcgctccataggttttaagatctgcggagcttctatgtttgctcgcaaatccatgccagcactttgtgctgtcgcataggttggtaaaggctggtgtcctttgttgataacttttatctgtatcatctcattcattcttcatttaatctggaaatcatgccatcactcaagaggttctacttcgtatgatgctgattataagatgcaaaaataacgaataatcgccataatgtggcatttttatccttaaaaagaaccaaattacacaaattacttgtacttttgtgctatgaagtggcaaactctaatttctaacaaacgcttcggacaggagctaaaacatgccgagcgtcatgacgatcggtcggaatttaagcgtgattacgaccgcctcatcttctctgcgccatttcggcgtctgcaaaacaaaacgcaagtctttccgctaccagggtctatctttgtccacaaccgtctgactcattctttagaagtggcttctgtcggcatgtctttaggaatggatgtctccactttgctttgcgaaaggcaccccgaattgcgtggaaccttgtttgaacaaatcggtaccattgtgagtgctgcatgtttggcgcatgacatggggaaccctccattcggtcatagtggtgaacgagccatacaaacttttttcaccgaaggagctggaaactacttgcaatcacgtttaagcaaacgtttttgggatgatatcacccactttgagggcaatgctaacgcattccgattgcttactcatcgtttcaacggcagacgtatcggtgggtttgtcatgacatacgccaccttggcaagcattgtaaagtacccctttgccagcagcttagcaggaaatcacggcaagtttggctttttctccagcgaagaggaaacatatataaaggtggcagatgagttagaaattatgaaactttcaccatcaggcgcaccgatacgctatgcacggcatcctttggtttacttggtagaagccgcagatgatatctgttatgagattatggacattgaagatgcccataagctcaagattctttcttttgaagaaactgcacatttgctgatgggtttctttgatgaagaaacacaaaagcacattaaacagcgtatagcggacgagggacttaccgataacaacgaaaaggttgtatatatgcgagcctgtgccgttggcaaactggaaaacaaatgcgttgaagcctttgttgctaacgaggaggcaatcttgaatggaacgttcgaagggagcctcatcgaccacattgacgaaacgcaacgtcaagcctacaaacattgttcagcactttcatatcagcgcatttatcacagcaagcccgtgttggatgtagagttagctggttataaaattatgcaaacgctgatggaaacgatgattgaagccgcagtaaatcccgaacggttttattcgcaacagctcctccgccgttttagtagccaatacgacatacaaagccccgaccttgaaacacgcatcatggctgtcatcgattatatcagtggcatgaccgatgtgtatgcgttggagatttatcaaaaaatcaacggcatatctttgcccatcatttgatacattgtaaagtatttgctgtaccgtcataccttattttatttaagtctttcatctttctcacactctttttcaaaaataagacgcaatgaagtttttcataaaactccattgcgtcttatgcgatgaggtatgctcaaggttataggcgaatggtttttatcccattttttatagaaacgcctttgaagttttcgttcacgatgcgacctgaaagatcgtagcgaggtgtttcattgttagtttgtaaatactctacaatgtttttaatagcagtgtcatcacctttatgagcggctaaaacataaacttttgtctcgtaagctttgagcgaccccaccactaactcgttttcgatttgagtgtcagtcttcgaccaaatttcgtggcaatcgtatttcgtgtccgctttgagataaagatagatgagttttagtgtgggtatctctaccatcgaaccactgcggttagtcacagataccgccattcgtccacctgtcaaatctttcacatagacatcataccccgtactggagtagttcaccttacctgtcgaaagcgactccatatattcagcctgttgtccgagtgcatcttggttaatggcaagaatttctttgttagttagcgtttctatgtcggcattggtaatcagtggggtaggtaggtcttgaatagagttcgcctcacctttaggagtttcacggaggtcacacgtcaacgccagtggacttgcaagcatgcaccacaatgacatttgtgtacgtgcctgcgaatcggttaaaccattaatctttccaccgttctgttgatgtgtagccgtattgttgctcggtcctcctaagccatgaagtccgatacacatcatgtcaaggtcattgaagcggttaactcctgcatacatccataagcgtcgaacttcatcaacgccaccaatcacaccaggtctcgagttgttacctatccagtcttcacgagcatcacttgtggcacgccagcttgatcctccagcttcggcaccccatgtccaaggttgggttttaccccactcacaaatgttgaacacgaaaggcgtttcgcctttggctttgcgtgttttgttaagttcggctatcaccttgcccattcgggaataacttacttgagtgcttgcttcacggttacagtagtcatatttaagcatatctacgccccatgagtcgaataacgcaatgtgttgggcttcatgtccgtacgaccccggttgataattctcgcaagtcatagacccagcgtcactgtaaatgccaaccttcaattgcggattgattttcttgagggcggtttttaagccagtaatgccatcaggaaactttaaggcgtcataagtcaagtcgttcttgtcggtggtttgtttagcccatgtgtcatccaacacgatggaattgaaaccagcatcaataagtccgtatttttgcatgcctttggcaatgtctattattttgtcgtgagcgatggaatgcgcaaaccagttccatgtcagccagctcatcataggagtaggagactgcatgtgagcgtctacgataaggcgcactttagtcagtgtctcttctcctccgttgtcccctttggtcttaaccgtgtacacatattcaccctcatttgtgggcgctgtgcctgatacgtacttatatttattgcccaaggcgatgcgatcctctttcagtgacaaggttgggattgcctcaaggtcaacatcaattactttttctccttcattgggtgtcaatttgtgcatgtatggcgcaccagggagggcatacattaatgtggcacagggcatagaaccaacagaaggatcaacaaacttccatgcggaattgctgtcatcggcacgccaaaggttgaggacacaatcacagtcaatgccacctgtaaagtttaacgagggtgagcttgctgtggggttcgtgatttcgcttggaagaatagccacactttgctcagagagatagtacatctgccaagtgcttgcctttgttttttcttttgtatatctcacataactttcattggtaagtgtttgactactaccgtttgctacgttgatataggtaaggtagcatttcgcagacaagtcatagatgaaataatgcccttgactttcagattcaatcatgataaatttatccgcttcacttcgtttggtggtatgatgcaaattgttgcctgtcatcttgatataagccataggcatttgcaacaaatacggatatttcttttctgcctcaatgccattggttggcgtaaagaattggatgaacttcacgtctatttggtagttgaggttgtctatcgtcacctttgcaacgctaccgccaccaacactcacctttacatcgctatgccgaagatcgccttcgatagttattgattgattaccctgtgcattcagtcctttgaacacctgtccgttaatggtaaccgttgcagaactgggcataccgtcgctgaaaagaatatagttgtgttttacacccacttctgtcaaaaaccatcttgaaacagcgtcctgagtgccgttgtccgtccaaagtccaagcgttacggtgccgtcttcaggattagagtttcctacgccttgaaaccaatttaagtagatacttgcaataccagtggttgtgtagggttgtatttcataagccccaccactaatctccgtgattttataaatggcagcggtttgttttgcatcagtcattgacacgaagccttgtttgggagaatactggtcagctacctgatagctcacccatttgttggcggtcatattatagatgtagtaggaatcgtctttgtcactctcgtaaaaggcaaacttggcataatttgccgagttccttgttggagatgtggttgcgttgcaataataaccttgtccattggctatcgtgtaacaatgttcaggctttccctccgtaggtagtgtttggcttgtctggatagctgccatggcattgaatgcaatagttagtagaaacgttaaaaataaaaatttcttcatttcaatgatttaagttaagtcagtaaatttgtgggtaagtgagcctgtaagcatcgttcatctgttttctgcgtgtcaaagataactaatgttaaacagatacacaactatttttcttctttttccaaaggggttacatccaaacgctttgcttaaatggatggtggtgtgagttttcattcttctgctcatgtgggaatgtttagcgttgtagaaatcaattatttttcgatagccaccacccaatcatagaatgaaaattggtgtcggttattaaatgtggacagcgagcatcctaaaaagccaaatagtagccatctcattttcgtctatgtcacgaagaaaaattggtaaaaatcttgacaatttgctttcgtttcccttgcgtcatttaggtgcttttgttaactcatggagataaggcgattaacccatggagataaggcaacaaagttacggagataagccgcttatctccatgagttaataacgctatgatatgtgaacgatatcaacgttcctaagagggataactaaaactttgaatatgaggaggttatgaagagaaaagaaaacgtgcataactgtcaaattttgagtagctatgcacgttttcttgagattttggaggttatttatagttccaaataaaatgtgaaatatatttacattttttagtatttatccttgggcgtgttacccattgttacctctaactttccacctttggcaaaggtagcaaaaggcaggtaggtactgttcagcacatctccattgagtttgtactcttgcacgaagatattgtccttgctgttgtccttcacctgaataacgaattgtttgccaggataataatccttgttaagacgaatggttattttgttgaacagaggactacctaatccaaaggctggttcttgtgccgtcaagcctttcacgtcgaacataccaatggaagattgtacgaaccatgcgcccaactgaccttggtcttcatcctgaccgtagccgtaaccgtggatgccgtcggtgccatagaactcgttcaaaatggcacgaacccatttttgcgtgtgcgacggtttgcctgcttcgttgaacatccatgaaatgtgtagacaaggctggttaccttggttgtatagtgtctccaaaccagcgaatgctcctacctctgtaccgccactaaagattagtttttgcgactgggtgaagatgctatccaagcggttggtgaaaacttccgtccccactttgtcagccaaagccttggcatcgtgaggcacatagaaagtatattgccatgcgttaccctcttggaaaccgcgccatacctgcatcgggttgaagttgtcgataaactttccatccgctttctttggacgtacgaagttggtttctttgtcataaattcgctcccaacctttcgacagcgacatgagctggttgtaatcgtcggtttttcccaacgcctttgccatttgtgccgttgcccatgcactaaacgcatactctaaagtgtgcgatgccgagaacataaacatttcatcagctccctcacctgtgtcttgatgaggcacataaccgtgttctacaaagagtttggtatcggtctttcctgcaccaaatgggcggttctcgccatccagttcgttctttcggcaagcctcgtaagccaagttgacatcaaaatcacgaatgccacaagcataagctgctgcaatcatcaaactgagttggttggttcccacacccgacacatagcggctgttggctaagccatcgcccaaccaaccactgtctttgaatacctgcagatgactgctgataaagtctgacatgtgttctgggtaagccataatccatacttggttgagattccattgtgctccccacatggcgtcagtgttatagaggttgaaagctggctttccatccttcatttcaatctgtcctatcgtaccgtcgtgtttaggataggcaccattgacatcgctggcaatgccacgacccaagatggcatgatacaatcctgtgtagaattttaccttgtcgtctttgttctctgtttctactgcgatgcgactcaaatgttcgttccaagtgtcgtgcgactgcttcttggcttcatcaaaagccatgtctttcgcttctgtctccaaattcaagcgcgcattctctacagaagtgtaggagacacccactttcacggtaatcttttcctgagcggaagtctcgaaagtaaggtacgcacccgcaccgagtccattagcagtcagtgagtctttctttaccttttcgccgttgaaagttcccacagcggtaggtttcttgtcaatgaccgcatagaaatacagaggaacctcagcccccggctgatatttcttcacgtattcgggcaaggtaatcacccaaccttctacgaccgttccattatctttgatttctactttggcatcctttacggcaccactctcgccttgccgattgccgatgtcgaacaatattcggctctctttactttcagggaaagtgtaacgctggaaagccacacgtgtggtggcagtaacctctgccgtgactttgtagtctttcaacaacacagagtaataacctgctgttgccacctcatcatcgtgggagaacgtagagcgatagcctttgcgctcacccgtcatggcggtatcgcctggtacagtgaaaagctgtcccacggtgggcatcagcgtgatgccaccaatctgaaattcatgcagacaagggaatccctcaatactcttgtcacgataatcatacccagtagcctcccagcccgacttgttaccataatgaccattggtagacggtccgggctttgccataccaaaaggcaaggcacctggtgccatgtggaaatagcgacaatgagccgttcctatgcgaggctctacataagtagtaaagtcttctttggatgtacttccagtattcgtacacgacatcattcccaacatgccaacgaatgctaatagcatcatcgaaatttttctcataatcatttgttttattagttaattatagatttatattcagtataaaatttaacgtttcctttccaaaagcgaaggtagaagaatccgtgggacgcatgaccttattggaggaatcaacgattggtagtttttgcgttctcccaaggtctgtcaaaattagcagaacaagttttatttatctttgtaaatgaccttgttcgcgcctgatgttatttcgagcgattcgcggtgttccttgataaaactctcgatgtgtcttactcttttttcttccaatatttcatccacggcgattaagatgccagtctcttccacgtcgccaaacccatcattgatagctgtaccaaaaagtttcatggtaggactcaagcccatataggcattgactaatggcggaatgttatagcctaactgacggatttcgcgatttagtattcgataattggctttaaaatcattcccacagaacaatgcgtctaactcctgcggattcgattctatcttcaaaggtcgcataggaacaatcaaatgttcgtgatctccaaaatgtttttctaaaaagtaaagaatcatatcccgccctttacgaatgtacgaaggatacatggtcatctttccaaagaaatatttgagtttggggttgagtaccgtcaatgcccctaagccgtcccacaagttgtccagggcaaaaatactcttggtgtttctacgcacattttgatattctaaactgacaaacgagcgtcctaactccacggtgtaaggcatgtagtctttcaaaaacttttcagaaaaatggaagagatgactcgttgctaatttaggttgcccatcttcgtcaagttcccaatcttcaccacacagatagcgataccccccaataatttcatctgcatcaggattccagacaatgagttgtttataacagttttcgcaggtgtcgtattcgtcgatatccattgactttcctgttcctcctccagccgtacggaaagctatttcgcgcaaacgccctatttctttcattacgtgaggggcgttgtgagctgtgatgacgaaaattttattatgacttttattggtcatccttagacgcttgtcaggcgttaattccgctttcaaaagctctttatctatggggtcaataatctcttgctgcatgattcttttcgagggttggtgagaaagaatagatttactggtggctgggtaagggtcaacgctcatctttctacgtctgattgatatttgtatttctttatttcatcctttgcgaactataattggtaaacgatgttttgaacatattgcgcccattctctgggtgttttagacttgtcaaaagtctgccaaggtataggttttccaattttcacatggaaagtttgatgtttattcttgaacatctcatctacaaggaacagcattgccaggttaacctttaggcgaaaaactttacagagatgagctataagatagaatctgttagaatttcgaccatcaaagtgaatgggcacgacatcccgatgatgctccacacttttggaaataaaagttttcttccatggaatatcacaaatttgaccatttatttttcgtgaacagagtcctgccggaaacatgatgatgtggttgtcactctgaaatccttcctctaccatggcaggaaagtttctcccttgcttgcctgttttgttgataccgatgctcacaggctttaatgcaggaagattgagaagcaagtcgttgagcagataacggaactggttgccataatgccgcccaataatagcacctaacgccacgccgtctgcacctcctaaggggtgattagacacaaaggtataaagtttcccattgtgcggatcaggcaggttttcttcgccttgtatctccaaggtgacatccaagaaatcaatgcaggcttccaaccattctgttcctgttagatgtcgatggttccaaagaaaaacattgatttcgtcttggtgagtaatttttttaagccatgacgcaacaaaacgggggagatagttgaccctgtctcccaatttatttttcaagatttcatcaatatctatggttttctctatttcctcgtgcattgaaacaataaaacttatagattgcaaatgtaacataagtttttgtaatataccgcttctttatgcaaaattgttcaaaaattatctcaactgttacttcattgcaacaaggcgtttcattcttcaagctcaaaagttgactcacaataagtcggatatcataaaaaaatatttttttcaggggtaattatttcattcgaggaagtagatcacacataagttgaatcgttaaatattgcaaatttttattgaaatatagattttaagtataaaagtggggaaatgtggggaattttgtgtatctttgacagcaaataaatttttgcttataaaataggtacacatgcgttttttaggaaatatagaagccaaggttgatgccaagggcagagtctttctcccagcaactttccgcaaggtgctacaagcatctggcgaagaagtgttggtgttgcgcaaagatgtattccaatcttgcctcacgctctatcccgaaagcgtttggaatgagcaattagataacttgcgtgcaaaactatctcgatggaatgcggcagagcaacaaatctttcgacaatttgtgtcagatgcagaattgttgaccttagatggaaatggtcgctttctcattcccaaaagatatcaaatattggctcatattgagcaatcagtcagatttattggaatggacgacaccatagaagtgtggtgcaatgagcgtgtcaaagaacctttcatggactcacaggagtttggagaggcgttgcagcatctgatgaattcggcgacagaaaagacgacaatcaattcttcaaaatgatgataaagacagcaggaagttaccatgtccccgtccttttagaacaaagtattgagggattgaacattcacccagagggcatttatgtggatgccacctttggtggagggggtcattctatggaaatactttctcatctcaatgaaaaaggacatcttttcagctttgatcaggatttggatgcggaaaaaaacattcaacaaaatgggcatgaggtgctgttgcaggataactttacttttatacgttcaaacttcagatacttgaagaactggatgaggtattacaaaatagaaaagatagatgggatattggctgacctcggtgtttcgagtcatcatttcgatgatgaaaatagggggttctcattcaggtttgatgctccacttgatatgcgcatgaacaccaaggcgtcgttgacagctgctgatgtgattaacacctacaatgaagaacagttggctgatattttctatttgtatggagaacttaaaaatgcacgaaggatagcatcgctattagtcaaagccagaagtcaaaagaacataacaagtacccatgacttgatacaagcagtggaagttgtgtttggaaaagcgcgtgagaagaaagacctcgcaaaactatttcaagcactccgtatcgaagttaaccatgaaatggaggcattaaaagaattgctcaacagcgctcaagaattgttgactactggtgggagattggttgttatcacctatcactccttagaggatagaatggtaaaaaacatcatgaagacaggcaacgtacaaggaaaagtgcagcaagatttcttcggaagaattgaaacgactttcaaacttttgaacaataaggttatcacgcctacaccgcaagagcaacaggaaaatccacgtagccgaagtgctaaactaagaatcgctgagaagatatgacaaaggacgaaaaagacatagatgtacagcccattcccacagacgcttacaaagatgcggatgcagcgttggattcttcggtagataaaaacagcgaagaagcgcctaccttgaaagaggttatcaaagagcaagcgcgtgaagaagaagctcctttatcgagaaactttactttaagaaagattcttggtggagatattctaaccacgtctactgtacgcaaacaaatttggattttcctccttattacgttctttaccatcatttacatctctaatcgttacagtgttcagcaaaaccttatcgagattgataaacttcagaaagaacttaaagatgcaagatataaggcattatccagcagcagtcagcttaccgagaaaagcagggaaagcaacgtgttggatatgcttaaaaataatcaagacagtgtattaaagattgcgaatcaaccaccatatattatccaagttccagccaaatgaataagtttgattataaaaaaattatgcctcgttacagcgccatcgccattatgatgaccttggtagctgttgccgtagtgggtaaaacactctatattatgacagcgaaacgcgattattggacaaaggttgccgatcgagtcaagcgtgatagtgtagatatcaagcccatgcgaggaaacattttaagttgtaatggagaacttatggcaagttcattgcctgaatttaaggtgtacatggatttcaagagtctccgcacctcgaaaaacgattctctttgggaagcgaagctcgactctatctgtgaaggtctgtatcagatatttccagaaaagcctgcttctgcctttagaaaagaattggagacaggacggcagcaacaaagtcgtcactggcctatttggaagaaacgcattgactataattcctttacagagatcaaagctttgcccatatttaacctctccaaatatatgagcggttttcactatgaggagttcaacgctcggcaacgtccttatggctcgttagcgggacgtacggttggtgccatgtatggggcaaaggatacggctcgttttggattggagttgtcatacgattctattcttcgtggtaaaaacggtatcgtacatcgtcgcaaagtactcaataagttcttggacatcatggatacccctcccattgacggtgcagatatcgtgactaccattgacgtgggaatgcaagatttagccgagcgggctgtcattgatgagttgaagaagattaacggcaatgtgggcgttgccttagtcatggaggtgaagacgggtgacattaaggcaattgtaaacatggagaaatgctttgatggcgagtatcgggaagttaagaatcatgcggtcagtgatttgttagagcctggttcggttttcaaagttgcctcaatgatggttgcacttgatgatggtgtagtggatacaacggcccgtatagaaacagctggaggtgtttggcccatgtatgggagacaaatgaaagatcacaactggcgtcgaggaggttatggaacactcaccttgcctcaaactcttttatatagttctaatattggtgtgagtcgcatcattgacgatcattatcgtgacaacccagagaaatttgtgcaaggtctctaccgtacaggtttagcagatgctcttaacattccattggtaggctcctcttctgcggtcattcgtatgcctaagaaaaatgaacgtggacaatggataaactggagcaagactgccttgccatggatgagcattggttacgagacacaagtgcctcccatttcgacgcttaccttttataatgccattgccaacaacggaaaaatgatgcaacccagatttgttaaacaggtggtaaaagacggtgaagtactcattgattttcctccaaaggtattgcgttcacagatttgcaaacctaaaacgttgggagagattcaaacaatcttagagcatgtggtgagtcaaggcttgggacgcaaagcagggtcgccatctttcaaagtctctggtaaaacaggaacggcacaaatctcacaaggttcgggcggttataaggttgggcgaaccaactatctcctgagttttgcaggctatttcccttcagataatcctcgttatagttgtattgtctgcattcagaagtctgggcttccagcctcaggcggtggaatgagtggcgttgtctttcatcacatcgcagaaggtgttatggctcaagacttaaagttagatgtgaaagatgccaaagactctacctccattcttgttccaaaggtaaagaatggaaacgtgcttgctgccaattatgtgttgactcatttgggcatcaataccaaccgcaactggagtggaacctttgcaaacggcaaccctatttggggaacagctgagattcaaaacaattcgagtgttgagctgaaaaaagccaagatatatacgcatcaatacatccctgatgttttaggaatgggtgcgcgtgatgctgtctacatcctcgagaacagaggtgtcaaggtgcgtctcaacggtcgcgggaaggtggttcaacaaagtcttccaccaggacatcgcattcagaaaaaacgagtatgcctccttacattaagttaatgcacaataattcaaatatatgatttgtaacgaattaatcaaagacattaaatgcactgacattttgggtgatacgaatgtcagcatatcgggagtaaacattgattcccggaagataaaacctggtcatctgtttgtggctatcaaagggacacaagtggatggacacgaatatattgacaaagccattcagttaggagctgtcgcagtattatgcgaaaaagtaccgaaagaaccgttgtctggcattacctacattgtcgtcacatcaaccgaagatgctgtcggtaaggtggcgacacgcttttacggagagccctccaagcacttaaagcttattggtgtcactggaacaaatggcaagacaaccattgccaccttattatataatatgtttcgtaagttggggcatcgctgtggtttactctcaacggtgtgcaattatatcgaggatgagcaaatacctgccgaccataccacacctgaccccatagagctaaatgaactgttggcaaaaatggtagagcagcattgtgaatatgtatttatggaatgctcgtcacatgccattgcgcaaaagagaattggtggattgaactttacgggaggtatttttaccaacctgacacgtgaccacttagattatcataagacttttgagaactatcgcaacgctaagaagtctttcttcgaccacctgcccaagtcggctttcgccattacaaacgcagacgataagaatggcatggtcatggtgcaaaataccaaagcaacagtaaagacctactctgtccgtaccgcagctgacttcaaagctcgtatcattgaatgccattttcaaggtatgtacttagagattgatggtcaggaagtgggagtgcagttcattggtaaatttaacgtcagcaatctcttagccgtttacgctactgcacgcatgttgggtaaacaacgcgaagaaattctgatagcgatgagtacgctacacagtgtcaacggacgtatggacacgcttcactccccacagggatttacggctgtagtggactatgcgcatactcctgatgcattgaaaaatgtactccttgccattcatgaagtagacggtaaaggtcatgttatcactgtttgtggggctggtggtaatcgtgacaagggtaaacgtccgttaatggcaaagcaggcagtacagctaagtgataaagtgattatcaccagtgacaatccacgatttgaagacccgcaagacattatcaacgatatgttggcgggtttggatgcacaggatatgaaaaaggtgttgagcattgtagatagaaaggaagccatacgcaccgcatgcatgcttgcagataagaacgacgttgtccttgtggcagggaaaggacacgaaacttatcaagaaatcaaaggcgtaaagcatcattttgacgataaagaagtgctggcagaaattttcaaacaatcataatacgtttccacaaccccattaaacttagaggatgttatactatttatttagatttttagagcaatacggcatttcaggtgcgcatctatggggatatatctcttttagatcgctgcttgccctcattctttcgttggttatctcagcatggtttggcgagaaattcattaaatatcttcgtcaaaagcaaatcacggaaacccaacgtgatgcctctatcgacccctttggagttaataaaataggtgttccctccatgggtggggtcatcattattgctgccatactcatacccgttctgctattagggcgacttcgcaacatctacctcatcctgatgattattactaccgtttggttgggatttcttggtgggatggacgacttcatcaaaatcttccgcaagaacaaagagggactgaaaggcaaatataaaattattgggcaagtaggcattggcttgatagtaggactggtgttatggtcctcaccagatgtaaaaatcaatgaaaatttggctatcgaacagcaaggtcatgaaatggtgattaagcatcgaacagatgctcggaaatcactcaaaacaacaatccctttcgtgaaaggtcataatctggattattcgggcgtgatgagttggtgcggaaaatacaaaactgcggcaggatggatattgtttgtcatcatgacaattatcgtagtgaccgcagtttctaacggtgccaatcttaacgacggcatggatggaatgtgtgcaggcaattctgctatcattggcgttacgctgggaatcttggcgtatgttagttcacacattgagttcgctgcttatctcaacattatgtatattcctggttcgcaggagttggtggtctttatgtgcgccttcgtcggtgcgctcatcggctttttgtggtacaattcttttcctgcgcaggtgttcatgggcgatacaggctcattaactatcgggggtatcattgcggtctctgccattatcattcataaagagttgttgcttcctatactctgtggtatcttctttgtagagagtttgagcgtgatactccaagtatattattacaagagtgggaagagaaaaggaataaagcgacgaattttcaagcgtactcctattcatgacaattttcgcacacaagattctcagctggatcctgcttgcaattacctcattaaaaaacctcattcggcaatccatgaatcgaaaattaccattcgtttctggattatcaccattatattagcagccatgacgattattactcttaagataagataaatgatagtggttagctccaataaaatgaagtcattgagtgaataaagcaataagttgtatcaactaatattaaaagataaaacattgttcgttagcaacttgtaaaacttcgttgatacgtagctatgattagaatagaaaggaaaaagatatgaaacgaatcgttattctcggtgcagcagagagtggagtaggagctgccatattagcccaaaaagaaggctttgatgtatttgtatctgacatgggtgagattaaagacaaatacaaaaagatgctcgatgcacaccacatccgttgggaagaaaagcaacatacacccgatttgattctaaacgcagatgaggtgattaagagtccaggcattccaaaggaagcccctatgatacaaaagctcatgaagcagggtaccaatatcattagcgaaatagagtttgcaggacgatatactcactctaaaatgatttgcattacgggtagcaacggtaagacaacgacgacctcgctgatttatcatatcttcaaagcagcgggatatgacactggattagctggaaacattgggcggagcttggctttacaagttgcggaagacccacatgaatactatatcatagaattaagctcgttccagttggataacatgtacaagtttaaggcagatattgctatcttgttgaatatcactcccgaccatttggaccgctatgacaactgcatgcaaaactatgtagacgccaaaatgcgcattatccaaaaccaaaccgaaaaagatagcttcatttattggaacgatgaccctatcatcaagcgagaattgcaaaagtatgatatcaaagccgtacagtgtccattttcagaactgaaagagaaaggttcgataggctatattgaggaaggacaatacaccatcgaaaagcccactcctttcaacatggaacaagaagcactttcactcacggggaagcataacgtgtacaactctttggctgctggtattgccactgacattgccggaatacgaaatgacgtgataaggaaaagcttgagcgacttccctggggtggaacaccggttagaaaaggtgtgcaaagtgggcggtgtagaatatatcaatgattcgaaagccacgaatgtcgatgcttgttggtacgcattggagagcatgaatacaccgacaatcttgattcttggaggaaaagataaggggaatgactaccaacttattaaggagttggtaaaaaagaaatgcgttggattagtgtatttaggcgcagataatacgaaacttcacaacaatttcgactccttgggcatccctgtgcgtgatacccactctatgaaggaatgtgtagaagcctgctatgatatggcacgtcctggcgacacggtattgctaagtccttgctgtgccagcttcgacttgttcaaaaatatggaagatagaggaaatcagtttaagacattggtaagaaatttataatggataaaacattaggaaatatctttaagggagacaaggtgatttggatggtctttttctttttatgcatcatctcgatcgtcgaagtatattctgcctccgcaggtctgacttataagggcggacattactgggctcctatcgtcaagcacactggaatcttgctggttggtgtgtttgcaatggtcgtgacgcttaatattaaatgcaaatatttcaagattgtgactcctttcctgctcgtactctcaatcattgccttgattacagtactcattgcaggacagtccaccaatggtgcccaacgttggattagcatcataggcatccagttccagccgtccgaaatagccaaaggcacgatggttttagccactgcgcagattttaagtgccatgcaaacggaacaaggagcagacaaaaatgcctttaaatacatccttattgtcagtggctgcatcgtacctttcattatggtggaaaatctttctacagccatgttgctgtgtttggttatcttcctcatgatgatgataggacgagtacctggcaaaatcttaggcaaggtgttgggtataattacgttactcattgtaacagtgttcgcactcgtcatgttagtggggcaagacagggaaaaaataaatgcccaaggacaacaggttgtacaagtctctaatacggcggagaaagaggaagcgacgatgttcacgaaagtctttcaccgttttgacacatggaaagcgcgcatcgatcgtttcattgatggcaaagagattgctccagaggatttcgatttggacaaagacggacagatagggcatgccaatattgccattgtcttttccaacgtgattggaaaaggtccaggaaattcggtagaacgcgatttcctatcccaagccttttccgatttcatctatgcaatcatcatcgaagagatgggaattatcgggggtgtctttgtcgccatgctttatatcattcttctctttaggacggggcagatagccaatcgctgtgaaaacaacttccctgcctttcttgccatgggcttggctttgcttttagtgacacaggcattgttcaatatgtgcgtagcggtgggcttggcacctgttactgggcagccacttcctttagtaagcaagggtggaacgtcaactatcatcaactgtgtgtatattggagctatccttagtgtgagtcgatcggcgaagaaaaaacaagtaaccgatgaagataaagacatggaaatgagcaccgcagtggcttcagcataagaaacgcaagataagataaatatcattgaacatggtaaaatcaaagaaattttgattacttttgcctattcatataaatataaaagatgaacagtgatttgagaatcatcatcagtggaggtggaacgggaggacatatatttcccgctatctctatagccaatgccattaagaaagaacgccccgatgcaaagattctttttgtcggtgctcaaggtcgaatggaaatggagcgcgtgccaaaagcaggatatgaaatcaaaggactgcctatcgcaggattcgatcggcatcatctgcttaagaacctctccgtgttggtcaagatatggaagagtcaacgattggcaaaagccattattaaggatttcaagccaatggtggcagttggtgttggcggatatgccagtgggcccacgctcaacgtgtgttccaagctgcatatcccctgcctcatacaagagcaaaactcgtatgcaggggtcaccaataaactgttaggtaagaaagcagacaagatttgtgtggcatacgagggtatggaacgcttctttcctgctgacaaaattatcatgacgggaaaccccgtaaggcaaaacgtgctgcagacaacgttatcaaaagaagctgccagagagacctttggattagatccaaaccgaaagacgatacttttggtaggtggaagtttgggtgccagaaccttgaatgaaagcatccaaagccacttggatatgatacgaacaagtgaggttcaatttatttggcaaacaggaaaatattactataaggatatttgcaacgcattgaagacgcaagcgccattgcccaacctctatgtcaccgactttatcagtgatatgggggtagcttatcaggcttccgatttggtgattagtcgtgcaggagcaagctcgattagcgaattttgtctgattggaaaacctgtcatcttggttccaagccccaatgtagcggaggatcatcaaacacaaaacgcaatggcactggtcaataaaaatgcggctatctacgtaaaggatgtggaagccaaagacattttgctcgaacaggcgatgaaaacagtgcaggatgatgcaaagttagcatccctcagcgaaaatattttgaaactcgcattaccaaattctgctgaaatcattgcacaagaggttctcaaattggctactcgtcaacaacattgaacgtataagagattataggaaataaaaaatggatataaaagaaatcaaatcgatatatttcttgggagctggtggcataggaatgagtgccatcgcacgctattttctacataaaggattggtggttgcggggtacgataagacgccttctgcactgacacatcgactcgaacaagaggggatgctcctgcactatgatgaaaatatcgatgagattccgcacgcatgtcgtaatccgcaagtttgtatggttgtatatacccctgccattcctgaatctcatgtagagttgcagtacttcaagtcgaacggctttgaagtattaaagcgagctcaagtcttgggttcgttgacaagaacccatcgaggactttgtttcgcaggtacgcatggcaagacaacaaccagtacgatgtgcgcacacatcatgcaccaaagtcatgtggattgtaatgctttccttggaggaatctccaaaaactacggcagcaattacatcctttccgatacaagtgattacatcgtcattgaagccgacgagtttgatcgtagctttcactggcttcgtccttggatgagtgtcatcacatcgacagatcctgatcacttagacatttatggaaccaaagaggcatatttagaaagttttaggcattacacaacattgataaagcctggaggcgccttgattattcatgaagggttggaaatgcaagaggatgtaaacgatgaggtgagggtatttcggtacagtctcaacggaggtgatttccatgctgaaaacatcaaaatagaaaatggagccatcaccttcgactttatctcgccgatagagaacgtcacccaagtagaattgggacatcctattcctataaatgtggagaatgctgtcgctgcaatggcaatggcgcaactcaacggttgcactgcagaggagttgcgatatggcatgtcaacttataaaggagtggacagacgctttgatttcaaggtaaacaatgagcgacatgttttcctttcagattatgcacaccatccaaaggaaatttatcaaagtgcaaaaagccttcgtgagttgtatcacgatcggcatgtcacagcgatatttcagccacatctttatacaaggacgcgagatttctataaagaatttgcagaagcactgagccaactcgatgaggttatcttatgcgacatctatcctgcacgagaagccccgataccaggagttacctcagcgcttatttacaatgagctcacctgcaaagagaagagcatgatacataaggaagatatgattgatttggttaaaaaacgcgattttgatgtacttgttgttttgggcgcaggcgacctcgacaattatgtaccacaaatgactaagatcattgaaaataagtgagacgttggaaaaagatattgacaatcgtacttgatgttatcttgggaatatacttagtatttgcattcaccgcgtttaacaaacccgatgaaacagcaaacgtgtgtaccaaggtgaccatcaatattgcagacgaaacggcaaatggttttatcaatgcggcaaagatacaagatcgacttgagaagcatcgtctttatccgctggaaaaacctatgaaatatgtggatgctcgcaagatagaggacatgcttaaaaccagtcctttcgtcaagaatgcagagtgtttcaagacacagaatggacacgtcaatatttctatcacacagcgaatgcctgtggtacgcatcaaatcgataaataatgatgactattatttggatgatcaagatgctatcatgccaaactccaactacacaagcgacttaatcatcgccacagggtacattaatcgatggtttgccacccattatgtttctgccttgagcaaaacaatcatgcaagacgagttttggaagaaccaaattgtccaaatcaacatcttgccagatcggggcgtcgagttggttccaagagtaggagaccatatcgtttatctcggatacttgccgacaagcagtaatcagcaaaaacgattggcattgatacaagactttaccaagcaaaagttaacacgcttagaaaagttctacaaatatgggctctcccaagcaggttggaacaagtactcgtatatcaacttggaatttgataaccagattatctgtaaaaagagggaggctcaaccataagaagttcagctaacggcgcttgaaaaaagatattataacgaatttgaattgataaagatataaaacgtatgacaaaggaatttatcgtagctatagaactgggatcttctaagattaccggtattgcaggaaaaaagaatcctgacggcagcatttcaattcttgctgttgtgaaagaggattccacctcgtgcatacgcaagggtgtagtcttcaacattgacaagacggtattgtgcttgactaacattgttaagaagttagagaccagtctcaaaaccaacattgcccgtgtatatgttggagttggcggtcaaagcatacgcagtgtcaagaatattattgtgaaaacactgcctgctgaaaccatcgttagtcaggacatgattaacgaactgatggacgccaatcgtagtatgagctatgcagatcaagaaattttggacgctgtcactcaggaatataaagtcgactctttatatcaactcgaccctgtgggcattccttgtttgcgtttagaaggaaacttcctcaacattctgtggcggaaaacattctataagaatctcaatcagtgtattaacaaagctggtatggagatagccgagctgtaccttgctcccttagctcttgcagatgccgtgctcacagaaacggagaaacgatcgggctgcatcttggtagatcttggggcggatacgaccactgttcttgtctattacaaaaatatcctgcgtcacttggcggtcatccctcttggaggagaaaatattacaaaagacatcacctctttgctcatggaagagagccaggcagaagatatgaagctaaaatatgcttcggcatatacggataataacgacattgacgagaacaagaaatatccaatcgacagtgatagaaaagttgaaagtcgtaagtttattgaaattgttgagtcgagactacaagaaattatcgaaaacgttttttatcaagttcctaacgaatatgccgacaagctgattggcggaattatccttacgggtggtggtgccaacatgccaaatatcgaaaaggccttcacggatcaggcgccaacagagaaaatacgtattgctaagttcgttaatctaaaaatcaattcaaatttaccagagattacagcccacgatgcaacaatgaataccattcttggtttgttggctaaaggggatatcaactgtgctggagaagaaatcaacaccgatttgttccaagcaaatgatgccaaacacactgctaccactcccactcaaaccaaagaacccagatcttttacagagacatcagggactggtattgtgcaaactgaagaagaaaaagaacgacttcgcaagcagaaagaggctcaagaagaagcagaaagactggcgaaagaagaggaggaacgacgcattgcagaagaaaaacgacaaaactctccaatgaacaagctttggaaaggtattaaaaactttgctcgtaaaataacggaagaagaagaataaaacgtgggaacgatgaattccagatattaacttttaagatttagaattatgccagatagaaaaaatactcctgatgttctcgatttcggagaaccagacaaagcaaatagcatcatcaaggtgattggtgttggtggtggcggaggtaatgccgttaatcacatgtaccgcgaaggaatccatgacgtcacttttgttctttgtaataccgataatcaagccctcaatgatagtcctgtaccttatcatctacaattaggaaaagaaggattaggcgcaggtaacaaacccgaaaaggcaagattagcagccgaggaaagccttgaagacatcaagaacatgctcaatgacggcactcgtatgacgttcatcaccgccggaatgggaggtggaacgggtacaggtgcagcacctgtcattgcgcgtatctctaaagaattgggcatcttaaccgtaggtatcgttactatccccttccgttttgagggtgacaagaagattaaccaagctttggacggtgtggaagaaatggcaaagcatgtcgatgcgctattggttatcaataacgaacgcttacgagaaatttatccagacttgactgttttagacgcttttggcaaggctgacgacacgttaagcattgctgccaagagtatagcagaaatcatcaccaaccatgggctcattaatttggactttaatgatgtgaaaacagtgctgaaagatggtggagtagccattatgagtacgggctttggcgaaggcgagggacgtgtgaaagctgcgattgaagatgcactcaactcaccgctactcaatgataacgacatctttaactctaagaaaatcttgctgagcattaacttctgcaacgaaaagaatgacaacagcggtctgatgatggaggagatgaatgatgtgaacgattttatggggcgttttgatagcgactttgaaataaaatggggactcgccatcgatcccgatctcggcaagaaagtcaaggtaactatcttggcaacgggctttggtatcaatgatgtggaaggcatgaatagccacatcggcaaacgccactcgcaagaagaagccatgcgcattgctgaagaagaagagcgcaaagcacaattgctcatcagaaaagaccaatattataaggacggcaagaactctaaatacaaacgtcatccacacatctatctctttagtaacgaagatttggacaatgaggatgtcatcttggctgtggagagttatcccacctataaacgaacacgtcaaatgttggatgatatccgcaaacaagcggctggcgaaactgaagaatctgaccataaggagaacaatgatcctattcaaggagtcatcagttttgggtaaagagacttgcagtttggcaacaaacaaaatgtgatacgaagtaatacctctaaaaataaatgatatggcactatttgaacagattagcgaagacatcaaaacagcgatgaaagcgcgagataaagtggctctcgacacacttagaaatatcaagaaagtttttctcgaagccaagacagcacccggagccaacgatacactcaacgatgatgcggcactcaagattatacagaagttggcgaagcaaggtaaagaagctgcacaaacctatattgatgcgggtcgaaaagacttggcagatgtagaattgcagcaggttcaagtgattgagcgttatttgcctcagcagttgtctatggaagaaattgcgtcagcagtcaaagaaattattgagcaagtgggcgcatcaagtatgaaagagatggggcaggtaatggggatagccacgaaaaagttagctggtaaagcggatggacgtgctatctctgaggtagtaaagaagttactcgcccaataatcatcacacatgaaggaagtgtaatccctcgttcatgtgggaacaacattctttgtaaaagcccatcaaatccattcgatttgatgggtttttactttctgttggataaacatgtttgttgaggtttccaaaaaaataagaaaatcaatcgttcattcatctctgacacacctctattagatatagttccagtccacagatggaaaaacgcttatggtataaaataatcgcaacgctttcatttgagaatgatttttctactcataaaagtatcagcagaacaacatctgtaagtttggtggaacgctgcgtgaaatgaaaataaatgctgaattttctttacaaagcgcctctcataactcgcgtgtaaaccaccaagggcaaagttggtcgcaaatacgcgaattatgagcgaggcttgtaatttgttgtgattgaatgtgttacgttcatggtgtcgcttttcttgcctgtttttaccatttttttgcgactgaagcattgagataagcctccaatttgcatgctttaatgttgttgaagcatgtgaataatgcctctaatacatgtttccaagaccgataagtcaatattttagcttgaagagacgtttattttgttaaaatcagtgcaattttgcccaacgtttgcctattaaatttttctattttgaagattttcaatgaccgttttttggtaaaatgataggacaaaaacaatgaaggtctttggcaaaatggaaaggtaatttttgtgacaatccatgaaagtgaatgatgaaaactgtgaacaaaagtcatgcaatttgcttcgctcgcatttgttgttgagacaaaagagaaaagattgttttcataatcaactacctttcttcaatgagcgagtcgtggcatgcttacatgaataaataacaaaattacttgtatttagttgattttttgttatttttgtatcgaattctttagagattatatctttttgagcattattgctcaacttaaaatcaacatattaatgtcagacaaacaaggaagtaggaatatttatgataaggtaatgaagagcgttcaacgctttatggcacaagaaaagtcgggaggaatagtgctcgctgtggcagtgctactcgccatcttgttggcaaactccgcactcagcgatcgctattatgactttttccagcaaaagttaggttttatatggaatggagaaccctatctgtattttagtcttcaccattggattaacgatggattgatgtctattttctttttccatgtaggtctggagcttaaacgtgagcttatttcaggcgagctttccaatcctcgcaacattattctgcctattggggctgctattggcggaatggcggttcctgctttggtatatcttttcttcaatgcgggtacccccgaatatgctggttggggagtccctatggcgacggatatcgcctttgccttaggtgtgttgttccttttaggaaaacatgtacccacctccattaaagtgtttttaaccaccttggctattgtcgatgacttaggagcggtgatagtgattgcccttttctacacctccgaaatctctgttgccaatttagcattgggtttgggcttcctattgttgatgtttattgggaataaattgggagtcaaaaatgttttcttctacgcatttttgggcatcgtaggtgtttggattgctttcctcttgtcgggaattcatgccactattgctgcggtgttagctgccttaaccatccccgccgactctacgatagacgagagcacctatctatataggatgcgtaaattgggactacgctttatgaccgccaacaccaatgagtatcgcacgttggaaaacgagcaggtgaagatattagccaccattcgggaagatgcgaagattgccattccgcctttgcagttgatagagcaccatttgaatccattcgtcacgttccttgtacttcccatctttgccatttccaatgctggcatcagtttggtgggcatcgactggtcggcgatatttgctaccaatgttgctatcggtatagccctcggcttactgttggggaaacctcttggagtggtaggcattacgtggttgttggataagctgaacattgccaagcgacctcatgacatgtcgatgaggcatttatttggattgggctttttggcatctattggttttacgatgtccatgtttgtgtctaccttagcttttcgtaccgacctattgctgacgcaagccaagataggtatttttgctgcctctatcattggtggatgtcttggttatctcttgatgaaaccatctcggtaaggaaaataagagaagcaatacttgggaggtttcgcaatttatcgtacctttgtcataggataaaaaaatacagacttttatgcaaacaagatgtcatctatctgttctgatacacgaacaagcaaaaaaatacggagcacgaggcgccttgactttccgtaactttgggagtaaatcatggaagacagtctcctggaaacagttctccttgcgcgtgatgcaagtatcaaatgcgctgatacatttaggtgtgaagccacaggagagcattggtgtgtttgcacaaaattgcatacaatatctctatgcagattttggtgcttatggcgtacgagccatcaccattcccttctatgccacctgtagtgagcaacagataaagtacatgattcatgatgcacaggtacgaatcctttttgttggcgaacaagaacaatttgaaaaagctcgcagaatttttgccttatgtccttctttagagcgagtgattatctttgaccgtagtgtacaaataggagaacaagactcttttgcgctctatttcgatgattttattgcgttgggcgaggatctttcgcaccaaacagaggtagaagaacgctgggcagcggcgaatgatgaggatatttgtaatattctgtacaccagtgggacaacaggtgatagcaaaggggtggtattgacctatggacaatatcatgcagcgatgatagccaactatcaatgtgtccctattcgagagaccgaccgtgtgatggattttcttcccattacgcatattttcgagcgcgggtggctgtatttatgtctcacggtgggcgcccatatcattatcaacacctatcccaaagagattcaagaatcgatgcgggagatgcatcccacgtgtatgtgtgccgttcctcgcttttgggaaaagatgtatatcgcggtaaaagaaaagatagacaattccaatcccctacagaaaaagctctttaatcgtgcgttagctgtaggaaagaaatacaatatcgacaatttgagtcatggcaaacgtcctccgagggcattgtccatagaatatgagatgtataataagacggtcatggcattggtgcgtaagcaaattggtttggaaaaggcgcacatctttccgacggcaggagcctatgtctctcccgaagtcgagatgtttacccactctattggcatttgtatgcaggtagggtacggactgacggagagcttggcaacagtgtcttgcgatcatgtggacaaaccctatacgattggttcggtgggacgacccattgaaggaatagaaatcaagataggagagaacagcgaaattttattaaagggccctacgattactagcggatactatcaacgagagcatatcaatgaagtcgcatttgatgaagatggcttctttcatacaggtgatgcaggttatttgaaggacggagaattatatctgaccgaaagaatcaaagaccttttcaaaaccagcaatggtaaatatgtggctccgcaaatgatagaagccatgatgttggtagacaaatacatcgatcaggcggtcatcattgccgaccagcgcaagtttgtttcagcgttaattgtgccagagttccgcttattggaagagtatgcgcacgatcatggaatagcgtttaatagccgagaggaaatttgtggagatgctcgaatcgtaaagatgatgctcgaccgtattttgacgttacaacaatcgttggcgcattacgaacaagtgaagcgtattacactcgttcctcaccatttcaccatggagcgaggcgaattaaccaatacgctgaaaattaaacgtcctgctatcaataagaattacaaggacatcattaataagatgtatgaagaatgataacaagtgaccaactcaaagatgtgatagaacgcacacaggcgttacatcattatttgaatattgaccaaaagaagatagagttcgaagaagaacaactgcgaacgcaagcacctgacttttgggaagacccacaacgtgctcaagagcaaatgatcaaagtgaaaggcattgagaaatggctgaaaggttatgagcaagttcgtcagatggctgatgaattacagttggcgtatgaattctatcgtgatgaaatggtcaccgaagaagagttggatcgtgactatgccaaagccattgctgccatagaggacttggaactcaagaatatgttgcgccagaaagaagaccctatggactgtgtcatgaagataaattcgggtgctggcggtacagagagccaagattgggcacaaatgctcatgcgcatgtatatgcgatgggctgaagcgcatgactataagtgtacggtgagtgacatccaagatggtgaagaagcaggtattaagagtgtcaccatgaagatagagggaaacgaatacgcctatggcttcttgaaaagtgagaatggagtgcatcgtttggtgcgcgtctctccgtttaatgcgcaaggaaagcgaatgacaagttttgccagtgtctttgtttctccattggtagatgataccatagaggtctttgtagaccccgcatgtgtttcctgggatacgtttagatcgagcggagcaggtggacaaaatgtcaataaggtagaatctggggtgcgtcttcgttatcaatatcatgacccagacactggcgaagaggaagaaattctgatagagaacaccgaaacgcgcgaccaaccgaagaaccgggccaaggcgatgcagctgctgaagagccaactgtacgatcgtgccatgaagaaacggctcgaagcacaagcaaaaatagaagcaggaaagaagaaaatagaatggggaagtcaaatccgaagttatgtttttgacgatcgaagagtgaaagatcatcgtaccaatttccaaacaaccgatgtagacggagtgatggatggaaagatagatgattttataaaagcctatttaatggagttccccgtggtggaaagtgaagattaactaaccttttaaatcatacaaatatgagtggaaaaaacaaattcaacagaacaaagcgtgaagcaagacaagagaagcaggcaaagaatgtcatcaaatggctctctatcgcattgcttgtttgtgccattatatggatgattgttgcgctgaaagtttaacaatgagcggattagaaatagagcggaagttcttggtaaagaaaggtgacgcctataagcagtttgctttctcgagcagtcacatccaacaaggctaccttccatgcattggggcgaccgtcagaataagaactcgtgacgataaagcttacctaaccattaaaggaaaggctaccaatgggggcttgtctcgctatgaatttgagacagaaataaccatggaggaggcttcacaactcttcaaattatgtcaagggggtgtgatagataagcgtagatacttggttaaaagcggagcacacacctttgaagtggatgaattctacggagacaatgaaggtttggtgttggcagaagtggaattgactcatgaacaagagtcttatgtgaagcctgattttattggaatggaggtgactggcgatgcacggttttacaacaaatacatgctcaatcatccttattccgactggaaaaataccttaccagaagaataccaataagttgcgctaagatgacaccaatgctgttggcaaggaagtcgtaccaatctccacttctattgccatgggtgcatgttgcttgaacaatctcgatgagccctcccatcaatagaggagtcagaaaagcgataatgaacagtcgtttagaggtgagcggtcgtcgacttttgaggtcctcccagtaaatgcaagacgtgagtacaaagtataatgcaatgtgtgtccacttatccattaaggcaacatcgctcagcggtgtctctggaattggaatgagacatacaatccaaatgccaatgaccaaagtcaaagtcacgggatatgttcgcagaaaatgggagacctgttgtttcatttgctatcgacaatgtaaggtgcaaagttacagtattttgttcatgataagaaacaattgtggagtgaatgttatttgttcgtgctgttgaggtgctatctctgcagtggaagtccgcccatgtcttaacaatcatcttgaatagtgatgtctttcaaggattttttttattttaacaagtcagatcgcaaggcacttttatttctgttgctcttaggtattggagcgacaatactgttctatgtctttagtgacccaaagaatattgacgccaatactcccattcatgatacagtatttgcttatcgagatgttcatgttgaccgctatggacagcaacctgctgtgtattatcgtgtagaaggtcgacaaatagaactcttccctttcgatcctaatacggcagacagcacagctttgttacgcttaggacttcaaccgtggcaagttcggaatatatataagtatagagccgcaggaggcgtatatcgtcagcgcagcgattttgcgcgtctttatggcttaacacagaagcaatatcgaacaatcgagccttatattcatattggttcagattatcaaccagctgcggaagcggtcgcatcggtgaacaaaactgtgggctatgggcgtgatacgctccgctttcccgtcaaaataaaatcttcagaacatatctcggtgaacacggcagatactaatttgttaaaaaaagtgcctggcattgggagctattacgcacgtcaaatcattcgttaccgtacccgattgggagggttttattcgacacaacaactgttagaaatagaagatttcccagaagaatctttgccttatttccgtatttcaaagcatgatacagaacaaatccaacgtctgtttatcaatcggttatccatacatcagctcaagcgacatccttacattggttattacagagctcgagccattgtagattatcgacgtttgaagggtcccatacatcgttgggaggatttaagcatgcttcctgatttcacacctgatgtgattgcacgactttcgccttatgtttcgttctcggaataagcgtctctatcgtttgtcatgtcctttggcactctcgttggctccatttgtttgcttttttaggcgttaagtttttggcaagctttatttccgtttttaattccaataaggtgagaattcaagaattttgtctacatttgcatgaacaacgtaaaatataagaagaaatgaaaatacaagaaactcctgttttattacttactggatatttgggaagtggtaagaccactctggtgaatcgcattttatcaaataagaaaggtatcaagttcgcggttattgtcaacgatattggagaagtcaatatcgatgccgacctgattgaacaaggtggagtagtgggtcagaaagacgatagtttggtggctcttcaaaatggttgtatctgttgcacactgaaggtagacctgatagaacaactgaatgatattgttcggatgaataagttcgattatattgttatcgaggcaagtggcatttgtgagccagctccgatagctcaaactatctgtgcatatcccgaactgtatcctcatttggctaaaaatggtattgcgaaactggatgctattgtcaccgtggttgatgccttgcggttgcgcgatgagtttaatgttggagacgacttgctgaagcaaaacattgatgacgatgatttggagcggttagtcatcgaacaaatagaattttgcaactttatcgtgctgaacaaggcggcagaagtgagcgcagaagagctggaaaaggtgaagaagattattcgtgctatccaacccaaggcacaaatattgacctgtaactatggtgatatcgatttagatttaatccttcatacagatatgttcgattttgaaaaggtggctacctctgccagttggatagcagagatagaaaatcatggtgacactcagccttctcatacggcgcaggagcatcatcaccatcatcatcaccaccacgatgaacatgagggaattgagaatgaagaaagtggcgaggcactcgaatatcatatagaaacgtttgtctattatcgacgtcccccgtttaatctcggattgttcgatgattttgttgctcgtcgttggcctaagaacattattcgttgcaagggaatttgttattttaacgatgaaaaagccaaatgttatgtttttgaacaggcaggtaaacaggttcaaattcgcgatgctgggcagtggtatgccaccatgccagctgaacaactgcaaaagtacatggcgcagaaccctggacttcagcgtgattgggacgaacaatatggtgaccgcatgcagaagttagtgttcattgggcaaaatcttgacaaggaagaaatcataagagaacttgatcagtgtctcgatgagtagcaccaatgacgcctgtctcaaatcttgtcttcatcagtatgtccatactttttttaacggtatgaaaggcaaataataggtaaaaaggttgcaccttgaagttttttcaagtaaatttggagcatctaatatgtcaaacttaagctaatcaattaaaatgaaaacagactcagaaattgctcatgaagcaaaattaaaccttattggtgacatcgcacgtcaaattaatattccagaggacgatttagagccttatggaaagtatatggcaaaagtgccttacaccctgattgatgatgaaaaggtaaaaaaatccaatcttattttggtaacttctattacacctacaaaaacaggaaatggtaaaacaacggtcagtgtagggctggcattgggaatgaacaggattggaaagaaaaccattgttgctttgcgcgaaccctctttaggtccttgctttggaatgaaaggtggagctgcaggtggaggttatgcacaggtgctgccaatggagaagataaatcttcacttcacaggcgatttccatgccattacttcggctaataatatgatttcggccttgttggataactattgttaccagcatcgtgacgagggatttgccttaaaggaagtgctttggagacgagttctggatgtgaacgatcgcaacttgcgtaacattatcacaggattgggtggacgtaccgacggcattgtttctgagtcaggctttgatattacgcctgcatctgaaattatggcaatcctttgtttggctcaggatgaagatgatttgttgagacgaattgagaatatccttttgggctttaccattgaaggaaagccttttacagtgaaagacctcggagtagcaggtgccattaccgctattttgcatgatgctattcatccaaacttagttcagaccacagagaacacacctgcctttatccatggtggacctttcgccaatatcgcacacggttgtaacagtgtcatggcaactaagatggcgatgacctttggagagtacgctattacagagggaggattcggtgctgatttaggagcagagaagttctttgatatcaaatgtcggaaggctggtatatctcctaaactgacggtgttagtagcaaccgcacaagcgttgaaaatgcacggtggcattgatatatcgtctatcaaggaaccgcatattgaaggaattaaacaaggctttgccaacatggacaaacacattcacaaccttcaatcctttggtcagatagtggttgtctgcatcaatagattcccaacggatactgatgaggagttacagttgattcaagaacattgccaagagttaggcgtaggttgtgctatcaataccgccttcgttgacggaggaaaaggagcagaagcattggcacgtttggttgtggacacaattgcacaaaagccttcaacaccgctgaagatgttgtatgatgataacgactcggtagaagataaagttcgcaagattgctctgcaactttatggagcacgtgacgttattctcaagcctgcagccaagaagatgttgagtcgtattgaggaattgggatgcgctcatttccctgtatgtattgcaaaaacacaatattctttctctgaagatgcgaaagcctatggaatgccaaccaattttgacattactattcgtgacttcgttattaacaagggggcagagatgatagtggcgattgcaggaaacattatgcgcatgcctggattacccaaggttccatcagccgagaacatttctgttgtcaatggtgaaattcagggcttgtcctaaaaacgaaatcgaatgattcacaataaaaaagcacttcgtacgaaaagtatgaagtgctttttgagttattggtcgggatgaggcgactcgaacgcccgacccctacgtcccgaacgtagtgcgctaccaactgcgctacatcccgtaagttgattcttgtgggtcaatcaactctaccttctttagcatttgcaaaggtatagtaattttttgaaaatcgcaaaacatcgtctgcttatttccttttgcttgcatggctcttccgtgtacgaaacgttgttcgctttgaaaaacaatcttttttcttttgtttcaacaagcattatcttttaatgtgaggagtcgtttcttttcaatcttatctttttggatggtgacattcagttgcttttgtcctgtaattttaccaaaaaacggccatctaaaatcttcaaaatagaaaaaatcaataggtaaacgatatgcaaaaatgggctgattttaacaaaactgatgtcttttcaagctggagcattgactaaacgggcttggaaacatacattagcggtgttgttcacatgcttcaacagccttaaagcatgcaaattgtaggcttatctcaatacttcaatcgccaaaaaaaggtgaaaacaggaagaaaaagagtggggttaaatgtaataagttgaataacaagaggttataaaactttcgcataactcgcgtatttgcgaccaactttgacgttggttgtcgacacgcgagttatgagagacactttgtaaagaaaattcagtatttattttccttccatgcagcgtgatatcaattgtactaatgctgcttttgagacgttttctgtggtacaaatatcactcagagaaagagccgtgagcggcaatgttctggctttattgtcccattgctacatggcgcttaaccatacgttttaacagggttaatacaacgggttgaatctcccctgatttcgaacctgctcaattgtatgcgcaacagtctatctatcttttcgaataggtgtgaaaatcgtgaaaattaaaatgacaaaaaattgttagttctgtttttttagtatatttgcagccaaattttgaagtagaactaacttgtattctatatggtactttctcctgatgacaagcgtgtgacgcatagtggtttgagtttcataggtgttgtcgtaacgttaggtattgtttttggcgacattggtacttcgccactgtatgtcatgaaggcgattgttacggctggtagtgttatcaatgcccaatatatcataggtgccgtatcttgtattatttggacgttgacgctacaaaccacggttaaatacgtgcttattgcgcttcgtgccgataacaaaggcgaaggaggtatcttggctctgtatgcgcttatcaagcgacatagtccaaaatggctttacctgttggctatcattggggcgagtacgttggttgctgatggcgttattacaccgtcgattacggtgctctctgccattgagggattgaaagtttacgaacccagtacgcctactgtacccatttgtctttgcatcattacggtgttgtttgccatacaacagtttggtacaaatgccattggccggttttttggaccccttatgttcgtatggtttgccatggtgggggtgttaggcctcggtcatatcgctgacttcctgcccatactcaaggcattcaatccatattatgcgttagagcttttaacacacgaccccaagtggttcctcattcttggcgctgttttcctgtgtactacgggtgctgaggctctttattccgaccttggtcattgtggcgcacaaaacatacgtgtgagttgggcgtttgttaaattgatgctcatcctcaactacttagggcaaggtgcgtggattatcagtcatgttgacagtcttgttcctggtatcaaccctttcttcgcaatcatgccccacagtattctgttttttggcattatcatggcgacaattgcagccgtcattgccagtcaagcgcttattagtggttcgttcactattttcagtgaggcaatgaatttgaagttttggcccagacagaagataaaatatactaccgacgttaaaggtcaactgtatgtaccttttgtaaatatggctctctatgtgctttgcgttctcgtcattctgtttttccaaaactcaggaaatatggaggctgcctacggcttagccattactataacgatgctcatgactaccttcctgctttttgcctatttgcatatgcgtagggtgtcacccttgttgattctgccctttgtcatcttttttgtaggaattgaagggattttctttattgccaacatgttcaagtttgttcatggcggatgggtaacgatgctcatggctggtgtcatgttctctgtgatgtatgtatggtacaatgcgcgccttattcgggggcagcaggtcaacgtacgtgatgtaagagattggtatgacgttatttctgatattaagaaagataccactattgctaagtctaatacaaatatagtctatcttagcaagctttctggaacctacgaaatagaacaaaaaattctatattctatcatccacaagcaccccgttcgagccgaccactatatattattgcacatcaattatcaagatgagccttcaacgcttgaatatgagtttaccactcttatccctgatacgctctatcgcatcaatttgaatttaggatttcgcatacaacccttggtgaatctttattttcggcaaattatagaggagttagtggctcgcaaagagtttacaatcgacagcagctatccatcgctcaggaagcatcacattcctgccaattttacctttgtcatcattaatcgaatttatgcagctctcaatcacttctctcagaaagagcgcattgtcatgggattatattcgctcatttcgcacataaaactaagcatgacacatgcgttagggcttgatacaagtaacgtattgatcgaaaatgtgccattggtggtgaagcctcatcgccagcgtgtcatccgccgaattgacaacagcgacgacgttaaatgaactggctaaaaggaagttgcatggaggagagcaaaaaatgattgttcatgaacagataactgaagaatgaacaacctatccacttgctcacatatcttggcaataaaaagctatgatatgaaggttggctaactttagtcttgtttgtttgcaaggaaacgctctgctctttgcaggtcttctggtgtgtcgatgccaatggtgtctatattcgtgattgccaccttgatgcgataaccattctgcaaccaacgtaattgttctaaactttctgccaattctaaagatgattgtggaagttgagtgatttgcttcaatacctctttgcgataagcgtaaacgcccaagtgttttagaaatggaaattgcacaaaccactgttcgttgtttttattgcgaataaaaggaatgaccgaacgtgaaaaatacatggcatatccctgattgttaagcacaatcttcggagagttggggttttcaacggctttttgattttcaaacggtttacccaacgttgcaatctgtgtattagcatcgtcaaaacattgacatagtgaagcgatttgttctttttgtataaagggttcgtcaccctgtatatttaggatgacatcacaggtaggttgtaatatctctaccgcctcttgtattctgtcggttccgctttggtgatttttactggtcataaccgcttttccgccaaaagataagaccgtgtcgtaaatgcgctgatcgtctgtggcaacgtaggtttcatgcaacacagcggaaacttgttcgtacacatgttggatgacgggtttgtggttgagcaaagccagtggtttaccgggaaaacgagtagatgaatatcgtgctggaatgatgccaaagaatttcatgatgtcttagttttgaaagtacaaagttactaaattttactaatagtctttgcagtttcgtcaaaaataagtacttttgaaaatcttactaaattatatttgaaagtgaaaaaaggactattatctcttattttattcatattaccatttcaagtttttgcccaaaaattaactttaggctcttgtacaatctcagaaggacagggcgcgaaccgaattacgggacaatataaaggagaaatgtctgcgggaaaacctcagggaaaaggtagcgtaaagtatcaaaatggaaatacgtatgaaggtgaatttgtgaaaggaaaacgccaaggttatggcatatacacttttgcagatggtgagaagtatgaaggacagtggttccaaaaccaacagcatggtcgtggtacttattattttgccaacaataataaatatgtagggctatggttccgagattatcaacagggacatggcatcatgtactattataatggagacaagtatgaaggttcttggtatcaggataagagacagggaaagggaacctatgtcttttccactggtgcttattataaaggacagtggcagaatgatgagaaaaatggcaaaggagtcttttattggggggacggttcttcgtacgatggtcaatggatgaacaacgttcgagaaggcaaaggtgtctacaagtatgcagatggtgatgtatattcgggcgactggaaaggagacattcaagacggaaaaggcatctataaatttcaaaatggcgacttgtatgaagggcaatatgtgcaaggagaacgaacgggagagggaatcttcagacttgccaatggcgataaatacacagggacgtttaagtcgggagaacgagatggcttgggaacaatgacatggaaaaacggtgatagatatacaggctactggaagaacgaccagcaaaatggtaaaggaaaactgacgaagaaaaatggcgatgtctttgaaggtaactttaagaaaggaaaggtggacggagaagtgattatccactatgccgatggtagtaaatacaaagggatgtacaaaaacgggaaacgtaatggacctgcaattgaagaaaccaaagacggcaaacgatttgaaggttcttacgttgacgaccgaagagatggaaagtttgtagaaaaagatcgcaatggaaaagttattacgcagggacgctatgagcatggacgtcgctatgtaaattgataaaatgaattgtcgtattaccttaaaataagaatttgattaacgatgaaaaaagaaacgagtcaaaaaaagagagttttggagcaatctgcattacatggatatcagatgaagccattggagttaatcaaaaacgacccctacttggaaccatatgaaacggcaatcagtggaagatatgagtttgcattggctaccgaaaaaaggctcacgcgacaaggaaaaagtacactgagcgactttgcgtctggttatctctattttggattgcatcgcacacaagatggatgggttttcagagagtgggctcccaatgctacagcactttatttggtgggcgattttaatgactggcaagagttgagtacttatcaagcgcgtcgtatagaaggtactgggaactgggaactccaattgccgttggatgccatacagcatggtcagctttataagatgcacgtttactggaatggaggaaagggagagcgcattccggcgtgggcaactcgggtagtacaggactcaaagacctctattttctcggcacaagtatggagcccagagacggactatgaatggaaagacaaaggatataaagctgtcagcggaccactgttcatctatgagtgccacataggaatggcacaagatgctgaaaaagtggggacgtacacagaatttaaggagaatgtattgcctcgtattgtggcggatggatataactgtatacagattatggcgatacaggagcatccttattacggctcttttggttatcacgtcagttctttttttgctccatcttcaagatttggcacgccagaagaactcaaagaccttattgacacagcccatcagcacggcattgctgtgattatggatattgtgcatagtcatgctgtcaaaaatgagttggagggtttgggaaatttggcaggtgacccaaaccagtatttcctttcaggcagtcggcgtgaacatccagcatgggacagcttatgctttgactatggcagggatgaagtcatccatttcttattatcaaattgtaaatactggctggaagagttccattttgatggatttcgctttgatggtgtcacctctatgatttactatagtcatgggcttggggaagcttttaccaactacggagattattttaacggacatcaagacggcaatgccatttgctatcttacacttgcgaatcttttgatacatcaagttcgcccccatgctatcaccatagctgaagaggtaagtggcatgccaggtttagcagctcccgtttcgagtggtggttatggatttgactaccgcatggcaatgaatattccagacttttggatcaagacaatcaaagagctgaaagacgaagattggaagcccagttctattttctgggaagtgacaaatcgtagggcagacgagaaaacgatttcctattgtgaaagtcacgaccaggcattggtgggagacaagacaattattttccgcctgatagatgctgatatgtactggcatttcaagaaaggtgacgaaaatgcagtagttcatcgagggatagctcttcataaaatgattcgattgatgaccgcttccacgataaatggtggttatcttaactttatggggaatgagtttggacaccccgagtggatagattttccacgtgaaggaaatgggtggagctatcaatatgcgaagcgacaatggaatttggtggataatttagatttaggatatcattatttgggcgactttgataaagcgatgattcggttattgaaatcagaaaagaattatcaacagcaggaaataaaagaaatatggcatcaggatggtgatcaaatcttgtgttttatgcgtggagatcttgtttttgttttcaatttctcacccactcaatcctatgttgattacggatttctcactcctccaggctcttatcgggttgtgttgaatacggatgcgccagcatttggaggcaatggactgaatgatgatagcgtagaacacctcacagtttttgatgccttgtatcaaagtgagaaaaaggagtggttgaaattatacatacctgcacgttgcgcgatggtattgaggaaagactaagacaccgatttggtgtatcgcattaaaccattatagaaattaagacattggctacctatcatattccaaatcagaaaaaatcgttgctgccatgtattttgtgcagtgtagtgttctgttgttttacttttatttatctgttttcgtatcaatgtgatgtgttggcagttacgcagcacgtgctatctaacggacagacgtattatgataaaacaattggagcgatacttattacggttgtcttataccttttacacatcagtatcttttggttttttagattatcaagaataggatatgcgcttaccttttttccttcgttgttactccttacagctttaacagatatagatacagagaaaatctatcatcattttgctcttggggcttggtggtgggtaattccgcttttgttacttctgtgcttctttgcattaaggtacttaaagcaaaaggtttcatataaggtaactcaagcatcgtacaatgtcttgtctcgtccgatgtggattaacttgttgtctttggtggtgatgttttgtatggtctgcacctttagtaatcatgataaactctaccattatcgagccaaaatggaagtagccatacatgaacatcggttcgaagatgcgctgaaagtaggagaaaattcgctgcacacagactcaagtttagtgatgcttcgtgcttatgcgctttctaaagtaaaaaggttgggtgaggatttatttgaatatccattgcaaggaggttcagaagcgttgctaccaaacggagagagtgtcaaaatgctgatgctaccaaccaatgaaattcagcattatttagggaagtccatgaagtcatccatgaaagttgtgccttatttagagttcttagaacaacatcatttaggaaaatctgccataggtgattatttgctgtgtgcctatctgttggataagcgattggatgatttcgtgaagttgttgccgaagtattacgaaatcaatgccaatcttccaaaacattatagagaggctttaatactttatacgcatcttcgttcccaaccaattgtgacctatactaataatgtgatggatgctgactacgaggactatcaaactatcgcaaaaaaatatcccaacaccttagtgagaaaaaccaaagtgcgggacatttatggtaagacttattggtattactaccaatattcttccaactgataatactaataaggggattattttaccatattgtacgccttcacccaatccgtatcaatagaaaattgagtgatatatttgttgttgtctacataggcatgtgtcacctctttatctggatcgttgaataagggattttgaatcgtggcgtttctaaattttgccataagtatttccttatccgctttcttagaagagttagacaaccgtttgatgtaactattcacaaaatcaatcatggcattggtttgtttgccaagttcaaattctgtgaaaccgtcagtttgtgctgcctttgtgaggagatagaaaatagcgtcaaccttgaacgttgcaacttttctttcttcaatgtctttggaggtgtctttttttatcgcctcagcgtggtgcataatccgatttacttctttatagatttcttgagatgcagcttttactgtgaataagcaggttaaagctaaaagcataataatttttttcatcacttaaaatatttgtatatgtaaatttatgaattgaattcttccatacaagactttcgtctgtcattattttcagaggttcaaacctcaacacatttgcgtttagatagatttccctgctgatattctttccttatttttgtttataaaatctttccatcctccataatgcacatcggtaattggcttgcctaattgcataaaatgacaataagcagcccccaatgcgtccgtcgcatccatgaagcttggcatttcttgtgcgtctattttcaaaaggcgctgtaacattcctgccacttgttctttacttgcttgcccctgccctgtaatagacatcttgattttcagtggggcatactcatgaatgggaatgtcatgttgaattgcagcggcaatggcaaccccttgtgctcggcctaatttgagcatcgactgtacattctttccaaaaaacggtgcttctattgccatttcgtctggtaaatattcgtcaataatgccagtgacacgttcgaatatatgccctaatttaagatacggatcaccagtctttcgcatgtcgataacacccatagcaagcatagagggcttccccttgacaattcttaatacgccataccccatcacattcgtgccagggtctattcccagtattattttatcagctgctgtctgttgtgagtgtttcatctccaaatattgcaaatcactaagtaaatattatcgatccatatatggattacctgcaatttctgtaccaatcgttgttgggacgccatgaccggggtagattttggtcatgtctggtagttgagaaatcattctaaggctttgtatcatttgaaacatggagcctccttccaaatctgtcctgccaatggagtaatggaaaagtgtatctcccgaaaaggcaatgttttcctctgcacagtaaaagaacacacttcctggcgaatgacccggtgtctcaagtatggtaaatgtgtgtgaaccgaacgaaatcttgtcatcttcagagaagtatgtttgtggcattggcatttgttctgttaaatgtactcctgcaaaatattctgcttgctcgttcaactgctccattaaaaacttgtctgcttggtgaacagttggcaagagtccatactctttgtaaagaaaagcatttccaaagtggtggtcaacgtgtccatgcgtaccaattaactgtacgggttgaagttcatttttgcttatatattgttggattgcgcttctttcttgttcataaaaagcgccacaatcaataatgacgcattcttttgattcgtcatgaatgatgtagcaattctcttgtaacatattacacgcaaggctgtgtacttctatcatatagattttcttttgtaaaattagggattctctctaaatagttaaagtggtagatacacaacttgttttgtctggaaccactcttctgtaaaccaattagagatttcggttacttgaactatatttgagaaaggtttgagttcatctgctaagctacctccttttaggcagataatcccattgggaagcacattcttttgttgtttagagatgttctttctcacaattttaatcaactctggcaagggcatcaccgctctgctaaccacaaaatcatatttccccttttcttcttcccctctgatatgtttcgtttcaacattcttgagacctatcgtggtagcaacttcttgagccactcggactttctttcctgttccatcaatgagtgtaaattgacattctggaaacagtatggcgagcggaatacccggaaatcctccgccagttccaaagtctaagatgtttgttccattcttaaaactgatgaattttgcgatggccaaagaatgtaacacatgatgctcgtatagctgttgaatatcttttcgagatatcacattaatctttgcattccagtcattatataaatcttggagcatgctaagttgtttggtttgcgtctctgttagcgaagagaagtatttgcttataatttgcatcagtgatgggtgatatgtggtaacttgacttgttattatttgatgattctgtcttattcattctttcctgaaaaggcatgccattactaccgagagctataataaccaataaataacttttgcaaaaatacgaatattttttgtacctttggcatatcaacttattaaataaggtaaaaatgtacacgaccgcactttttgatttagatggagttattctggatacagagcctcaatatacaattctatgggaccaaataggagaggaatattaccctgaattaaagcattttgcacatcgcatcaaaggtcaaaccttggttcagattttcgaaatgtattttagaaataacgatgcggttcaacgtacgataaccaatcgtatcaatgaatatgagcgagaaatgcaatatcattatatcttaggggtaaaagaatttattgaggatttgcgtcagcaccaaatcaatacggctgttgtcacaagcagtaatttagagaagatgaaaaatgtgtatcgaaatcatcccgagtttggacgattgttcgataaaattctaacgagtgaagactttgttaaaagcaaacccgaaccagattgctatctccaagctgccgccaacttccaagttcctgtctctgaatgtgtcgtttttgaagatagcatcaacggattgaaagctgctaaggctgcagacatgacggtttgtggactttcgaccacacttcctgcatctgaaatttcctctctgtgcgacatcgtcattcctcatttcaaaggattagattatccaaagtttcgctctatgtttggataagcgatatttttatgtgcatggtgtttagattgtttggaaagatgattgaccagaaagaaaatacttaaggttaaaataatcaggctgtttttacgtttcattagtaatgaatattcgatattgcggcttattgctgctgttagttatcattggctttacggcttgtaacgatgaagattatttttcttcgtcgtcagaatttacattatcttttgaaaacgatagtattcagttggatacagtcttctcgaatgtgccttcatctgccaaatctttttggatatataatcgttctggggcgggtatcaaatgttcaaatgttcgtctcgaccgtggcaatcaaacgggttttcgtgtgaatgtcgatggcatttacttaggaaaggagatgggatatcaaacgtctgatattgaagttcgcaatggggatagcattcgtgtttatgtggaagtgaccccacccgttaatcatcagcaagatgccaagcaagtggaggatgctttgctgtttactttggaaagtggaaaggtacaaaaggttcatttaagcgcctattcatgggatgcaattcagttgaaccagctccatatatcaagtgatacggtcattgcgtctgaacgtcctattcttgtaaagaaaggtatcacagtcgatagtgctgcaacgctcaccattcaagaaggtacatctttgtattttaatcacaacgctggtatagatgtttacggaaggttaattgtcgaagggacagctgcgcacaatgttgttcttcgaggaagtcgtttggatgcgatgtttgattacctgccttatgaccgtttaagcggtcaatggcaagggatacattacttttcttcctcgttcgataaccaactgaagtatgtggatattcatggtgctttcaatggtatcaccatcgattctacggatattgttcgtgaaacgttggcaatcgcagcctctacgattcataattgccaaggctatggcgttaatagccgacatgcgaaatggactgccgtcaatacacttttctctaatacgctcaacgattgtgtctatctcgatgggggagaagcagagctgatggcttgtacactggctcaattttatccctttgacgccaaacgaggcgttgctttgcacattgatacgaaacactttcctgtctcattgttcaaatgcacgaacacgttaataacgggctatgctaacaatgaggtattgaaatcaaccgctaatagtgcctttcccttgaattttcatttcgaatcctgcttactgcgaacttcgataaaaacgccagaagacagtcttcatttcaccaatgtgattttcgagaatgtgaacgatacacttttggcaggcgctaaaaactttaaaaccgttgatacagatagcttaaaatataattttgaactgagagaaacctctttggcaatagataaagcaacgcaagtagggagtccgctaaaagaccgtaagggcgcagaaagaggaaaaaatcccgacatcggtgcttttgaatatatcaaacccaaacaacgatgaagaaaataaatttggatatcaccattcatgaatggcaattagaggagttgtccgtcgatgatcaggaattgatacgtgcctcaattgatgcaacaaatcatgcctatgccaactatagtcatttctatgttggtgcagcagtgagattggcgaatgggaaaatagtcataggtgccaaccaagagaatgccgctttcccctccggactgtgtgcagagcgcacagcagtgtttgccgcacaggcaaatttccctaaagaaccgatacttacactcgccattgcggcaaagaatgacaaggggttacttgccgaacccattacaccttgtggcgcttgtcgacaagtaatcttggagattgaagaccggtatcgccaaccagtgagaatacttctttatggtacaaacaaaatttatagtatagatagcatcaaagaccttttgccactttctttcattgacgaaaatatgcattaaaagatgcttgttaataaaaattaaaatgtatgctttttgaaggccttgtcttttagaatatgaaataaagcgttacctttgcaaccgcatttgtgaacattagttcatgacgaggcagcactaaaggaagtgtgggtgagtggctgaaaccaccagtttgctaaactgacgtgcgggttaccgtaccgggggttcgaatccccccgcttccgctctatcattaatcggtcggttcatctaacggttaggatacaagattctcaatcttggcatacgagttcgattctcgtaccgactactatcattacatttttgatgtatttggaatcaatcaattgaacatttctaatagcccattggttcaatattgattcaacatttcggaaattttatgtaactcctattttctgaccgttttgtttgtgctgtcatggtcgcctctcttcatttctgtgactgcgtaaattctgtatcagaaacagttgatttttggcaaagccgcccatggtttttgttctattattttaccaaaaaacggccatctaaaatcttcaaaatagaaaaatttaataggcaaacgctcaacaaaaatgccctgattttaacaaaatcgacgtctcttcacgttgaaatattgaattaacggtcttggaaacatgcattagaggcattattcacatgcttcaaccgcattaaagcatgcaaattgcaggcttatctcaatgctttaatcgccaaaagatggtaaaattaggaaagaaaagaagcctgataaggctaatatgttaaataacaatgaattacaaacgttgctcataactcgcatatttgcgaccaactttgctgttggttgtttttatgcgaattatgagagacgttttgtaaagaaaattcagcattaattcgtctccattgcaacgttccattcatgttacaaacacagcgttattggtggcttgcattatataaaatcccgcttaaacgaaggtgccattttacaaaatgtacatcaacagagtcgggtgagacttcctgctttgccatacatagtgcaatataacaatcgcttatttcagaccctttattttatctcactaaaggcattctaaaataagcgatatctttccttatcctcataagcgggatgtaggaagccggttgtctttgttaagcatagctgtgcataccacccagcacataattcacaccaaaataagtcatcagcaccgtcaagaaagccaatacgatatagacatgcaagaatattggacggcgaaacgctggcaatgactgttcgtggaacgtcaaggaataaaccagcatcgtaatcaatgcccatgtttctttggggtcccacccccagtatcgcccccatgaaacattcgcccacacggcaccagtgaatattcctacagccaacaagaatacggctggatacaacatgatgcgacttatatcggtcaatcgatggaggatggaagtgctacttcccattcggttcatgatgagtgccgtgacaccattgaaaaacaagaacgcaaagagggaataggagagcatgaccaaaatgacgtgtatgctgagcagtggtgaagcaagcacgggcatcaacgttgtgatttgaggatttcgctccccaagcatggacaccatgagggcaagaccagctgccatgagcccgaaagggagaaagaacggtatgcgtttgccaagtggcaatgcaatgacaagcatgcaaagcgccatgaactgcatagtctcgaagccatttgacaagggcatgtgtcctcccacatatcctctcagcgcaatcaccacaagtaggaaacaggcggacagggcaagcaacaaggcgccgcatcgcatgagggagcgttgttgtggcttattgcgcagcagatttcttgcggtcatgatgtagaacagtatgcctgccacgatgagcaatattgccatgggaaaagagaactggagtgagttatatatcttttctgccttgaacctgttgtcggatggcaatactgttcctgcctttttttgttgatattcgcgtattttttggaggactttttccactccagcgttgtcttgtgcaagtgcaagctccatcacatagtcagtggagcgcttgatgaagagccactcatcttgtccaagtccttctggaagttggtcgccttgtgccatccaccttagactacctgcctctttcacagggaacattctaacggcttgtcctgacatgagtgacgcaatgatattatatttttcgtaagctgccgcaacatcccgtgcttcgttattgctgagcgagcctttgttcatttgctctatcagagatgaaagtttgaagccttgtgtatcactggtgtaatccatccatgagacataccttccgtttgcgttcaatgccttttttacacatcctccacttaccttaatcatgggctgttccacccagtctgtggggtataacagccaccccacgagtacctgttctgcggtatatcctcgatagctgtcactgccatatagtttaatggtcagatctcttgccattgtttgcatggggcagatgcgcccacagtggtaaacatagaggtcgccaaagcgttcagccaacgctgctggtaatgttttgggaagtgggatgttactggaggatagcatcttcatgggtacaagtaatagcaaagccagtactaccacctttgccttgacgctctccttcttcataacctgtctaattgtccttcggaatccaccacgtggatctgcaagaaacgcaatgatgctaagtagcagcatgacgtatccgcagtatgttacggtgatgcccagcggatcgtatgaaacggatagatgcacccagccgctctccgtgtcgtaaccactttgataaaaacgatagtgttgttttttcgcaatgttgttcatggacacctgctgctcgtctccatcactaaagactacatgactgacaaagtccatgggcgaatctgtacccgcatagtactcgatgttgaatttgcaaagtttcatattgaaaggcaggcgctgttgtttgccgtcttttatgataaacgagtttgctggttgtccgttgtggagatatatgtcaccttgtttacctgttaagaaggtcatgcctgctcctaagagaatcacagcgaaagaaacatgcagaaagatgagcgaatgccgcatcaccgcatgccagtatcgcagaatggcaaacatagacgatatggcaagcatcatccacagggcaaggaaagcccatgagccatagatgtacttgtgtgttagttgtgtgccgtacctcttatccatgaacgaggctgccgccaagactatgatagtcaatgacagcagcccgaaagaaatattcgttagtcgtttcttcattaggctggttctataaattagctttgttagattttgagcttatttttgaggtcaaaatgcaagagagtgaaggagtgtagcgagctacacgactgaacgaacttacattttgaactaaaaagaagccaaaagataacaaaacgtatttcataaacatttaatgactatgtgcggtggtaatttatagaaccagccattagatagattcaataaatttgaccatcgcatggcggtcttccttgttcagtttacggaatttctctattgtccatcgtgcatgcgaaacaccaccttcttttgaacatccatgccacataattgcctctatgacatttcttgctctcgcatcgtacagtcggtcatcgtgacctgtacatactttcataagtcctttgccccacaatggcggtgtacgtatccatcctttgcggacatcgttcttcatgtacagcctatgtgaaactaaatcggtgtaaggccatatcttttgtttgggataatgtggcagacgtgtgtcgttgggtttgatgttaaggtcgccaggataggagaactggtcgttgcccgtaatccacatgggtcggtgacacgttgcacaacctatttcgttgaagagcttcttgccacgttgcacgattggggaatccatgttgcgtgccgcaggaacagccaatcctctgagccataccatgtagttcaaatagtcgttgtcttccatttcaataggatgcttgtcactggtgaaatagttatatatgtccttttctgggtcgcccgtttttttccattcagggaaatatttatagaacactttctgaatatcaggatctttgcttgcggttagcgcatactccttggtcacattaattgtggtgtgtccacgtctcgttacattaaagtttgcccagtgctgtacatcccaagtaaatgtacttaggtcaaggaaatgaccgaagcggaaaggttccattgtaatagagtcaatggcagtccatttcccgttcttaaaccttgagggatccaattttgcatgcgcttcttcgcgctgccactgcttcagcagactgtcggcatcgatggctcctattagtccgttgccaaagaaaggaatggcattcttgagtcgtatgtggatgtcgcttacattaacaggtttgccattatgtgacggcttcacataataggcgtcctctggtattttcacgtcaggatatatcaggctgtatcgctctccgtctgggaatacgttcccccagtcgtcggtatattccttccatgtaatttgcacttttgcagggtcgagatatgacttgaacggaggcatgccctggaacttgggactgaagaaggagagtagttcaccgtcatcgccgaatatttccaactctgtggcattgccccattgttttggatcgaactttgtaatccgccatccgtgtccataaccgcagtgacagctttcacatgagggacgcgagtataatggtcctcttccgttgaaaggacgtgtgcttgagttgtatgggcgttcaaagaaatattcacccatcttgaactgatattccagtcctgcctcttcgatagcgggtgtgggatcctcatacgcacttgcagtggcattgaatgttgtgccgagttttcctccagcataccattcgtccgctaattccttactctcagtaccattgccgttgtcgtctatatctttgtccttacaagatatgaccgacacacatacaaatgccatggcagctaccgaaagtacttgttttgtggtgattgtgtgatgtttcataatctttttgttttaacatgttgactaaaaatgctgatgattttcaggtggtttagccacctgaaactcaaatatgtcgcaccttgataaccggtgttcacgctgttattttttcagttcagtcttcagttcactgagcgtctcatcaagttctttgcaagcatctatggctgccttgcaacttgcatctttatagttgagcacaaatggagctttcatgttcttgatagctgtttgtgctttcgtaatagctgccgtcactttcatgtccatttccttgttgtgctttgccatataattgtggatggaggcaccgcgattaccctcaataccaccataataaacgttctcgacagagatgatattgttatggaagtcatgaatggacatttggctgtatggcgactctatgtatgaaacgtcctcgcctgtgtgtgctgatccaatcttcgatgtgccaacctcgtcacagatactattgcatcccgacacaatttcctgtagagcggcaacccatgagcggtacagtgaacctggttgaccagcaagcagaatgttctctccgtaagaatgttctcctccactgacggtgatgccaagctctacatcttcaatgatgtgtttcacttgtgcagcatccagtttggaagcatattcctctccagcccatgaagtgaggagttgccagcaactgttgcggagatcgccagccacagcaatggcatacacgaggtatttttcttctattgaacctgcctcgcgtggttttccgtctttgaaaaggatgtactccactccatgatagcccaacaactcctgaccaagttttgtacgtgcggctatatcataatcgtcgccatcaaggtcttcaatgttggttgccgttgcaagatacttctgcagtgcaggaagatcgagcggccaagagtcgatgtgtggatcaattccgaagtcggaagcagctccaaataagaaagcttcgctgcgttcccaccacatacgcgatgcgagaaagtcttcacatgccttgtcaaggtttgtttgagtagggttcttgcggtattccctaaggtcttttaccaattcagacgattttaaggccatcttctcataagttggcacaacagtcttgtggatgaaggcgtctacgatttcagcgtacgccttgtcgcgttcttcctgtttttgctgttcttgtttttttgagtcatcttcgttgtcgtcagaacatgccgtaaatgacattgaaaaaaacaggctaagaattgcaacgaaacagtagttcgataattttttcattctttttgttttttattgttagagttatattgtaaagactataggaaaaatcccgcataggctatacccagcgaaatgctcggttcgttattaaacttgcttttcaggaaacggttgctgtattctcctttcacaacaatttgtttcgttggatgatagttgaagccaaaggcgatgcggcttctgtcggtccattcatagtcgctgtttccagccacaggatgataggcatcatagttctcgtatgctccgaagacgaacagttgttgtttctcacttctcatgcatggaaagaagcgcaatacattgtaccctgcctgaatacttgcagcgtgtgcacggttgccaacgagtgtacgtttgtatggtgaggttgaactctgcgagcgattgtaggttgagatgatgtcggcatcgcccagatgtccataatccaaaccaccaagaatgcgccaaccgtgacctgtgtagctcatgtctatcgttccaatggtgacagcgcctttcacatctttatattttccgcgctcatcactttgcagggtgttattgaacgattctccataatatccgctaagacctatgcgcagtcctttcaatggatagaagtcaaggcgaaccgctgtggcatatttattggatggtgtgaactcaaaagcacttgccgatccattcttaatccattggtctttgctgaacaaaagtgagttaagacctggcaggaacatggcttgataacgcagaaacttccactgtccccaaaccgaaacacctgtttgatgccaggtgcagggtaaaatctggttttctccttcaggacgatatactgtgaaaaactcggttggtaagtgatgtgcattggtatatccaatgggaaccacgtcgtgaccagcgcgtatattcaattcgcgacagaaagacttttgaatccaaaactgttccagtgccacttcgccaccgcgttcaatctctccttcccattcgccaaactcttcatcttccatttccatggcactctcggtacctccatgttcaaactcaatctctgagttcatggtccaacccttgctaaagttgtatcccaacatcaccacaacgtgaggcaagtctgcttgtccacgacttttggcatttttgtacttttctgccttgctgtagcggttgatgttgtcggaataaaacattctgctcatcacggcttctccataaccgcccaatgtcagtctgctttttttgcaacacctcgcactatcttgcgcacatccctgtgcttttgtcataccagagaagcataacagggtgcataccaatgtaaaaaaataggctattcgcttttccatattaataatatataattttaacaaattattcaaatatattataaaatgttgtttatttgttgcaaaatcattctaaaatagaaatttatacaatacctgaaatggtgatttgaacatcgtctcatggcgcaataagcttcagtaaaccttattttatcctcaaaaatgatgatgaagtctctaagataaaaaaatattttgccagcaatgtgatttcaattacctttgcaattgaaacagattgatgattgatctcctataaaagaaagaagatatggatatttctgaactatacaaactatttttgaagcatcctgtggttaccaccgacagccgcgactgccctaagaatagtatattttttgccttaaaaggaacttcgtttaatggtaacgagtttgcaggtagcgccttagaaaaaggatgtgcgtacgctgtcattgaccagaaggaataccaaatacagcaagatgaacgctatatcttggttgaggattgtcttcaaaccttaaagcagcttgccaactatcatcgtcggaagttgggaattcccattattggcatcacaggcaccaatggcaagaccactaccaaagaactgttggcagcagtattagccgagcgtttcaacgtatggtacacgcaaggaaactttaacaacgaaattggtgtacccaaaacgctcttacgcttgacatctgagcatgagatagcggtcgtggaaatgggggcaagtcatcctggtgacatccaatcattggtaacagtggtagaacccgattatgcgctcatcactaatgtggggcgcgctcatctacaaggctttgggtctttcgatggagtaaagcgcacaaaagcggaactttacgattatatggaagcaaacaaacccaacgggaaggtatttatcaaccaagacaatcctcatttacaggaaatgtttcaagcccactgtcctcatgtccagcgtattagttattcgcagacacagcaaacaggtattagctatcaagggaaaatctgtagcaacaatccattcttaacgttccaatggcgacacattcctgaaggagaaacttcaccaaactccaaccaatggtacgaggtgcatactcatttggtgggtgcctacaaccttgataatctacttgcagccatcagtattggtcattacttaggagttcaacctcatgaaatcaaccatgcgttgaccaattatacgccaagtaacaaccgcagtcaactggaagtaacgaaacataacaacttgattgtagatgcctacaatgccaaccctaccagtatggaagcggctctcgttaattttgcacaaatgcaggtagcacccaaaatggcaattttgggcgatatgcgtgaacttggagaggtaagtgtggttgaacatcaaaaaattatcaatctcctgaacaccctccccattcaacaaatttggttagtaggtgaggaatttggtaagacaacaacaacgtttcagaaatataagaatatagaagaggtgaaagaagcgattcggcaacagcaaccgcaaggcttttacatcctcattaagggtagcaatggtatcaaacttttccaacttcccgaacttttataaaatgattgcacttgtaagtaccaacaaagtgtaacttatttcaacgaaacatccaacttcacactttctaagttggaaattcgtagtcatactgctatagggacgcacgaaccgtcccagcaactctgtgtaagctatgttttcgtctcttttgtgttgttggttgttcaatggctatacaaatcatttgagaaatagtgctgtatagacgcggctctttcattgacgggtcattgttgttacaacaaaccatctttattaaatgaaagatctttagttttttaagtataaatattaaagattctttgtgattttgtgtatttatttttatatttgcagaataaatccttattattcaatgaatcgacatgaaacctttggcacctatcgcaaggttaataccaagcaactgctcacttctttctgcatgatattattgagcatgtccatgttgattggttgttctcgaagtgaagagaaggctcaagcaacttttgagaaagagcatttagaaaaagagctaaagggtttggagcgtatagattcattgcaacgtcggctgaaccaatatcgtgaagagcacaatcgcagtgctatgatgctgtgttatcggttcttgggcattgcttatcgcgattcaagcaggtttgaccaagccttgacagctcatcaaaaagagtatgagcttgccagtgaacaggctgacacgctggaagcaattgtggctctcaatcagataggaacaaattatagacggataggcgcactggaagaggcttcgtctgcccattatcaggcgttgaacttatgtgatcaatatagcgatcatacaagtttcaaatttcaaaaaaacagagtagtttctcttaatggcattggaaatgtgcatctcacacttgacaatgtcgaagctgcagagaatgctttcaggatggctttggatggggagaaaaagttaggaagtgccttaggacaagccatcaattatgctaatttgggttctctgttagaattgcaggagaaaatagactcggcacgctggtactacaaaaggtcaatgcagctgaatcaaaaagcaggttcgcacttgggagtagcgttgtgctggatacatttgggaggattggaagaaaaggctggtcaatgggataaagcgattgctaaataccaacatgctgaagaaatcttgagaggcgtaggagacaagtggcattggatggaagcagttatttcactcattagggcaaatatagacaaaggtgatttggctatggcgtcacgttacatgaaagaggcagagcctgtagcccaacaattaggtgcatgggaggatttgaaagccttgtattatgaaaaggccaagatgtgtttcaaacgaggcgacaacaagcaggcgttcattcattataaaaaaagccaagcatatcgtgacagtttgatcagtgaaaagaaaatgcagcatattcagaacattcgcatcaagtatgagcgtgaaagtaaagagcagcaaatgttggcgatgaagcgagatattgagaaagagcgactcatcaaaagagtgtttttgttcagtagcctttgcattatctcgctttgtgcagtcattattgtatttttgtggtatgtgatacgcatcaggtctaaaaaccataaaatgcaagtacagatacaacgagccaaagatcatttcttcatgaatatcacgcatgaattccgtacgccgttgacaattattttaggttttggcagacagatgaccgatggaacgctgacaacaaaagaggaactgaaaaaagctggtgggatgatcttgagacaaggtagcggactcctcgatttggtcaaccaactgttggatatagcgaagcaaaggtcggttgtggatcagccgctgtatcgacatggggatgcggtaacttatataaggatgctggcagagtgtcatcaaatattggcacaagataaaaatatcgaatttctgttcactgctaagcaatcgtctctaatgatggactttatacccagctatcttaccaagatagtgcgtaacttactgtctaatgcgctaaagtttacgccaccacatggaatggtgagagcaagcgtggaagaagaaaaagataaattaaaactggtggtgagagataacggacaaggaattccatcagacgacttaccttttatatttgacctgttttaccaagcacaaaatccgtcggcagatgctggctcgggcgttggcttggcattgacgaagcaacttgtggaggcaatgaatggaacaattgaggtagaaagtgaagtgggagtgggtactacctttacggtgagcttgcccttaaaagccacccgtcaggatgccgttatcaagcctattgaggcgaacgaaccagagaaacccaactacagtcaagtgccagaagaatctatcgaagagccagaaacagttcatgagaattccgtatcggtgttggtggtggaagacaatgctgatgtggcaagatatatcggcatgcagatagggcatgaatatcaattgtattttgctcatgacggtgtagaaggactggagaaagctttaagtttgatgccagatttgattctcaccgatttgctcatgccacgaaaagatgggttggaaatgtgccgtgaaatcaaaatgtctgaggtgttgaatcacattcctgttattatgattacagcgcgcagtaccgatgctgataaattaatgggattagaggctggagccgatgcctatcttgtaaaaccgtttagtgcagacgagttaaagttgagaattagaaacctgattaagcaaagggaggtaatgcgcgaaaaatatgcactctcgtcaaatgtgcatgtcaataacatgacggctctgaacaagttggataaggagttcttacacaaattcattgattatgtatatgttcacatgaacaacggaacggtaagtgtagagtcggtagcagccgacttgtgcatgacgcccaaacaattaaggtctaaaacagtggccatcaccggtgaaaatccaagtgcttatattcaaaagataagattggaaaaagcacaacgcatgttacaagttgagccaaatatgagtatcggagaaatcgcattgaaatgtggatttgaagattttgcctatttctcacgagtattcaagaaaaaaaatggtgtgatgccgtcacaatatcgtcgattaccatcttaaggctggttctataaattaccaccgcatatagtcattaaatttttatgaaatacgttttgttatcttttggtttctttttatataaaacaggctgcgcctcaacaattcaaacaagtttgattgtattcggcttgctccgtttttggttcaaaatgtaagttcaaaatctaacaaagctaatttatagaaccagccttaaaaaaagcggcaagttgttcgtgtttttttatgaaagcgtatctttttgaaaggtacgctttttaagtctttaggatttttagttcattgaaaacaagcgagttatgtttttcttttggacgaaaagtcctaaatgttaccaagcattatgttagataattcctatattaaggcagaatagtcctaactacctgttcctatactgtttaattttgctccatgaaaagtgcatggcacaaattaaatcgtaataatcacacccagaacgacaaatggagttctgctaaaaaacaaacagtatgaggaaatttttagctttattcattggtatatggatatgccaattgaatgttactcaagcagtagcacagaatgtgaccatcagccctacaacgggtaaattggtcgctggtcttacctatgaaggtgagttaggtttcgagaaaggttggagttcgctgtggaggcatgagcagttgccgctgacgcttaccgtttccgacaaggcggacatctcagggagtggcgtgttgacagatccggcaggtgacatcattctggacccgttacagaataaatacgttgtcgtttctggctcaccgttgaagacagagttgcacatgtgtatttccctgccgaaaggttatcgattcacgggttaccgcatggtgttcttgaataatgtgaatggtaagaccatcggcgacatggagttggctagaatcgacaagcagctttatgaaacgggtagtgacttcgatatcaatccgtccaagcccaccacgggaaacatgccaggaaccaacgatatggaagagtacgtcatagaacgcaccagtaagaatgaaacggatatgggtaacaacctttatttcttgctgcatcatactgttaaggggttctatggtgttaccttgaagtcgtgcgaactttatttcacggctgaaggagctttcgatgccaatgtgacaccaggctcgcctgccgacatcgtcagccaaggcgtgaacatgataggggctccgttcaatacaggtaagttagatttgggggagataaaacctcataccaagaatggaaaaaccttttatagctacgattacaggaacgtggaggaactcacagccagcaactggctctaccaggagaatgccgtaactgctgacaagaagctgccaaccagagctggatctggaagtatccaagccttgcagaatggcggacagttttattatgcgttgggcaataacacctattatatagagtcgccaaccgctaccgtcacacaggatggcattgcggtgcctttgggctatcgcatcactggtgccaagattaagtatcattacggggaggcagccaacgcaggatacatagggcctattggtaaaagagtatataacccagccttcaagccatcgccttacacgctgagggtgtacggtacaaacaagggtgagattaaggagacacaaaccgtaaaaagtggagctgacgggacggtggtgctgactaatctaaacaacgatgccattaagttctctattgagggacttgccccagataccaaggcgctacttactttcgagctaactcttgaggcgctcaatccgttcatcaacaacattgacatcatctgccactcgttggcagcgagcggtcctacactaatgcagcagttcacgagcaacgacttccaggtgtctggtggcaagtttgttttctatgtgccgcaggatttctttggaggaggggagcagaagtgccgctttacattcgaaaaactgtacagcaaatacggggatgagacctatcaacagacagagccacgccatgcccgctacttcttcgtgaagtcaaaatactacaacgataccgacggacaacagtatagtaccactggcaacgaacctgcttctgacaagattgctacatctatgtgtggaaatcaggcattcaaatacagcaacatcgatgagctgagcaacacaaataccacgggcagcacaacgcagttgcaggaatatccgtactcggagaaactctataaggatcagggaggcactttttctgaagacatcgtgatcaaggtgggtgaaggaaagccctgctacttgtttactgccgatgaaacccgatggaacgttgcgccaaccacagccatggaacaccgttactatgcttattatctcatggatctgaagctggaaacaaaggactatgtggcaaagtgtgtgctgaccaagatttacgacaagacctgctataaccgtgacggcaaagataccgaactgcctatgtatggtggcgaattcaaggcgctggatgcgaatacgctcgatgaaattcctgctggcaacgcttacctgaccgtgccgatgatgaagcaggccctgatagatgagctttatggcaatcctgcaaagggtattgagggcgttggagccacaggtatgcaggttctctatttggactataccaacctatactccgtgcatatccctgaagccagtgagatgaatgcgatgaaggcgctgctcaatcccaactgcctcatctacttcccagagcgtacctgctaccaaatggataactatgtacagaagaccaagagcggagactatcgagcatgcaagaacatcgtgataacggaccgtcagcctttctacgcaccgtacaatataaccgttccagcagagaactacgcaagttatacgcgtgagatgaccattcctgccaatggcaaggtagcctacgcaacggtggttctcccgtttaccttagaggttacagatggggttcataccaacgaggatgggttgtgttcgttcaaggtaagcaagatgacacccgacaactgtctggcattggaagaaggagagtacgcttctgcccagagctatcgcggtaaagcaaagttcgacctgattacaggaacacacacagaagccaacgtgccatacatggtagaggtgacggcggctcctacggatgagaacttctcgttcatcgccaaacagaaaggttctggcatcatggcaacgaagggaagtgcaatgaatgctactgattacacattcagtggtgagactgcgactggaaagataggtgctacgacttataacttccacaactatggttcgtatgctggaaagaaaatcgacagggctgcaaagaaagtgttctattttgcgaagaacatgtatttgagttccaccaatctaaggccagaattcccgtatgtttatgtatatccattccgcgcattttacgagtatagctctgcaggcgcaccagctaaaatgttcgctttcagaactgttttcggtgatgatgacaatatgccaaccagtatcactgatatcaacacagaacctgatttggctattatcccaggacagggaaccataacggctatggcaagagaagcaactgtggtgaaggtgtatagcaccagtggcgtggtggtatggtcagtaagtcttcatagaggagagacacagaccgtgaccctgccaggtggatgttatgtagtgaatggaaagaaaatcatcgtaaaatagttaaggaggaaatcgtcatgaaaaagcaatatatagcaccggaaattatatccgtcaacacttgttgtgggcaactgatgcaaggaagtgattatgaccatgcggatagcaagcagtttgattttgtagtagaagaagagcagcttgaggattttacagataacggatatcatcagtacaatctttgggattcagaagattttgactactaaactttcctcattacgatgtgtatttagtttaggtgatccgggcagggcgttgagtcttgtccggatctatttgatacggtgtattttgtcagactctttctcaatcgcaaaagtggtatgactttctttgtcgtttttctgtgtgtcaaacctttattttcaagaaaaaagtactttctttatcacactgccttataatttggaaattttatctaaatttgcaaagaggactggaacctgcacctatcttcaaggagtggatggtgtgttttggtagcttcgcagggaaaaatctatgaaaaagatgaaaaagaaaacttatacaatgaatgttcgaggcaagttggtagacctgtcccgcccacaagttatgggtatcctcaatgtgacaccagactccttttatcaagggagtagaaagcagacagaggctgaaatcgctaatcgagccaatgagattatcgaagaggggggtactatgattgatgtgggagctttctcgacacgaccaggtgcttttgaagtaacccaagaagaggagatggataggctgaaacgtgcattaagcatcgttagacgtgagcagccagaggccatcgtttcggtagacacctatcgaccagcggtagctcgaagatgtatagaagagtggggagcggatatcattaatgatgtttcggaagggggcatcacgggtattgtcaatacccctatccacgaagatcagagtatgtttcaaaccgttgcgcagctgcaagttccttatatattaatgtctgtaaaatcgaacttgcgtgatatgctcatctcatttgctggtgaagtacaagaactgtattcgttgggagcaaaagatattattttggatcctggtttcggatttgggaaaacattagacgataactatgtcttgtaccaaaaactggaggatttacaagtacttgatttgccgatattagttggcatctcccgaaagagcatgatatataaatttttggggggagacccgacgacctcgctcaatggcactacggtgttaaatacgcttgctttgcaaaaaggtgccactattttgcgagtacatgacgttaaagaggcggttgagacttgtaagatttacgaaaaaatgcaaaatgtatgatagcctcactaacacaacggcctcacccccaacccctcccagaaagggaggggagtgattagccttttaggttacagaactctcaactggtgaactcgtcaactggtgaactcgtcaactggtgaactcgtcaattggtgaacttgttaacttgtcaacttgttaacttgtcaactcgtcaactaaaaaactcaaaatatgattcctttcgatataggtattaaagatatcattgatattgtcttggtggcactgatgctctattatgtttatcgattaatgaaagagagcaggtcactcaatgtttttataggtatcttgttctttatccttatttggctttttgtcagtcaggtgcttgaaatgcgattacttggttctatcatggataaattggtgagcgtaggtgttatcggactcattattttatttcaagaggaaattcgtcgttttttatatcagttaggtgctcaccagagatttcaagctctctcaaagttttttacttccaatcatgagaatgacgaagaggataaggagacaattgtgcctattgtgctttcctgtatgagcatggcgaaaggtcgggtaggagctttaattgttattgagcgcactgtttctttaggagaaatcgtagaaacaggtgattttattgatgcgagggtaaaccagcggctcattgaaaacattttcttcaaaaattcacctttgcatgatggcgcaatgattatttcaaatagacgcataaaagctgctggctgtatcttacccgtctctcacgacttgaatattccgaaggaattgggcttgcgacatagagcagctatgggtgtgtctcaaagtagtgatgcgatagctattgtcgtgtcagaggaaactggacgaataagtgttgctatgaaaggggagtttagactcagattgtcagctgaggatttagaaagcttgttagcttctgaaatgaaaagaagataacgttcatcttttctaattatatgggtgttatacgaatacaacttttctcctttttctttacacttttggcacttttaagcactttcggcagacatatatataataaggtaaagtcgttcaaaatggatgttgtttggtgaacaaaagttaaaagcacaagaaattcttcttttttatagaatttatttggagggtaacttcttttgtgttatctttgcatccgctttcgcactaaaaaatgcgtttgcgataaaagaagcgttctttgaaaaaaattacataagacagaagtagtacaagaagcatgtatggctttttaggagaggcgttgatgaggcgacgagttaacgagttttcttgaagcataaatacataggtaacaagttttacgaaccgttcaattcattagaaaagaactaaggtgagaatacttttaaattctggagtttcgttctgaacagagacaacgaagttggtttagataggtgtatatagcgtaagctttatatgttttatcttttccatttcaattatattttacaatgtagagtttgatcctggctcaggatgaacgctagctacaggcttaacacatgcaagtcgcagggtaacatgaggaaagcttgctttccttgatgacgactggcgcacgggtgagtaacgcgtatccaaccttcccataactacgggataacccgttgaaagacggcctaataccgtatgacatcgtttgctgacatcaaataacgattaaaggtttagcggttatggatggggatgcgtctgattagcttgttggcggggtaacggcccaccaaggctacgatcagtaggggttctgagaggaaggtcccccacattggaactgagacacggtccaaactcctacgggaggcagcagtgaggaatattggtcaatgggmgaragmctgaac

SEQ ID NO: 101 - DNA, 108211 bp, Prevotella timonensis
  source 1..108211: mol_type = genomic DNA
ggattgaaacagacttctcgcagatgtgcgaccaatttatgatttgccgcaactatgcaaaggaaacagtaggattgtttacaagaattatcggtaaaatcagtgcctttacggcaatgcaatatttaaatcacattaataatagacccattggaagagtcaagtatgcactggcttaattccgccaacgggttgttcttgattccaatcgcgttcaaccctttttccaaacaagatttctaagccagagacagccgcaggagtggttactactaataaactatctcctgtgtgtaagtctgtgttgaccataggaacgatgacctcaccttgtcgccataaacgagaaacaatgaatttgagtggtgtactgattgccaattgcccaatcgtcttcccttcaatagcaggattgatgattaaaaactggcaaacaaacgtttgatcttcatcaatgggtagctttggttctaagtctttgggcttcacaaacaatttacgcatcagcaaaatagccaagatgacgcccacgacacccaatggataagtcactgccgtagccaatgcaatgctatctgaaggatgtcctaaatgtcctaaagcctgttgggctgcacctaaagcaggcgtgttggtcgtggcaccacaaagcaatccgaccatattggatagagaaatgccggtcagcggacataatgcaaccgccatgagcgttccaagaaagataactcccaagccccataaattaaatgtagtaccctcatgtcgaaaggcaccaaagaagtttggtcccacatacagccctaaggtataaacgaagagtactaatccgaacgtctctatatagtcaagagttgcagtatcgatagataatccaatatttccagcaacaataccgacaaagaatacaaatgaaactcccaacgaaatacccttaaacttgaatttgctcaatgccgtacccgctgcaataatcaaagagacaatgactaccgtttgtactgatgaatgaatagtaaaaagaccgtttatccaatccacaacgataaaatattgtgatacaatctattatataggtatcgtatctattaaaaaccagtttatttaataagagcaaaggtacatgaaatataagaacttacaaaataaatgatacgatttatttgtttgtaaccacgaccctttcattaaaaaaggtcgtttgctggcaaaaacaatcatcagtatttgttcaacaacgaataagatttgcttcagttaccgttgctcaaaaccagaaacccctgccatcgtggacgggaacatcagccatattccaataaaactctgccaaagcggttttgatatccttgataccaaaagccttcatgagcgacagcaccgttctttggtcatgctcggaaaggtctttcagctgggtactttccaccaatgtgggattcttccaaaccgcaagatccaagcctttttcattccagtccatatacacgttgacgggaatctttatggctggcatccacgcctcctttgcttcttgctgtgaagagggcgcataaaaaggagaaggcttgtcccctaccctttttgactggtgcgctcgcatgagtcgaatgttaagtgtgaattgcttacggctacgcaaaaaagtaaaaaatcccttgattcctatcgggttgttgtcgtccaagaacgctgcattgtcaaagtgtacggtcttatcccaaggctttgtgtcgcagtaagtgtattggaagaaatcgggatggttgccatccgacttctcttctaccccaccatacgacggtttcacgttgctcacggtgaagaaatgctgatagtgttggtcctctcctccatttactatctgccccgttatatcctcatgcctgtcgttgaaatagcgcaaagagaaagcatatcgcacaaatttatcagcatttcccatcacattaaccgacgtgggatttgacttgtctgccacccattgattgttttccaacgtatatttcaacctatacgacttgcccaagcattgattattctttgaatatccgttttgatggaacgtcttttcgccatgcaaatgtccctcgtacacctctatttccaccgttttgggttgaaacagcgacgcatcgaggggtttcgcgtccccttgagccacctgtccgtcgacgtcaaagggcagcgacaccgttatatcccactgtccggtagaggtgagaaccgctgcaggaagatagaaaggtgacaagcgattgtccttatcatatttgctttgagccgcatggagcaagtcgactgacaggttgaatgcctcacttggatgcacaatctgcaacaacccatcaaatccaacggggttggtagcccccatgtctaccccattgtattggtccacataacaataatcgtagggcaattggctcttatctgtcacgcgagccttgcctgtcttgcccaacaccgtcgtggttttgtacagcgaaaagaagtgctggtgtatcttatcttgtcccaaatcgaagaattggtgattgattttctgccccttgctgttataatattcaatggacaagtggtacaccaacgccggattctccttgacgctcttcacttgaaagtgtttgagcgcactgctaacgtgccacccttctttaggtgttatttcccaaacgatttgttgtgctggcgttgtcgatggggtaaaatctgctagtaacaactgctggttaaacgatttgttacccttgatggacccctcttgcaaggtaaacactgcttttaccgggtcttcgtgcaacttgttttttgtttcatccactgcctcttcgggcttacatgatgccactacgaataccaacaacatacagaagtatgcgaaaatgattgaaaatatggtctttgttctcattgtttttttattttaataatgtttgttttttataaaatgatgaatacggttatcgttattgatgaactcgttaactattaactggtcaacttgttcacttgtctactcgtcaactacctcaattaaacttccaacgaagggtacaacgaatgtccctcccaaggtcatgggcgtaataacgactccgattggtgtattccttatataattgattcaacacattggttccttcgaacaacaaggatagttgttgatgatgaggcatttcccatgtgacgccacagttaaagcccaccaaatggtatgccgcaggagtatcgtctgttagatcggtagccgcattaaacctgcgttgcttagccacatagcgatgttcaatacccatagaaggctgccaagcgccacgaaaagagggtgtccaagtgagctgttgcgtgaacttaaacgacggaatgtacggcaaatatgcctttgttcgttgttcgtttgcccatatccatgaaccataaaccctataatcgagcgtctgtagcggataaagatgcacgtccacatccaccccacgaaacaaggcattggtctgaacatactgaaacacaggatacgctcccgatactactaccacgttttgccgtgtaggataatcgtaaatataatgattgatccactgtaaatacgcatctatacgagcatgtacccaagaatcatgataacataacgacgtaacccacttgtaactttgctcagaacgcaacgtagaatcgcctttcacaaacgtgccagaacttagttcattgccattgctgtacagttcgtagacatgcggtgcacgccatgccatgccaaaattggtcgccaatgtcaacagatttcctaaatgctgatgaccgccgaacgtaaaggtaacgttctcaaaatgcctgttgcccccatatcgatgacctgtccaatcgtatccatcggcacgagtgagctgattgtcataacgcacaccagcctctgtcccccagatatcgcccaaatacttagcgatggcataagtgccaaacgttgtttctgtatagttgggtattactggtacaacgccagtaccacgctcattgctgttcttcatgagcacaccttgtactccccactcggctttccagcgattgaacaacctgctaccgtgcaactgactttgcaatgactgcaaacgtaaactaacagaaggtatgtccgagtggtccattctcctgattctgttttcacgtctgtcatctgcctgataggtggtttcccaactccatttcatggaagatgacggacgataataaacattaaagaaagccgaatggtgtgctacacgctgaaagggataatctatttgatacgtaaaaggcgtaaactctacgggttgacctatcctgatgcgctcttgcaacagctgctcgttacccatttgcgcactacgcatcactcccatttgttgccaaaacaagctgtaccccgtttcaaatttccatgggtctcgttgataccccaacgaaaaagcagcgttgcgctgccgcatgcccgtgttgttgagcagataagccgctgtacttcggtcgcccgattgttcaaaagtgccttgcaagctccacgctatttgacgattaaaaggcagcgttccctgtatttgtcctaccgttcccatctgccgtccgttgcttccatagtagctcatcacgtcggcttgcacacctttcgagccatagggcaagggtttggcgttcatcaaaatgataccacccaatgcttccgcgccgtatctcaccgactcagagcctttcactaccaccacatcgttataggcattcttatctatttcgggtgcatggtctatcccccattgctgaccagtaagctttgctcccctactcactaccaatattcggttgccatacatgccatgtatcacaggctttgccacactcgcaccagtttggagcatgctcaccccactgacgttctctaacatcgacgccagtgacttgcccgctgcacgagcaatatcatcgtgggtaagcgtggtactgatactattgggcgttactaattgtcgtttactctttaccactacctcgcccaaagtaatggtatcttttagatgttgccgaggtatgtgttctatatcctgcgcattcaccaacgtactattgctcatcaccatacacgacaataggatgacaagccataatttttcctttttattcatttgtataatttctccttttcattcaataggcttcgcctcagccattcaatcatgattgaatggtcttcagttagcactatatctaaataagatagtggtatgaatatcatcattcttcagacgaaagaagtccctctcctccgaagtatgaattatgaattaagaattatgaattaaaaaagggggcgaatgtgcgtttatctcaacaggctggcgataaacgatttgttctgcaaaaagtggttgaagtacatgcttaacaagcaacacaggctgccaaacaaatagtttgggcatactcatcttgcacagatcaaagttacaaatgtaacaatatgactgtacagatgtatgatgttgctctattttatcaaaatgtggaactggtgaggtgtgcgcatgaaagtctttgacaaagagagctaagatgaaggtcagcaccatcatccacgccatcaatattcgtttgaatttacttgttgtcatccgcactcacaagagcctatgttatctaaaaagcaaaagtagacaaaaaaatggctaccatgacgtattgtcaccatttaatgcctattttttgataatcttaacagatatattatttatttgtagctatcatgaaaacgatagaggtacttcttaaaataagatagagaaaacgatagactatcagataaagattatcccaatttggtaaaagaggcaaaaattattgagagtgttgctgcaattcctcctatgtgaaaatgtgagcatattacaaacttgagataataaatatcccacaaacaattttctaactctgaaaaggtatatctatatggcaaaaactaataactacttcgtatattacaacttcgttaatattaatatcttcatctatttttatagttttgtccattagcatagcaagttgttttttctgttcagtagtaaaagactttatatctaataaagataataaaaccgactttctctttattttatctatggcatcgtcacccaaaccaagctcttttgataaagtattaaagaaagaaacttctctataatctacttttccatctccataaataatctctaataaaacactcattatggataacttctgattttctgaaaacattgaaagatacatctcgtccattttatacaaagttataaattataccaacctgataattgtaagtaacatcttttttcatcaatatcttttggcgcccaccaatttgcaagagacattcttacaagcgtttctgcgggaataatcgtgacgggttcttgaaaacctacataagaaattcgattatgttcataagcataccgacttttgcccataaaattgaaaagacgtaaagaatactttggtctccaaaaacaaacactataatttggaatattatttttacaaatgtaaggggcataatcagatttaacaagacaattatcaaaaatactttctaaccctccaacgaaaacaggagctttatcttgaataagcgaaataagttctttggtgctaatacttctttgaagttgataactgattacttgtttatcctccacatgaggtttttgtcgtacattccatgctgttttataatccatagaataaatttgctgtatttggaacggagcatcaaaacttaaattacctccgcattcattatgaattctaataaattctcctgtttcaagatcaattcctccacaacaaacaccatttttcatccttgttcgtgaaactataagtacttctgccatgatattatataactaaagatgttcaacttctacattatattttattttaaatcgttctgcaagtaaagacctatgacatgcggtatatttggcttcaacacaaaatagcacaacattttttgcgttattttcttttaatttgttatatatcgcatctaaatccactgcatctaaaacaagtttattataagcctctatgaaatttacacttaaaatatctctatatttcttggtctgttttttttctttatcagctttccactgcatttctctaatagatttagtaggcgatagttccttataatattcgtatcttatacctaactcagcaagtttcttttgtaaataaacactatttacataacaatataatttacctctaacaccccttcgctgacgtatgtcaacaaaagtatcaatatggtttgcacagagtttttgaaagaacatttcttctgtagtaccataaactcctattgtaaatattttcatcgtatttagtaattatttcttgacatgaaagttgttacatttccaaaaagatcacaaaggttatttccttttgtaatttcattaataacctcttgttgagatttaataattatttttttttcatgagatgtacatatatgaagtaaattaatatgatgttctctcaaaacctctccaattaactttgttcgatgacaatcagcaggattagactcactacacataatacaagtttttattttcttttcattagcaacaagtaaacgttgaatacctttctgaaaaacaggacgctgtttcatcttatcataatccattttaccatttgtcttacacaactcatcctttggtaaaccacctaatacatctcccatgtacacatactttatattaccaatttgattgatagaatgcattagttgctctttattaaattgcggatgaaacttagaatatggtactgaacgaacatctattaaatattcaatattaaagtgatgtaattgttctatcaattccgaaacatctttgtttccatgtcctatagaaaataaaaatccttcttccataacaaaatactttaattccgcaacacttttacttaaaacttttagcaaatgtctgatcaacaaaaagcagattaggagttttccataccgtaaaactcacttggcttagtgtcaaaatagaagtcatcaataaaaatgactgacacgacaaaaatacaaataaaattagagaaactcaaccctttttggagaaatatttcctttaataaagaaattcaaaccttcaagtttacagttgctccatgatagcacaaatgcttgagttcaagtgtacactcttcagctgtcgatactgtgatatcatacattcactaatgtttgtcgaattatgtggcaacatctgcattgaagacatctcggactatctccactcaaacactttcatttcttcattgtacacctactcatcggacacgatactcagaaagctaccaaggttctaacaacataatcacctgttgcttgaattaattctacaaattattcctttaactatcaaactaaaaaatgacagaacgacagctttcgcagattaaacattttcatgccattatgttatacaaaccacaaaacagtacaggaaaaataaaatataaggtactaaaaaaatgtagaattgctattttcgctatgaaaatcacaactcattcatttaagaattatatttttacaataaacaaaacgccacctataaaaataagtgacacgttgcagggaagacttattaatgctgaattatctttacaaagtgcctctcataactcgcgtatttgcaaccaacttcaaagttgttcgcaaatacgcgagttatgagcaatgtttgtaattcgttattattgagtatgttacaaaaaacccatctcttttctttcctatttttaccgctcttttgcgattgaagcattgagataagcctgcaatttgcatgctttaatgcggttattacatgtgaataacacctctaaagcatgtttccaagagcgtaaaatcaatgattcagcttgaaaaggcgtttattttgtgaaaatcaacccatttttgttgtgcgtttgcctattaaatttttctattttgaagattttggatggtcgttttttggtaaaataataggacaaaagtaacagattccttattaaaaataaacacaagtgcagctcttactgaaagagtaattgttattacaataaatgaaaagtacgtgaggtaaacaatgcaattagatttgttatagaaacaaaaggacgaagattgtttttcacgataagcaatctctcttaaatgaaagagccataaatggaaataaaaatagtttctataaaaatataatgtttcaaaaaaatgtttacttttgcaagcgtttttattttcaaaagcattatgaataaatttttagtatcatgcactacagctttaaccatcttagttagtgcttgtcaaaaagaatacgtaatagatgacaacttaaaaagtcaaaacaaaatcacgagtcaatgtcaatttactaaggaaagtgcagaatggtttatcagctaaatcatctcgataattttaatactcaaaaacgcaatttggatatttcggttaaagatgcggtattcagaatgaaacttaatccaaaccattactactggttgagtcgtcacaaggaacaagaagtggctcctggtgcttacttgagtccttatgtcaagaatgaagaatattatgatgctggtggtgatcctgattatgattttgtttttaagcgcttatggaccgaaggacattttacattccacattactgttataactggaacaagcaagaatgttatagcactctctatcagtccaaaggatttgtttacggcaactatacatgtgcgtagaaagcataaaactgcatttagaagactccactcatggtatagtattgatgttaagcaattgcgttcaaaatgggtttacccacaagatataggtacagatcttcgttttgaatcgtggaatccatttgatcaaacactacaacgctctatctatgtctccgtattaggaacaaatgctaagaatgtaaatgagaaacgtaaagatgagtcgtatatgactcggttaaaagcaggagtagaaggctcggttactatccctatctctaaagatggaaaaggaaatccttctatcaacctctcatcagattgggaaaagcaaaatacggtacaactgacagaacgtgtacaaatagatgttgcagacaatgaaatactaacaggtaatcgcagctaccatttcttcagtccaagtccaattgaacgcattgaaggtaataaagcctatcttacaacagaacttttcggttgtttcgatatgtgtattattcctgtaaaacgtagtttaactaatcgataatataaatttgacaacaatgaagttaattttatccaaaatgcagaaaccgtgtgttattgtattatttttacttatcatatcaatttcttttagttcgtgtgccgaagacgacgactttgttacaccaaatgtagaaaatacaatttggcgtatggtagataattatttaacaaatggaaacacatacattactcaaataacttttcgtgacggctatgctacctatgtttttataaacagacatactggggtggtagacacttacaatgacataatagcacatggacaatattattatgacagacatgctggaggctttttaattattgatgaaaagacaggcttgccgtacaaaggggttggaacttttcgctatgaaaatggtttgatcacgagtggttctacgacttatgttctttataaataagaatacaggaaatgttcaaaaaaagaatagcaacttataaataccaatacaattggattaagagcatcatagatttttataataatgataattataccgatactttaatcactggcaaaggattccaattcaagcatggcatattaacaacagatgcgggaaattactatccgaataaataatttatttcattacataaaaaactgtctgctacaaaacttagcagacaggtttttatatgttgggtgaaaggttccttggataactatttttgacaaccacgcacttggaaattgtctattttagctaagtaatacgccttgaagtcttcccaatgatagtagggagcaatagcagaaagaagaggcagggtggcttcgttctcattcagaagtactttgacaaggatgtcgtgtggacgcttttgcgaacgatagaacacgaattgcaggttgcaagccatagggaaaatacgataatctaaccaattttcatcgtctaaccgttccaagtcttctacttccttgtcgtagccgtcaatgcctaacaagcataccaaaggcattaccatggtgtcatggccataacgaagcgttgcgccagggtgagaaagtgccacacaactatctgcctcggtaatgatgcggcgcagcaacaaccgctgagaatagggctgaacagcaccattgagtggcgacggaccgtaattgatgtaccaccaagcattggttttgagccaagcgtcatacaactcatcgtgagtaaagagagggagtaatgaaatctgatgacgcagttcggtgctctgaacattgcaagcaaggttgtaaagttggtagttgaaatcggttgcattcacgctatctcgccaatataactcgtcattaaaaattctattcatcacccctacatggttatcatgcttgcgtgcaaaggcatcgtaaatatccttcaccttgccaggcattttatttttatacagagccgtgtcgccatacaccaaatagggcatatcgtgttcactcgcatcatgcgtaatttgcagttgtggattgatgcgtatgagttgatgtaacgcattctccatcgacaagatgcatcgcacaacggtgctactcttagcgtctacatgcgtttttccacgaaaaacttctggaaaacgctcgtacattcgccgtgcaatttgttggtgttgctcggctccacgcaaggttaactcacccaatcttccctttgcctcgttacaaatcatggttactttgcgcaacacctctttgcctgtgggagtcagttttcccaaactgtcggcatgttgcaaagtatgaagcggactgctataatcggttggttcgataagataacgcgaaccgtgtcgcccataatgacttatataaaaaggaacataaccctttggcgctggtgtcaactttgcttgtaatggtcccggataagcataatagccattggcagccaataatgggttttgtaatatctctgtctttgaacgctgggcatacacaaccgtgtagctaactgttagtaaaagaaggataaaatatttcttcatcgtcttagtctttgagtctataccacttacaaaagtagtgtttttaacgagaaaagcaaaccagttttcttattttcgtcaacgatgattggtaaaaaaccaaagcatttgctttatgttttgcaaaagaaatagtatctttgcctaaatgacaatgccctaacaagccaaagatgagagtttgtttggaggattgcagaacgacaagttaactactatcaaaccttttctatgcattacttatggtctgacgattattggttgctcctgttgcaactttaccttaagaagccaataggcataaaacccttgtactcacgtgccatggtagatcttagcttagcacttcatatccccccacagacattgtatgagcagatgttcaaactgcgacgattggacacacctcgcttggaaaagctttggaaagattatgccacgcaccctaacaaattgactcgtgatgtaaaacgcttaaggaagatgcacggatttggacaagctgagaccttttatgacggagtagaaatcaacgaatcgttcgagcaagactttcaaccactgaaagaggatgaagaattaatgcctatcatgctcattatcatcctcgacttgtactttcgcctcattcctatgaccatggtcagcgacacgccagagattattaaactggcgaaacagatgcgtctcaaaccccaaaaagtggtagaagtcatggaagtattccagttttgtgacccctatctgaatagcgaaaatttactcatacatccactattggctccttgtcaggagatttggcaacgatatggcaacacgaatcccgaacagttagctgccttagccagtcaattgaaagactacttctaaagacagtcgacaacgacaagaatagagccattggcacgaagagacgaaagagggagcggcacctcttaaataaaaaccaaaaacaaatggtttatagcaaattcttttgtatttttgcatggacataaaacgcctctttcattcttgaaaaagaacgcatttaagaatagctaataagcattatggctcaaaaactcatacagacacagaagcagactcaacaacaagtgcaacgcctctcgcaacaacaaatgctacaggtgaagctcttggagatgccattgactgaattggaagagagcgtgaatgctgaattagatgataacccagcattagagaagtcggaatacgaagatactcctgcccatgaccatgagcatgaagaagagcaagaggaaaactttgaacagaaaaccgaaagagaagagcgagaagacgctttggacaaagcactggaaaatattggcagagacgatgaaatgccagaaacctacacaggataccatatcaacaacaatgcagaatacgaagagatagtttatggagacgccacctctttctacgataagttgaaagaacagatgggtatggaacatctgacggatgagcaacagtatgtcatggaatatcttattggctcgcttgatgatgacggatacctaagaaaagagatagatacgattagtgacgaactggcgatttaccataacattgacgtatctacaaagcagatagaaaatgtattatccatacttcaaagtttcgatcctgctggcattggtgctcgttcattacaagaatgtctcttgttacaaataaaaagacgtcctgacgacaaactcaaagaaatcttatggcaagtcattgcaaaccattttgaagcctttaccaaaaaacattgggacaaaattcaaagcaacatagggttaacagacttgcaaatagaagctgttcaggaggaaattctaaaactaaatcccaaaccaggggcatcattgggcgagacattaggcagaaacgttcagcaaataacgcccgacttcattgttgaagtaaatgatgacgattctatatcttttacccttaatcagggaaacattcccgaattgaccatctctcccatgttttctgatatggtagatacgtacagaaccaacaaggggaacatgaatcgacaagagaaagaagcactcctgtacgccaaacagaaggtggacaaagcacaaggatatatagaagctatcaagcaacgacgacatacgctctacttaacaatgagagccattatcaattggcaacaagcttttttcttagatggcgatgagaccgacttgaaaccgatgattctaaaagacatagccgaccaaactggattggatatttcgaccatctcgcgcgtcagtaacttgaaatatgcgcaaacaaagtggggcacttttccgctaaaattcttctttaccgatggctatatcaccgaagagggcgaagaactctccactcgaaaaatcaaattagcattgaaagaagtcattgaacacgaagacaagcgcaagccgatgagtgatgaatcgttagccaaagaaatgaaaaaacgaggatatcccgtagcacggcgcaccatagcgaagtatagagaacagttgggcatatctgttgctcgccttagaaaagaataaatgcagccttgcatgcttaacacaaagcagcaagtcatgatagatacgattcgtcaaacaatgatgacgaaggataaaaaatgaaagaaaaaaacattatcttaaccgctcgtgtgatgagtatcgtcttcacaccattctatctacccatcttaggactgatagctctattcttcatgagttatctgagcaacttagtgccttggtattacaagctaaccgtcatcatgatggtgtacctttttacggttcttcttcccacacttctcattcatctctaccgtaaatatcaaggctggacactcattgagttgggcgtaaaagagagacgaatggttccctacattatttcaatcgtgtgctacttcgtgtgttattacatcatgaacttgtatcacattccacacttcatcagtagtatcctcgttactgccctcgccattcaaattatctgtgcgttgatcaacgtctggtggaagatatccacacactcagcagctatcggtggcgttactggagcattgctcgcatttgctttgatgttccagtttaatcccatttggtggctatgtttatcgttattggtagcaggattggtaggaaccagtcgtatgattctaaggcaacacagcctgtctcaagtcatcattggctttatggttggtctcgtagccgccttctatatcattttagcaatataagaaacacattaaaaccctaaaaatatgaaaccattagtgagcattatcatgggtagcacaagtgacctacccgttatggagaaagcctgtaaattcctcaatgacttgaaaataccattcgaagtcaatgcgttatcggctcatcgaacacctgctgccgttgaaacatttgccaaagaagccgcaggtagaggcatcaaagtaatcattgctgctgcaggaatggcagcagccttaccaggtgtgattgctgccaacactacattacccgtcattggtgtacccatcaaggggatgttagacggcttagacgccatgctcagcatcattcagatgcctccaggcatcccagtagcaacggtaggtgttaatggagccatgaatgcagctatccttgccgtcgagatgttggcactctcagacgaagccattgcgcaaaagatgaaagaacacaaggctggcttaggtgcaaagatacagaaagcaaatgccgatttgtctgctatcaaggactacgagttcaagactaattaaggatatatgccaacatgatagatctttttaattaccatcgtcgtgagtcctctgttgtacacgtgggcaatatcacgattggtggagatagtccgatacgcatccagtcgatgactaccacggacacaaatgatacggaggcttgcgttgagcaagccgaacgtatcatacaagcaggtggcgagttggttcgactcacgacacaaggcagaagagaggcagaaaacttgaagaacatccatgctgcattacatgcaaaagggcatcatacaccattagttgccgatgttcactttaatgctaacgtggctgatgtggcagctgaatacaccgagaaagtgcgtattaacccaggcaactatgtagatcctgccagaaagtttattcaaatagcctatactgacgaggaatatgcacaggaactcaaaaagattgaagaccgttttgtgcctttcctcaacatttgcaaagccaatcataccgccattcgcattggtgtaaaccacggttcgctatccgacagaatacgtaaccgatacggtgatacgcccgaaggcattgtagaaagttgcatggagtttttgcgcatctgcaaaaaagagcaatttgagaatgttgtcatctctatcaaatccagcaataccattgtcatggttcagtcggtacgcttattggtcgatgccatggacaaagaagagatgcactatccattgcacttaggggtgacggaagcaggcgaaggcgaggacggacgcatcaagagtgcggtcggcatcggtgctttattggcagacggcattggcgataccatcagggtgtcattgtccgaagaacccgaatgcgagatacctgtagcaaaacacatcgtcaattacattaccaaacgtgcaggacatctcttgattcctgcagaacaaaacaagaatttcagttacttgcatcctacacgccgcaagacacgtgctgttggcaacatcggtggaaacaacaaacccattgtcattgcctcgaatgagggagttaaagccgattatatttacacgggaccaaaggttcctgccaaccgtcaaaaccacaaatacattgtcgattacagcgaataccatagcgagaaacatacctaccccatttttccagccatggcaatgccctttattggcagcatgaggtcggacatcaagttcttagtcttacagtatggaacgccagtagaagagtatgtagcatgcttaaaggcacatccagaggtagttgtagtatgtgtgagcaatcaccagaaccgcttaggagagcaacgtgccttgcttcacgaaatcatgaacaacggtgttgacaaccctgttgtcattgcccaaatgtatcgacacgatgaaaagaacgcttttcaacttgatgctgcggtcgacatgggtgccttgatggtcgacggatttgtggatggtatatggctcatgaatgatggacaattgccccatagcgtgttagaagagacggcattcaatattttgcaagccggacggttgcggatgagtaagaccgaatacatcagttgtccgggctgcggacgtacgttgtacgatttgcaagataccattgcacaaatcaaagatgccacaaaagaaatgaaagggctcaaaattggaattatgggctgtatcgtcaatggacctggagaaatggcggatgccgactacggttatgtaggagctggtccaggaaaggtatctctctacagaaaacaaacgtgtgtcaagaagaacatacctaccgaagaggctgtagagcaattattaaagctcatccatgacgaccagaaaaagggaaactcatgaacatctgatatctgttaaggctggttctataaattagctttgttagattttgagcttatttttgaggtcaaaatgcaagagagtgaaggagtgtagcgagctacacgactgaacgaacttacattttgaaccaaaaagaagccaaaagataacaaaacgtatttcataaacatttgatgactatgcgcggtggtaatttatagaaccagccttgaatagcgctattcggcgcagcgcaaagagagaagccatttgtgtacagttgaagatacatggatttgtattgctcacctacacaaatggctttttatatgattccttcactgaggctttcgctcctgatagtttaccacctgttcctattaaaatgatacctttcgggccataggtgcaaggcataggtgtaaccctcgtggtcgtaaacctttgccaagcgatataaacgctttacgaaggcttggtaattcttttgagatacaggcatccactgcacctctgccatagctgccatgcgtggcaaaagcatgtattctgcctgttgggtataaggaatatattctgtccacaaattggcttgtgcaccaatgatatgctgcttggctttcgtagataatgtatcgggggctggatcaaagctataaaccttctccacaggcagatatccaccccatgccatgggttcgttgcgtgtctggtcggtttgataataatcaaaataagcaaactccgtcggtgacataatcacatcatgcccatcggctgacgccttgttaccattagaaacaccacgccaactcataatggttgcactgggattgatgtctccttccaagatttcatcccaccctatgataatttttcctttgctattaagatatttctccatgcgtttggtaaaataggcttgcagttggtgcgtatcaataccttcgcgtttggctaatgcttgacattttggacatactttccagtaatcgcgtggcgtttcatctccgccaatgtggaactctttcgctgggaaaattggtaccagctcgtcgatgatatcttctaaaaatggatatattttctcattccccaagcatagtacatccaaataaataccccatccaaagccaacctcgtacggaccaccagtacaccctaattctggaaaagtggcgagtgccgccatcatgtgaccaggcatatcaatctctggaattaccttaatatggcgctggcgtgcatattctacaatttctcgtgcctcttcctgcgtataatagccaccataaggcgtaccatcatccaaatcagagtcgcgacctatcactgtacgctgacgaacagaacctattttagtcagttcaggatatttcttgatttctatgcgccaaccttgatcgtccgttaaatgccaatgaaaagtattcatgttgtgcaatgccaacaggtcgatgaatttctttacaaacgaaacggggaagaaatgccgcgcacaatcgagcatcatgccacgataaccaaatcggggttcatcatcaatctcaacggctggaaacacgatagcatcttgatgaatctcttccgccaatgactttctgagagtctgaataccataaaacactcccttaggtgtctttccggtcacacgaatggtcttgttagagacggagatgtgataagcctcatctcctttcaatttcttatcgagcgcaaggacgatgcaaccgttctttgcacgtttatcgttggttaccgatacttctttgttagtcatagacttgaagtactgtgcaaggaactgggcattgcgtttcatcgcttcgtctgcaccagcatacacaatgagtgtaccatcggtaaggttgaaaccttgtccctttaccagcttaatagattgtggaagaggtaccacttcataattggcaatacctgcatacgactgtaaaaatagagtagttagcagcatgatgcataaaattcgtttcatcattaacaacaatctttttaggttttaataaatagaaaaatggggtttttaatccatctactggcaaagttacgcttttttattggatttgcgccattttaacacaatggtttcctcacgtatcccacatggataggaaacaaaaatagactgtattggcgagcaaaacagtttgttttggttcgcaatacagtctattttctgtccttgacctaatttactttatttgcttgaaatgcaacctaatcggaccttccaacatataaggtggttctgaagaagaatatttcattgattccactaattcatgccaacttggttcagtaggttcgatatcataaatagatacttctaagattttttccttttgtggggtcttcaacaaacggaaacctatgagagctttacgcacattggtatgcgccttatcaaaggcaacattcaccttctccaactcatattcagtgagtgaaatctttggaggacgaccgacagcaccctcaaagaagagggactgacgctcacccacaaacttcgctttcgtaggagctataaagtaattcttcagtttgccatcgaaatgaggagtcaactgatagccttcagcaggtgttccttcaagttccagcctatcggtctgaacggtgtctatgagtacggcagggtcgtatccaaaagagttaacaaaccagtctttattggtaatgccttggaaactccatttgcccgacaagttgtctggacccacgatgcgaatatctgtggtaggattggtgccaggcaacaatcctgtattctcggctaaacgtaggatgatatgatctttccctttttcgtattttaagaattcaagggttaccgtacctgtgttctgtcctgcgcggaacactgcctgcttcgcatcgttcataaatttgaagtgtacaccctcttgcgcggtagaagctggatcgaccaccacgtcgagtcttgtctttttactaaacgtaaatttacttccacgagcggtttttaggtgtatcacacaatcgcgcgtcaaccccaactcaccctctttgtcttcaaagctatagatgttttgccccaagagttctacttctatataattgagtgcacctattttaacgccttctactggtaacaacgtcaataagaaggatttaggtttagacaccgctttacgcgtcaccttcagataagccaccgagtcgcccttgttgagggtaaatgcgctatcagaaagttcgtagtcttgatgcaatacagcattggatgaagaggacaaacgataaggaatgcgtacggtcgatgccgcctttccttcggtgacaatagccacaataaccgtatcgcccaccacattacctaagatataatgtggctcttccaaactcaactcggtatgataattgatcgattcgtctttcgaacatgacaccacaaccagtgccagtatcagtagacaaaatcggataaatgttttcttcattgtcatcataattttaatgattgttggttgacttattatattcatccttaatggcatccacctcttgtttatcggcggaagacaaatcctctggctcaggcattttatatacctttttcaggtaagtacttgtttcgcgtggaggtacctcgtcttcctgttgacaggagacagaccccattgctgtcatcaacatgatgacggcaggaagaaatattttgagatattgtttcatcttcattgtcattttaattagtaagtaatgattttgtcataccctgggttctgtttcaaaccgctaattttctctatttcggcaatagggatggggaaagtgtacatgtacttgcgtgtggtgtacttcatagactggtaagctgtccagaattcaggtgtaccattgcgctttaactcaaaaaatctgtccccttctaaaaacaactctttacgtctttcctgcaagatggcagaaatcaaaggattgagaggcttaccctcggcgtcctcctgaatcacctcataggaattagcaggaggcagcgttgccatggtccatgcttgcgcatcttttacacgtgccaaccgaaggtcattgagttcggctaaagcctcgttcgttttgcccaaatggtaatagctttcagcttgcatgagcttcagctcttcggagcgcaacccacagaagaaagttttgactgccacacgttcaggggtgacatagaatttgtaacgaacgtcttttgccgtgtcagcgacactaaaactattcaaaaaacgaatacttactgggcggtatttgatttctgtcgtagtggcaaggaaatcctgattgtttcccgaagacgtactgtaagctttgatgagctggtttgaccctaccttgaaaggcgtacccatcacctctttataattatggatttgaagaattggataagcttttaacagttcggctgtcaacggaagcactttactccactgctctgtccaaaaatacaatcgagctaaatagcccttacagacaggctctgtaaagcggtacaacgcatcggtggaatgataattgattgattttttcaaatcagcttcgatgaagtcgaccgttgcttgcattgaacttcgcagcgggcggtcttcaagattgaaggtctgaaccaatgccaagcctaactgactatccatttttccatgcgctggtgcttcacaaaagtaacgcaacagctgataataacacacagcacgcaagccataagctgttgccaagatagtgttggcagctttagtgccgtcatcatcaaggttgtcaatgacaatattacaatcgcgaatgacctgatagagttgttcatatttgctcgctgcatacgttccaccgacgagattacccacataaaatggcagtccctgaccgctgttagcagtgagacaagcctcaaaatcatctccacatccagcatctaaactcacaatggtactcacattatccatgaagccagtggagccaccttcgtccatgtcattgagatgactatgaaggagtgccgaaaactcttcaggagtcttagggactgtctttccataaggtttgatatccaaatatttgtcgcaggatacaagcgacatggcgacgagaattataaaatatatctttttcatactgattctaacttttaaaatccaacaaatacacccattgagaaactacgtgccataggatatactgcacccggactctcggggtcgattcccgaataattggtaaaggtataaatattatctgctgtgaacgaaacactgagcgagcttaaaccaatgcgctgaatcaacttggtgtcaaaactataagctaaattcagtgagccaatcttaaagtaagaaacgtcttctaataaagaggctttggtaattttgggagaagaaaccacataattgtccaaaccataatatttaccatacgcatcgagaatgcgaggatgtgcatcggttcgatgattctttgtggtccaacgattcaccacatcccttgtcacattgaggtgatttacatataagtcgttcatttgtgagagtcctttttctactggggtgccactcaaagaaccataacctacaggactattgatctgattgaggatctttccgcccaaagaatacgtgccagataagctcaatgtcaatcgcttataagacaaactcatgctatatccgccattggtaggtgcgttagaagtacccaaatagaacaaataattttccgcattgttgcgatctgcagaggtttcaaatactgcatcaggacgtggctcgtacgtaatgagtcctaaacgactatcaatgccagccacttttccgctaaagatagaaccgataggataacccacatagattccttcacctaaacctgaaacaatagacttgtactctaacaacctatttctattgtaggcgatgtttccagagattaacaaattccaatcgtcttgcttaatcacgttagccgacaaggtgaattcagcacctgtatttgacaacttagaagtattgaacgattggtttctgaatcctgtagaataaggaataaacacctctgaaaccgcatcacttgttatgcgtttatagatttcgcccgtcattcgaatgcgatcattcaaaaatcctgcatcgatagacaccttcatgtctttggttttctcccatcgcaaattgggatttggtgccttctttatccagcccatacgataatagtcggtatctgttttgcggaaagactgtcgataatccatgatcacttgtggatgaaccgacttattgatattacccgtaaacccataagcagtgcgtaaagacaagctactaataataggtttgagcttttccataaacgattcttggtctacattccacgacaggcctaatgagcctgtggggttgaactgttccttgctaccaaaattattgctaccatctgttctgcccgtaaacgaaaatacataacgattgttatacacataatctgcagaaaaataaaacgatgcaaacctgtcttctacaatattttgtcccgacagattatccatgagtaaagcatagtttttcaaatcgttatactcaaaagtcttaccttctggatagactggcatggcagaattaccagacacggggtcgtacccatagcgtttagcaaagatactctttgcatattgtccacggatttctgaacccaacaacccactgatataatgcttgtcattgaaggtgttgaagtaatgcaactgtcctcgcaagttataactactattgtaggaagagctttgcgcaatagaagaataagtacgcttagaggttaatgtctttaaatcgaaaggacgatcttgccaagccgtataggtatctttatcattgatgttatctccattattcgttgtgtagctgtatgagcctaaaccttcaaagttaagattatcaataatattgatagtgatgtttccaataacggttgtagagaagtttttggtcttgctggacgtattatttatctctctcatgatgttcaccccgttatcgggcaaaggcaaggttgacttagaaccgttggcgagcatgatgttataataagtctgatcagctgcatagttcccttgctcgtcatacacacgctcataagggttggcaaaataggcgtatttaaacaagtctactgccaaagaaggactattagacgtttgccaacctaaatctaatgacaaccccaattttacacgtttgttgggcttgatgtccaacttagaattgatgttgtagcgtgaataatcggttttcttcaccaatcctgcattctcagaatagcctaaagaaacataaaaagtactcttctccgaacctcccgataaagacaagttgtggctttgcgatacagaattgcggaaaagctcatcgaaccagttggttgtatgactgcctaagcgagcgatttctgcatcctgctgttccttattcatacccttatactgtccatatcccgaacgaatcatgcccacaatgcctaccacagggtaacgttcgttcttctcaaaatagggtttagagtactcatcccacagttcttgctcccaagcaagtttctctttcgaatccattaagtcgacagcgcgtggtggacgagtgaccatggtagcattggcagaatagttgatacgtaattttcctgccactcctcgcttggttgtcaccacaataacaccacccgcagcacgtgaaccataaatggctgctgccgatgcatctttcaaaacggtaacgctttcaatgtcattagggttgatacctgcaataccattggaaaaaatatcgctgaaattgcctgacaacatttgtgctttcgagatagtgggcaaatctttttgaagtgctaccccatctaccacccacaacgggtctgcatttccagtaatggtattggtaccacgaatacgcactttggcagattcgccaggacgtccagagagtgctttgacatcgacacctgccatctttccttgtaacagcatatccaaattggcggtaggattcttattcaaatcctttgccgtaatggtagataccgaaccagtggtacgccgtttagtggtacgagtatatcccgtaacaaccacttgttccaacaacgaggcgtcattttcaagcacaatgttctttgtcaaagcgcttgtcaccttgatagtcttagatttcatgcccaaatacgacaccgtaatggtatttcctctatctacccacaatgaaattttaccgtccatatcggcaatcactccgacaggtttacccttcactttcaccgtggcacctcctaagggattgccatccgtgtcagtaatggtagtgactacctgcaccatggcatcgctcttttgtggattttgagctacgattgccaatgagatgaggcagaaacaaaaaaataataatgctttttttctcataaaaaagaatataaatagattattgatgatttactatatcaacgtctctcggtgagagttttaacagatgatcgcgaaaataataacgtatcaaattgtcataataagggccatacacggcatgatccatgcctggcaataccatgaaatcgaatcgtttgttggctttaatcagcgcatctgccattcgcaaggtagatgcccatggcacattatcgtctacatcaccagaaataagtaacaatttacctttcagtcgatgcgctaactccatattggtgggcacacgttttaagccatgataagtctcaccccaccattgtatatagatattgttgtcatgattgcccgatgctgccactgccactttatagaaatctggataagtgagcagggctgtcaccgactcggcagctcctcctgaatgtccataaatgcccacacgagcaaggtcaataaacggatagcgttgagccaatgtctcgatggtatgtttatcatcgcccacagcataatctcttaaattgccataaccgtaggtataaaaggctttgtcacgaatgggagaactgccacgcggctgaacattgatcaccacaaagcctaactctgccaaactttgattgccattgtcatctatcacaaatgctctgggtacttgatcggcttgtggaccgggataaacattggagatgataggatatttcttggtgacatcaaaattggagggaagatacatcacccctgttaattcagttttcttgtcgggtgctttcaccgaaataagctttggctttatccaacctgctaccaaaagtagctgttcgttggcacgttttatctcgtatctgtggtttggatgacgtatatctatcacctgaaagacgggtggcatgtccatacgcgaataagtgtcaatagcgtattgacggttatccgagaactcaagtgtatgtgttccgttgcctggtgtcaacagttgctgatgcttaccattgagcgtaaccctataaaagaatcgataattaggatcaatacctttttcttgtccgtaaccagcaaagatcattgtattggaaagtgtgtcaatatgcacaatagtgctcgccactaactggtctcctcgggttatccgatggagcaatttaccgtttttatcatagagataataattgcctcgtcctgttctatccgaccaccaaatgatttgctgaccatgatttatcaaccgatagttcatctcattaatattaagatgtggcttagaaacctcggttatcaatgctctcacctttcctgtttgtacgtcgatatggcataattgcagcgtatcaacccctcgactgcgacgggtaaaataaatgtcacgaccgttatggcggtcgtctaattcaacatactggtctttaaacttttctatgggcagtaattttgcctcatctgtatcagcgttataccaaaacaatttgtattggcgcacgtgtttttcgttgggcagtggcatctttttggtttttaaccgtgggcgtggttttgccaatgcattgatgatatagaggtcggcaacctgactatcatcttgtacaaaacacacaaatcggtgtccgtaccagctgccagtaatgttactgcctaagagtgtgtcttttgccgaacggtgacaatacgacgcatacgctttaccgtcggtggtaagttgcctaatttttcccgtgaggttgtttcttacgtaaaggttatatcgatcaccaagcatcgtaaaagccgaatcaacagtttgatagggatacttttgacggtcttctctctccagcgtattgctttcttgaggtgtcttttgaagttgcagttttcctgtctttcgattaaataacttgacagtacctttgttcttaaaagtaaatagttgactgttttcttttacaaattgtacattcaagtatcttaactggtcattgccaaaagctgtatctcctgtaagttgttgatattgcttcaggaaagcaggtacatcagctatcaatttttctcgctttcccgtctttgcatctaagatataacgcaccaaatgaccattctccatgcggtgatagttcacaaatgtagattgagctatccatgtcggagatgccaaaacatcactactcaagcgctttttaaccgccttttctgaatgtaatgctacctgctgccaatttgtttgttgtgcccaagcaaaaatcggaggtgctaaaagtaatgcaagaataatttttctcatctacctgcgctttgttttttctgccaattttacagcttgcaatgcatttaagctaccaccactgatgctggcatctttatttttcattggctgaacactattcattaaaatctttactacttgcgatgctttcagctttggaaaataactccttatcaaagctgctactccacttacaatgggagccgcaatagaagttccattctcggtagcatactgattgcctggaacaacagaagtaatctcttcgcctggtgcaaataagtgtacacgctgttttccgtagttggatatggaggaaacagctccctttttagtagaggcacctacccttataaagttgggataaaactttccatgggtatccaaacctgtaggaaagtaatcgaccgaatccacattcaagtgattattaccagccgcatgcactattaaaacgtccttttgggcagcgtatgcaagtgcattattcaccatttgaggggttggagaggtatattttcctaagctgatattaatcactttcgcgccattatcaaccgcataacgaatagcagaggcgatatctttatcgtactcatcgccatcgggagcagcacgaataatcatgagcttggcttttggatacactccttgccaaatttcatgaccattttttccctgacctgcaatcacaccagccacaaaagttccatgatagcaaccatcgatggttagtataggattgccataaaatcggtctgtctcatccaagagattatctcccatgagcaatcgcttatcctttgcatgctcaattccgtcaattctcgttttcatcaactgaagatgattattttgttgacgaacaaattgcatccacttcatcgttgttttggtacgtatgaggtcggcataaatcttctctgccgcctgttcccaaagcgtgtctggtacttgcaggtgcatcacgccattgatagtgatggtatcaatagctgcataacggtgcaccaaggtatccatcgtttgcaatgccttattcttaatgattgaatactgatacatgcgaagataattagcaataccagctttcttcttcatttgcaaataatagtgatattccgtactatccgcagtactcacctgattgatatttttatactttggatataaacgcttaaactgtcgatattcttcagtacctgcactggtcatgttaaacgatccatctgccgtacctaagaaattccaaccatgaacgtcatcaatatagccatttttatcattatcttttccatctcccgccacttctttaggatttctccacaaagcatcctgcaaatcaacgacagtagtatcaatacctgaatcgataattcctacaatgattggcttttgcttcttgtgatgatactttgaaaggtattgaagggcagcatctatagcagccccttgtacagaatcgggatttgaccgataccaattatttggttcagcagaactggctaatgcgactgatgaaagacctaaacaaaataacaagcaacctgaaaacaaaaattttctacaaaacatccagcaaataaatttgaatataaaatgcaaaagtaatacttttgaaataaaataacaacattttaaccgattttcatttcactaatgaatctatagtataagattctaatttgttaatttgataaccaatgaaattcttgcttactaccctatccaaaaaagtcaggctgtttttatgcacaaaacagcctgactttttcgaaatattgtctattattataattttgaaaacattatcaaacgctcaccatgagattatttctgctgcgagaaagcttgttgttctgccttcgcaacaatctcttcgcgggaaagttcagcagcattgatatcatccaagtgaagttcatctatctctgcttctaataaagaagttgtttttttttctttcaattggtcatcgtctgtaaatacttcttcttgaaaaggcgactcatgcttctctatctcggtagtcttcgtaatgataaaatcgtctttaggagctacatctggaactatcgccacaggttcttcttccatttttgtacgatttgtcttagcagcaaacacctcgtcaataaactttggttcacgttttaattgctccaaagtaagtttactcgccaattgttggctctctttcttactaaatccttcgcctgaacacccttcaatgccttccaattcgacaagatatttgaaaataggatttccattttcatccttcttttgttccaataaattgaaatgaatcttcactctattcttctgactccactctatcagcttgcttttaaaattaacttctttataagcaaccttatctatattgagcatttctgacaatatacgatttttcataaatcgcatacaagcatcataaccacgatccaaataaatagcacctaccaaggcttcgaaagcatttccacccacatagctattgtgagaagaactacgaccactgctcaataacagtttacatatccccatctcgtttgccaatttgttcaatgtgctgcgttgaaccaatttactgcgggtatttgtcaagaatccctctcgctttccaggaaaatgttcataaacaatatgaccgacaatagcatcgagaacagcatctccaagaaactctaagcgttcgttgttcactggtcttcccttggcattgcgtcgcatcacacttttatgcatcaaggctaatttataataacttatatcgtggggataaaaaccaatgatgttatatagagacgaataaagctccctctcttttcggaaagggagctttattctgtctatcaaattattcagcatattttttgaatactacacaagcattatgtccaccaaacccgaaagtgttactcattgctacacgcacttcacgtttgcgtggctggttaaatgtgaagtccaaacgataatctatctcaggatcttcatcattctcctcatgattgatggtaggaggaatgatatcatttttaatagccaatacacttgccattgcctccacggcaccagctgctcccaacaagtgtcctgtcatactcttggtagagctgatactcaagtcgtaggcatgttcaccaaacacatctttaatggctttggcttccgaaatatctcctactggagtggaagttccgtgaacattgatataatccacttcttctggttgtaaccctgcatctttcaatgcttcggtcattacaagttttgctcccaagccttcaggatgactggctgtgatatgataagcatctgcactggctccttcacccaccatttcggcatagatttttgcaccacgtgctttcgcatgttctaattcttcaagtatcaaacagcctgctccctcgcccatcacgaagccatcacgactggcactgaaaggtcttgaggcatgcactgggtcatcatttctggtagacaatgcgtgcatggcgttaaatcctccaacaccactttcgcaaatagctgcttctgcacctcctgaaacaatgatatttgctttgcccaatcgtatttggttaaaagcatcagccaaagccgaactggatgaagcacaagcactggtagtggcatagttgggtccatggaatccaaaatgaatggatatctgtccagcagcaatgtcggaaatcatcttagggataaagaatggattgaattttggaccgtcttccttatgctgtccataatatactacttcatcctcaaatgtcttaataccgccaatgccaacaccaaagataacaccaatacgatttttatctaccgtgtccaagtctatttctgcatcctttacaccctgcatagcggcaatcattgctaattgagtgaaacgatccaatttgcgagctgcctttctatcaatataatcattgatattcaagtcttttacctcacaagcaaatgtagtcttgaagttggaagtgttaaataatgtaataggagcagcaccacttttacctgccaacatgtttttccatgtctcttcaggcgtattaccaataggtgttacggtacccagtcccgttactactactctttttaattccatagatttaattcctaataattgattaaaagcaaattgaaattgagctgaaagaatgctctcagctcaattatattttggcttttaattattttgcattttcttcaatgtaagaaattgcatcaccaaccgtagcaatattttcagctttatcgtctggaatagaaataccaaattccttttcaaattccataatcaattctactgtatccaatgaatctgctccaagatcgtttgtaaaacttgcttctggctttacttcagcttcatcaactccgagtttatcaacgataatagcttttactttgctttcaatttcagacataattgtaattcttttaagtgtttataatttaatctctatcaaaaatacggatgcaaagaaacacatttttattcacatttacaagtattttgcctaaaaaagtactatttcttgcacaatatcactattattgtgcaattataagcattatttcaatgaaaatatctgtgtttgataaagttatcatgaactaaattgtcccatctttgaaaaatatttttaagattctaacaactaatataattaacaatacttctaccaattattaacatcaaagcaaattttgaaaacacaaaaaacgtgttcttttattttgtcattcaccttttattatttatatttgcaacattaacataaactaaaacattatgtcatttagcgaacaatgtaacaaaatttttaatcaagccattgacgattatcatataaaagataatatagatactccaattcaaaatccttatgatagagagtctatagaaaatcgattatacctgaagtgttggattgacaccgttcaatggcattttgaagatattatcagagacccgcacattgatcctgtagaggcactggcgctaaaaaggcgcattgaccaatcaaaccaggaccgtaccgatttagtggagcagatagatagctatttcagacaacaatatagcgatgtgcaggtacttccagatgcacgtatcaatactgaaagtccagcttgggcgattgacagactgtcgatattggcactgaaaatctaccatatgaaagaacaagcggaaagaaaagatgcttcttcagaacatcaattaaagtgcacttctaaactcaacgtccttttagagcaacaaaaagacttaggaactgccattgaccaactacttgaggacatcgaagcgggacgtaagtatatgaaggtgtacaaacaaatgaaaatgtacaacgacccttctaccaatcctgttctctataaaaaatagatgaaaacagagcatctactcattatacgtttctcggcaatgggcgatgtagccatgactgtgccagtgatttattctttggcacaacaatatccacaacttcgcattagcgtcttaagtagaccttatgctcaagctttctttgacaatttggcaccaaacgtggactttatggcggctgacttaaagcacgaatatcgaaaaataagaggactaaacaaactctatcgtcgccttacagccaaacaattcactgccgtagcagattttcatgatactctgcggtctaaataccttcgaatgaggttttttatggatcgcttcaaggtggcacatattgataagcatcgctcggaaaaacgtaaacttattgatcatcaaaataaagtattaaagcccattcaatctgcttttcaaaattatgctgatgtactgtctgaattaggatatcccataaaattaaattttaattctatattcccgaccaacaacgaagcattttcatctttaatacctaaaataggcaactataaagagaacgaaaaatggataggattagcaccttttgcagcgcatacgggtaaaatttatcccttgacacacatggaacaaaccctgcaaggcttactaaaaaaatatccaacagcacgcatttttttgttcggaggcagtaatcaagaaaaaaaagtatttttgcaatggactaaaaaatatccttcttgtacggttgtccctactaccctgcattcattacaagaagaactaatattgatgtctcgattagatgtcatgataagcatggatagtgccaacatgcatttggcgtcattggtgaacacacctgttgtcagtatttggggtgccactcatccttatgcagggttcatgggttggaaccaaagcatcgagaatgctgtacaaacagacttaccatgtcgtccatgctctatatatggtgaaaagccttgccgtcgaaaagactacgcttgcttatatcaaataaaaccagaacaaattattcaacaagttgataaaatattatctcgtaaagataagttacattaattattaattaaaacaaacaagattatgaaaaagtacgtatgcgaaacttgtggttatgtatatgacccagcacaaggtgatccagatagcggtatcgaacctggaacagcttttgaagacctgccagaagattgggtatgccctctctgcggtgtcggcaaagaagatttctctgtagtagaagagtaaataaaaaatacacttgataatttcatcaagtaaagatttttctaaaatagcaatgagtattattcatctctcattgctatttttttgtatcttttaattgtttgtcaaccaataagttacaatactaaaattaactcatggagataagggcattaactcatgtaaataaggggcttaagtcatggagataatgcccttaagtcatgtttacaataaaaccatctttatgctttgttttttgaactattttatgccttgctttttgtacaatttatttacttttttatttgcataatattaaccacaaaaatggtgcataaacaggtggataactctgttgataagttgatacttttccaccctctataatttcaaagccacttatcgtggatatctacccttttataaaacgtccttcaacagtttgtccacagtttcttcatcaaaaaagatatcaacttattcactacccccgataaaagatagaatgtgtataactaccctatagctctgaaaatcaaagcgaagatattattgaaagataagtataactaacattgaaaggtggataaacaatttaccaaacatttcactaattatttatcaacaaatccacagtacatcataccttctattttgttttcttttataagaaataaaaaatataaaatatataaggtatgtggataacgtctatgaaatttcaaaatacaatttttgtgtattttactaccctctcttttggtaaggtttcttaccatagcattgggcaatactgatagcagcggtcatgatgataaaaggcatgaatggagccttaaatcttgtttcaccgtgtacagccaataccaaagccaaagagcctcccacaaggatgctaagcgttagaaagagtactttataatgcttctctttccgcaaaaaatgaaaagagaatatagttgaaagtagtaagagccaataaaaaatcatattataaagtcccaaccattgaataggtgtaagatgtttcaagtttttcaataagctgcgataaggaagtgtgatgtaattgttttctgcgcttgatttgtcagataagaaagcagaaatattgtccatatcgttcatatacatataaaataatcttcctggaacttttttcaagtacgtaaatggatgttgttttagccagttgatactccgttgtttccatatatccttacattcgatggctgttttatgctccctatcttcaatatatctcagcgttcccttaggatacatttcggcattgtaatgaggttcaacacttttttcataagtagctgccaccatattaaaccataaggtgtcgctttgataaagaaaataaccagtgcgtaaccagcaactcgttccaacgactgtaataaacaacaaatatcctgcaagaagactacctgtcttacgccaccatttttgtcgttcaaaaataagaaaatataaaataaatgtgcctataaaaatcactccaagcggtcgaaaccagttagaaaacgccatgatgaaaccagctataaaaagctgtttgtaatgcgaagaatgaagaataagaaatattccccataataaaagcgtgacagaaggtatttcagaaagaatcgtagtactttgtccccaattatttgggtagcatacatacagtaaaatagcaatgagtgctattcgttcgttcaaaagtttttgagtaatgcgtgccaacagataagccgagcaagctttgagtaagcacatcaagacaaggattggaacgatagaattgaataaatatagtgagagtatcaccaaatttatttgtccaatattccatataaagggttctccttgtatgttaggagtacaaggataaggttctccataagtgagacaggtatgcgcatattccaaataaccttctccatcgttcgtcggtgtataaccaaatacgatgagtaccagcaataaaaagataaagaataaaatacttatctgacgatagcaattttgcatacagttcctttattgccttgttgatcggctgtttgcaccatatatatgcccgaagcaactggttttccgttcatatcagtgctattccaaacaaaagtaccgccattactttttccttgagcaacgagtgtaccattggctgtaactatctttatatcggcttgataactgagaccaacaattgtgattggccctgtatagcctggttctacaggatttgggtaagcataagtcgtttccttgttcatcgtttctacagcttctgtagcatcactgtgataagaacaaagtcctttatcgctaccaaaaaacacttcacctgttttatcattaatcgcaatactttgaatatggttagagggtaatacactgttggtggtggtaaaatgatgtatttgttcgttaccgtcagcacttattagatataccccattgtttcctgttgcaaaccattttcggttgctttggtcaacagcaatacatgtaatatctactcctgataataagtagtcggcaagattgctaccatctttacgatttatcttgggttgtgtaaaagtaacattaggaagttgggataattgcgatgcttccaataaaagaggtcctatattggttcctatccaaagattgtgttgaagatcttcggttacatatttaacagcagtgggagtcatagaagtaccatcttggttgatgaaattggtaatggtatggaatacttcatttttactgttataacaaaataagcctggaaggcggtaatctccatttgaaaaccacagtagaccacgactgtctatacaaggatgatgaagtaaactgggacttaatccatttttcatcaatgatttttgatggtgagatttcatcgttccatcgggtaataattcaaggatactttgcccttttgtctgattattgagtatccaaagatgttgattttcatcaaataccagtccattaataggaacatacgtattgtcaagttcctttcctttatcaacagcgggcatgagaagactattgtctttgttataaaaggatttaagttttccgttttgaaattcgtagagtcccgttctacctccagcaaaaacatgatttgcacctttcggatcaatagccaagcaattgatatcggcataagaatatcctgtgattttctccatatcatcttgataaatatgccattgattgtcttcaagaacttggataatacctggatgtgacaaacttataccccctggttcgtatccacctccagtggtataaagttggtgatgagcaaactttaagaaataaaagtaattatagtgagggccgtgtggacgatactcctccattttcttcatcaatgcttcatcctttgagttggtgtttttggtataatttcctattctcttccaattatttttgtctaataaattggaagataattttgccgcatattttccttttgtggacgactctgctatcaattggtcttgctgttgatgaatccagtctacttgaaagcctaaaaaataggtatcacttatttcggcatctcttacattcactttcataatgccaaatcctgtggcgagataggcataaataccattcatgaagatagaatggatggttttatcaacggttaacgatttagcgtagtaatctgaaagattggtcacattaccgttgtcatcaagcaaatctatgttatagtttttgtacacaataaccaatcgtttggctgccctattatacccaatgtgtgtaatttctgtatcatttagcccagttgttcggtcaaaagtttggacactattatcgcttttatgatacgcaaaaagtccacctgaggctaatgtataaatcgtagatcctgcttgctgtacatctgtaatgtggtcataggatggatatactttccatgttcctatttgtgccataccttgtaaacagcacataagcaagagaaggacagatacgaaggttgttttcatgcggcaattgggttatgaagtttcattgatcttgctatgaagatattctgctaacttttctacagcctgtgcacggtgcgagatatgattctttatggtttcaccaagttcagcaaaactttgctgataaccattggggatgaatagtgggtcatatccaaaaccagcgttgccacgtttttcttttgcaatgataccgtctatacgtccttcaaaataatgtatttcaggtgctgcaaaagtattttcaacatttttttcttgttgatttttgtgatgttgcagcaaggcaatgacggtgcgaaaacgagcatttctgttttctttatccagtaattcgtgcaaaagtttctgcatatttgcttcgctattatggtcggttccctctgcatagcgtgcactgtgaacaccgggtgcaccgtgaagagcctccacttcgagccccgtatcatcggcaaagcagtctaaaccataatgctctgccacatatttggcttttagaagagcattttcttgcaaggtttctcctgtttctggaatatcctcatgacaacctatatcttgcagagacactatttcaaatcgttctcccaatatgtcacgaatttcctgaagcttgttgggattgtttgttgcgaatacgatcttcatgttttttctttacttttaccttgatttgatcaaatccctcgccgtatactccaatgacagaactctgactgacaaaggcatttgggtcggtcattttaatgagtcggaagatgagttgactctcgtttttacgagccaagagacagattactttgatttcttgtcctgtgtaccatccgtgaccgtcaagaatagtcagtccatggtcggtttcctgagatagaatttctgctatttcttcgtgttttctcgagtagatcataaactgaacggattgtcgttggcgagcaaacacaaagtcgagcatgaaacattcgataataatggtacaataaccaaatactactttgtgggcgcgttgtgccatttcaccaaattgcgggaagaagaaacagctgctgacaataaagatatcaatcaatatcaatacctgtcctaaggacatatctttgtatttgttgacacaagcagcaatgatatccgagcctcctgtactaccgttgttgagaaataccactgccagtgatgaaccagtgatacagcatccaatgaccattgacatgaagtcttgtccctcgcccaataccttgataaagtttccgttagcatctaaaggcattagactttgtgcaaacattaacatgaaataaagggcaatgatagcgtagatagtcttcatcatgaatcggaagcctaaaatcttgagcgcaacgattaacaacgtaaagttgataatcatataagtgttttccaacttaaagcccgtggcatagtacacaatggctgacataccagtaacaccacccgttacaatctggtatggtaacaagaaaatagtaaatgcggtagtgtaaagtaaaagacccaatgtaatgaagacatagtctttcacttcattcatgacatattctttattttttatcattttagtacgatattaataattttacgtggaacgataataatctttacaatggtttttcctaccatatatttaagtgtgcgttcatcggcaagtaccttcttttcgatttcctctttactatcatctatcgagaaaaccttttggaaacgagcctttccattgaacgagacagtcatctgaatatcattttctttgaggtattcttcgttgcattctggccattgtgcatcgcaaacagaggtggtttctccaagtgcatgccacagttcttcactgatgtgtggggcgaagggtgccaatagcttgatgacgtctttaagtaattctttatttgtgcatttgctttgtgccaactcatttacgcaaatcatgaatgcagaaatggcagtattatacgaaaagtgttcaatgtcgcccgttactttcttgatcaatttatgtacagacttcagttgttcaggggttggagcgtcatcattgggcaagaacttatcggttctattttcgtaaactaatccccacagctttttcaaaaatcggtgacaaccgtctataccgttggtatcccatggtttgcttgcctcaacaggacctaagaacatttcatacagacgcaaagtgtctgcaccatactgttctactatcatgtcaggattgaccacgttgtacatcgatttcgacatcttctcaatcgcccaaccacaaatatatttatcattttctaagataaattctgcatttctgtattctggtcgccacgctttgaaagcttctatatccagcacgttgccatgtactatatttacatccacatggatggacgtggtttggtattgatttttcaatcctaatgagacaaatactggtgcagccgaatggtcatcattattgatacgatacacaaagttgctacgtccttgtatcataccctgatttactaacttctcaaagggctcttctttgcaagaataaccataatcatgtaaaaacttattccaaaaccttgagtagattaaatgccccgttgcgtgttctgttccacccacatataaatctacgttctgccagtaagcagctacatccttagctaccaatgcttcttcgttatgtggatccatatatcgtaggtagtaagctgagcttccagcaaaaccaggcatcgtgttcagttcgagtggaaagacagtagtgttatttatcagagacttatcaacaactacattcttttcgatatcccatgcccatttcatggcacgtcccaatgggggttcacctgtttctgtaggttcgtatttatctatctcgggcaattcgagaggcaaacagttttcgggaatcatgtaaggcataccacctttataatatacagggaatggttcgccccaataacgctggcgagagaaaatggcgtcacgcaagcgatagttcacttttacatgccctaagtcctgtttggtgatgtattctttagtggcagcaatagcctcttttacctgcatgccattgagactgaaggtggtttgttttccttttatcggactattggtcaccgttccctcctttgcatcataactttcttcgctcacatcagctccctcaatcagtggaatgataggtaaatcaaagtgtttggcaaaagcataatcacggctatcgtgtgctggaacagccatgatagcacctgttccgtagcctgccaatacatagtcgctcacataaataggaatattatcgcctgtgagtggattcacagcatagctacctgtaaacacacccgatactcggcggtcggagatacgctctcgctcggtgcgctttttggtggcatctacataggcttgtacttcttgcgcttgtgatgaagtcgtaacttgtgagacatagtcactttcgggagccaaaaccatgaaggtgacaccaaacattgtgtcggcacgagtggtgaaaatggtgagttcgatgtcgctgtcggcaaccttgaatcgtacttctgcaccttccgatctaccaatccagttgcgttgagtctcttttaaggattccgtccattgtacattgtccagtccgtcgagcaaacgttgtgcgtacgctgacacgcgtaaacaccactggcgcattttcttttgtactacagggtaacctccacgttcgctcactccatcaactacttcatcgtttgccagtactgttcctaatccagcacaccagttaaccatggtttctccaagatacgcaatgcgataattcatcaatatggtttgctgttcttgctcgttcatggttttccatttatgggctgtgaaggacaagtcttcaccttgtgccacattcaaaccgtcactaccctttgcttcaaagtgctgtattagttttgtaatgggctgcgctttctgtaagtcattgtcataatacgactggaacatcttgatgaatgcccattgtgtccaatggtaatacttgggatcacaagttctaatctctctgtcccaatcgaacgaaaatcctattttgtccaattgttcccgatagtgctggatgttttgctcggtggtgatggctggatgctgaccagtttgaatggcatattgttcggcaggcaatccataggcatcgtatcccatggggttcaacacattaaatccttgttgacgtttatatcgagcataaatatcactggcaatatagcccaatggatgacccacgtgtagccctgcaccagagggataagggaacatgttaagtacgtaaaacttttgtttttgcttgtcttctacaacatgataagtcttgtttttcacccattcttgttgccatctcttttcaatgtctctgaaattgtattccataggatatctttattttctacttgaaataatgatcaaatgctatttaggtagcaaaattactaaaaaaagaaatataaaatgaataaaaagtgaattttatagaaaactcacgtgttagttatggttcatgttaaaaaatactacctttgcaaaatgatgagttatcaatgcaaaataggatgtataggtctcgttacggctttaatgatttgtagctgtaacgagcaaaagcagccccatcctatgagttcgtctctttctagtaatgatacgatggaagacacaactccgatttatcatcatattactttggattcaactgagcagttgcaaatatattatccacatttcaagcgcatggatttggtgtgtggagtgatgccgcagccaaccaatacatcggttatcatggtgtgtgccgcagcgtttacgggtcaacttaaaaaggaattcagccatgaaaatatcgctggaaaccatgtcagcggaggagtttaccacaaaggctacccttgtaaggcaaacacaggtgcttttgtatatgcgcatcgtcaatggaagtttgtttatcaagattacgcagccgaagtggcacgggcagcagatgaaagtggtatgggctttggacaaatgatgttaatcaataacggactacgtatgcctgccaatgttgtgggaaagaatatttatcgggctttgtgcgaacgcaaaggaaagctgtgtattatagagtcgcggcagcctttgttgctcatcgatttcatcaaatttttaggtagatacggtgttacacaagccttatacttagacatgggtgagggttggaattactcttggtatcgagacaatcaaggaattgtgcagtacatacatccaaaaacgcaagattacggtaccaattggattaccttttaccgataattaagaacggcaaacagatggtatttgttttcttctcacgaaaaaaatacctgcaaattaatgtaaataagcgaattataaactgtggtttgtcaataaaaatcagagttattacctttatttctataaattgtttgtcagctaatcattgagaaaaatcctttctatagcagcaagtttagcaatgataaaaaacatttatagcaaacttttattaaaaatgtttgctgcattcgaaaaaaccttttatctttgcatccgcatttaagcccagatggcggaattggtagacgcgctggtctcaaacaccagtggggcaacccatcccggttcgagcccgggtctgggtacaaagacaaaagctaagtagtttgttatcaaatacttagctttttcttattttatgaatgttcccaaattgttcccatgcacccttttctgaaagcttacaattccaaaattgactttataataggaacaaaatctaatagtgcttctgatttaattatatagcctaagttattaggtatgtgagaaattgacaaggccttttcttgaacatctggaatggtaacaattttaatatcgccagaaactgtaagttggggacctgcatataatatacctaacaacataagtcgtcccttcccccaattcaaatttccttttttatcagtataacctcctttattgaataaaataataggagaaccacttgagccaggaaagcaagctgcatctataacgaattctcttttcccgttatggtttaacttaacatcagttgccgtaataccgcgcctaactatgggcatattatttatagcatcccataatccattgggatatcctatcatcaaaacatcttctgctatatcaatatcttgtaactgttgtatggtaggaattatagtattatcaaaagtccgatagaaaaatcttttaccaaatccttcttgaaaggattgaataataggtttcatcggcataacacaaaggtctatctcggaatcaggatgaaaaatccatttcttttcaaagttcttttctatgtatatgggaacatgtttcgtataaataggattaccactctcatcacactcactcatgataaatttcccttgggtcataccttttacgacatgctcattagttacgagtaagggtactatggtcttatcatctatggatagattgaaaaagaaacctgtaccggaatatgaaatgccttcatttgaagtcgtttcaatacgaacagtactaaagcacagttgctcaataatagataaatccatattatttttattttttatatatgcttgttatattaaaatcaaaatcttgaagcttaagagcactatctatgacgaaatctatacaaaacctacagtcaacatttcttggctgcattctttgttcataaaactcttttccaatagcattgtattcacaaccatcttttttatcccaagcttgaatataaggagttatagcttcgaaaaagacatattttctataatctattcccagtgccgtaattttaagtatattgcgaagtttattagttgttttcgttacgtcttcgaaccatattgaatctctgttatggttacctacaagagaacgataattactggaaatttcattcccgatatttaaaatgttattaaaactatatcgtgacgatttattcgcttcatacgaacgtagcaattccaaaaaagcaattttacaattttccaaacattcatagatttctcccgattggtatttctgttctgctatatcaacgtaatctttgacactttcaaaagagattagagaagatatggatatttccttaaattctataccaaattgtttaggtgtattctcctctaagaactgcgttattgttaatcggctaaattctatgtctgatttagacggaaattgtcccttgtgtttaatactcactctgcgatcttttagtgcattcatagaattttgaagagttaattctggaatatgagtccagtagtccataaatgaccatttttgagccttaagattcttgttttctgcaataagtaataaaaatatttcaacacaatcatggaaggacaaaatagaaaaaccggcaacagtttcaacctgcatggattgctgaacagcaatagtatataggtactttacgattgccaatcgacgaatgattatttctttatctaacatgttttttgtataatgaaatttttcttagccaataatctgcatttctatgtagataagagtatagttctcactaaaatgacctacttttttgacatagatattctatcatttactacaccaataagtatattatatagattatcgagtagtttttcatctaatccaaaacatctcaaaatggtggaatcaaaattacgtctatcagtgcaatttacttcttctataatagaatttatggttcggttcttaattggtcgaaaagcggagataatagcatcaactttttccctgttcaataggttaggatttaacatcttgagttgttttaagaaatctgcatttaaatctaaagcacctaagcttcgtgaagtgcctcgcatttcaagtattaagaatgttataacagagttgagtagagcagctaccagttctacatcataaccttcttgcacttgcatagctatcaaacgttggtcaattataaacggctctttggcaaaggtaaagaagaagcgctcatacgggttaattgcagtgataatgtgtgcccttttgggatttagagaataccaatagggacggtgtcctgagcatgcctctgatattgtttggctaccattcttattaggtgcgtttacaaatttatcaatccatgacttcgttcctttgtctatatccttttcctcatcttggcagacgaaagccctaaacttataattatcatcaaactctatctgttgaagttctgatgatgacttcacatacggaaccaaatacttttcgtcaatacgtgatgacttagcatctttatctttaatgacgaacataggattccaacctgtccgctctcctctaaacacttttacgatgtttggataatattggattaaacaactttcaaagctgccaaatagattggtggaaaggaaaagctgtccccaattagttttgttttcaagactatctaacaaacattccttagatgccaaacatacagataaacttccatctttacgcttatacaggtcagcaaagaaatcatccttttcccatagcttattatgagaatcattgcaattatctatatcgctataaaaatcttcaatctgctgtatttgttcgttcttagattcagcaacaaacaattcactcaacttacgattgagtgtgataaacttcgttggttcacaactttgcatcttgtctaagacaaaataaatagtggacacttgagaatccttaaaccaatgttctgcattgctttttacaacatatcgtatatgaaagttatctaataagaacttcttaaattggaacccatactctttccctaaccacgcattagatgttattgcagacaaacaaccatcaggcttgagaaatttatctgcgttataaatacagtatgtaaaataatcagagcgctcattaattttgaatgttttgtctttcaaaaaagcttgctgcccattctgaaattgctctctaaagaaagctgatagtttctcattgggaatatcctcctgctgtatgaacgggaaattgcttgcaatgccatcaaaagttggtataggcacatcaatatgcttattatggtcgtgcgaatctggaaagacgaccttttctccaacttccaaataaaaaaagtcattacgcatgacacgaggaaaattgtctgttgcaaccacatcttgcttatacaggttgataacagataaaattgcagggaaatgagacacatcattaccccatatctgctttagtagtttcctatgctcctttgtacctaatactcgtaaaatctcataaaaagaacttagaaaagtaccagttccgcaagttgggtcgaacaatacgtctttattggtcttaacaacagggaaagcaacaagttttgccaatacttcactagtaaaatattgtccaaacttctgcttctcatcatcaggcacaaggttttccaatatatgcccaataacttctgttggcaacactttgaaatcaaaagcgatcagcacctccaatagagcataaatagctttatcgaccaaagtagaatattctatactatctgtgaaatacggtctaaagatagcttgataatctatcttctttgctttgtcaaaatagctattcaataaatctttagcagatttattgtcatcaagagcaattggtttcaactctccgcttaagttctcgcaaagagtcaaatagaaaatggtcttgcctatcaagttgtagaaagtaaacttcgccaaaacctgttctggtatgacatgctccttctttcttgacgaggattctaaaatcttcaaagtggaactttcataaattttccatttattaaattcatctctaaacgcacgattactacccttctcctgatttattgcctcttgaaattgtggaataatgatagtagatgcttctcgtacagcagaaatgatatttttagaaatatcaagtgcaggtttcaaagttccattatgatacaaagaatctaaatcatgcagaatttcctcagtacgctctttcaataatggttcgtgctgtgcaaactttacaggatcagctaaatcctcacgactgttgatagttgaaacctttggatagacttttaactttgataggctatcaagtgtatattcttcatcgtctatatgccaaatgatagcttctgcaccgttccatgtaacaaaagaatcagagtgtaacttatgtgccttttccagcgcattctccaacataacggtatcgtcaacggcagtatctggaaacttcaattcccatccattgaatattacaccagaagtcttatcaacgaaaagaagaatatcaggaaatttagttcttcccgatttcatttttattccagtatcattagttgcatcttgaaaaacagtagtctttctgtcaatagctgattttatccaactaataagttgaccagcccaatctcgttcgtttctctttacatcaagttttgccataactattactttgcagcggaggtatatactttgttgtcaaaaagtccttgtatgacaggttccattttatcattgtgctgcttagcagtaacctttgcaaggcgatctgcacatacttgtatataatctatttctttgaccttatgtagcattacattctgatttttctcaattcctatatactttctatgctccatagcagcagcaactaagaaactaccactgccacaagcattatcaagaataatatcgccagggttagagaatgttcttattaaatatcgcccaagctcaacaggtttttgagttggatgatatacgggaccttctgactctgccgttttcacatacaaaaagtcttctattggcaattcattatcgtccataaacagaacatcatttggatagcgcataccattactttgaacatggcgtggcttgaaatctccataactccctgtgtattgattcttgcggatgcccttatcataactttctccctttgtcatttgaggattatatgtgggttgttgtttataaaacacacaaatatcctcgtgttttcgcaaaggctgtttcttggcgtttaagaaatttgttgatttggattttatccatactattttatatttaaaccattcctcattgcttaaaatgagttttgcagtaaaaagaccttgggcagtcagaacaatagcaccattatcctttattatacgcatatactgttgccaaagcttctttaagtcaatgacagaatcccacttgttttgtgttgtaccataaggtaaatcgcacaaaatcatatcaacagatttgtctggaatattaggcataactttcaaacaatcgttttcaaaaaccttattaataaaatcttgaatgttattttccatattcgcgtatattttctgcaaccatactaattactccatcagcacaatcttcttctgctaaaacatcatagactttatctgcgagccataattgcagaagttccttttcgtttgtgtcaagtaattttgccaataaaatgacttgttctcttttggcttttctttctcctctttcaatacggctatacataggggtatctatctccaatgcagaagccaactgcctttgaagtaactgtttcccctctcttagttcttttaatttatcagcaaacagcatatttgtcaataattgatttgtctttatttggcaaatttaatatttctatttcaaacaaacaaatttttcaaagactttttgaaacatcctgcggccatttaagttagatagagcgaagtacatccaatctatcttgacagatttcatttcatcttgcctgcatcaggctatcggcctttgattttagttgtaagtcgtatccgtctgctttttccttaatgagcttaatggtcttttcgtttcgatgaatatcgaacacatcattaagccataggatttccttggaactacatcctctccaaactctgataattcggaatttcaaggcatcatccttgtattgctgtttactttgccacaagaagtaattaccgaccaaagaaacaaaacaaagcatagatactgccaccatagtagtaaatgctttcgaggacttgaggtcaaaactgtgcctgtgaatatgttcctgcggtattggatgctctttattctcctgccattcgtgtaacatggtcaagacacttgccaccaatttgtccatggacttagcctcctcatccttgatgcgtacttgtactccaatatacttgttaatcacatcttttgttcgctgttcatactgattgagcaattcctgttcctgctgattgtcatgctgtacaggtgtagagggaacagggaaagagacagagccgttctccttttctttcagttcctttagttccctgtaaattgtctccagtttgtttttgatttcctcaaagaggacaaatgtattattatcagccatagttataaatgtattttacgttttttctttttcttctttttatcaagtgtattgtaaacctccgcagggacagtaccatgagtttgaaacaaatccaatcctccttctatgaggttgttggtaatttcgctcgtaacacttgcaacattagatataagatttatcgttccttgcatctgctgttcgtgttccctgttattttgttgcagggcaaagtctatcttggaataactgaaacccctatccacctttgaaccgttgaaatgataaccgttcttttcaaagatgataccttgcacctcctgtgagttgcttttgaacttaaagcggacatcaatatcttgctttttcaagtgagcaagaaggtctttccaattcctgcactgagcaatctctgctttcaacgtctgatagatttcatacttggtcttatcaggttctttcaagcgatactctttgactttctctttgccatcagcaaagtataaaccatatttggtggtcagttccttacaaatcttctcacttttgaacctatcgttacggtcagagatagtcttgccgttattatctatccgattgaaagcgatatgaacatgtggatgttccttgtcgaaatggcgaccgataatgtactgcgtttcttttattcccatcttctccatgtattcacgagcgatctgcgccatccattcattactgagcttggaagaatcctgtgcggagaaactcagggagatatgtcccacaaccttgcttactcgtggattcagttctgtctggtcgatgaaactttggacaatatggctgatactctctgttctcactccagagcagtctatgagttctgttcctttcttcgggtcaaggatgtaattaataacacccttgaagcccgaacctttcattatcttggcaatcattttcgtatcagatttaggatttcatcaatcttgctaatgatgattttatggaaaggagcaacagaatgaaacccttccgcattggcacgatgtgccaactgattgagattgtttgccatgccacacagtttgcgaatgaagtctgcttgctctactgtcagtcgttcaatgacgtatccttttgcaagaactttccttacaaactcactcatggttactcctgcgcttttggctttgcctttaagcgtatagtaatcctgcgtattcagtttcaccgtgatgcggtattttttcttttcggctacgcccttggttggacgaccaccttttttatattctgtttttatcatacttgtttctttaatttaatttgacggagaccagcgggatgattctctgcaacgactggcaggaggtggagcaagtggttttggtatgcccaaaacataaacttgctccccgaaaaatagattatgcgaagcatatcccatagttatagtcttatccctttgattttcttattttctgctttctctgaatgcttgaattcagtacataaatactcatttaggtctttataattttggaagacgaaagagcagtcttgaacagcaaaatcatctcttttaagttgttctaaagttcgctttcctccttcatcattatctaaatatgaacagatgagtttgtgctttgaaaggaaaaatattgactttttgatattattaatcgagttaagtatcagtgcagctttcttctcttcctctggactcatcgtaagcaaactaagataatccataaaaccttcaaacagattgatttgttctgaaggactgggaacatacgacacatctgaaggaggcaaacaccctttgaagtatggattgcgcaacgcatacccataagagttgtttggaaatcctattgcgtaaaaacttctctcaccaattctataatggatttccctacaatattttttcgcaatgttcagattgattgctctatgtgtaaaataatctatgagatttggatgacataagttggtagagccaataacctctatacgtgattggtttggagaaattgttttgctattagctatggagaattttggtaggttattttgtttgccattaaacaactctatagcttgtactaaactgcaattatgtaatttcataactaaatctataagactcccaccttcatcaagtgcaaagtcataccatagattttggttataatcaactttgaaacttggagtatgttcatttcggaatggacttttatacattccgtaatagccataattctttatagggtatatagacatactacctaaataatctttaattgatattgctttaatttcatctattgtcatacttgtaacttttaaacctattacttactacaatgtaattgttttgtaagtcattgacaatgaaagaaaaatatgtagtactaactatctttgtagtaatcattacacatgtatatggtcggttggtagtaatgaggtagtaataccttatatcattatttactacgatctaaccttttttctttcaatgctttatctctctttgtagtaaagtagtattaataattagtattgtaactttgaataaagggatttggaacaatcttgcgtatatgataaacatacattggattgccacctatccttttggatttccgcaaaaaaccagcctttttcaaggcttctcccattctcctttcacttaggttaagcgttgtatatccacgcaaatagtttaggatttcagaagtagtcatataactttcttcggtaacagctggtttttccatacctttaagaagcatttcatactcaactgtctgcacttgaaacccttcgctctcttggtgtagttcagctatttcctcttcattaaaccaataatgataaccactccgccacaattcaactgcctcggagtacaccttgtttatatcaatctctttagctgcatcaatatcaatatgttcaacttcaaaaggtagaaagcgacgactacctgtcggatctgttagaaaatcattaccgttaactgatgccataaaacttgctaagtggggatactcttcgatgtaagtgtcgtatggtctacgatattttactcttggtgtcgttatcagattcttcaattcattttcatctctcttattgagtgcctttagctggtcgtcaatattgataaaaaggtattccgcaatcagtgtttgtacatcttttccttgtgggtcaatctttcctgtaaaaagataactcttcagttcttctgggcagagtaaatcaaggaaagttgttttgaattttccttgttcacctgtaagaactaaacatgtatgattacgacactgtaaatcatccatagcattggctacgacagcaaccaaccattttacaaagtagtgtttccatttatcaggatttctcaccacaacacaatttgccaaccttatgatttcagattcatcttcacctttaggctttggaagattcaacaaatactcacgaatcgggttaactttattgcaaaagtcgctctccaatattgctcgaatattatcagctggagtatatattcccaaagtcccatctaccagccgacgcatagagttaatatcatatttagtaagaggacgaaatgaagtattagaatcttgttctcgaaactctgttctacttttaactgtattaaaacgaaaagcataatgctctttcaagaattgttctatacgttcattcttagattgcttggctcgcccttcagttctttccttttccataatgcatatatttataaaatggaagaatcagaatgtttctcagaaataaaagcttttgcctcctcgttgatttcggcaacagtctttttcttacctccttcaatccatgccaacaactcatcttcaaaaaaatagagatgcttaccattcttataacaaggtagtaagcgtttacgtactaaggtgtaaaccgtgggtttggctttccctataagtttacacgcatcatctattccaataggaatacgtttgggagggacaatgggttttgtcctttacatactaaattcttgatttcagcaacttcgctgactaagtgagcaactgcctttggcaagttctcaaaagtgatttcattttgtaccataatacttgttattgatttttacggtgcaaatgaaaaaagtgtttcttctgtgtcctaagacactgaagaaacactataaaaacacaataggtttgtgtgttattctgttatttggtggtcagaaaggctttgtacaatgggtatagtgcctttcttctcgtcatcacggagatgactttttatacttccaacttctacatctttgaatgtggtggcaaaaacctgcttaaggaactgcgaaatttcatcttgtttgccaactctaaaatgattccatatattccaaccaaaatgaaacaggtctaaggcaactaaacctttgatattaattggttcaacgtgtgataagggaagcttagcggagtacaactctatatattcacaaagcttgagcaaatctttatctgaaacataaggtgcgaattgctgttgagtatatttaatagctatagcatgtttatcttgtactttcttgtccattaacttttgttgctgttgccgaattgagtcaaagtccattgattgttgctgttgtgcggaagatagaccgccaacaccgtctactacttgtcctgcctcaatgtcggaggcattatcatttgttttctctccttgtttctttggaaagaaaaacttgactaatgccgtaaatagtccctctaccaaaatagacaatatagaataaatgatgatgcctatggcaacaacactccaaaagactatttgtgcagtaaattcatcaacccctaaacgtaaggcaaccactctcgcgaacaacgcaatgatgacacaaacaacaagaacggacagatatgctacaatatgttcaaaatatttggtattcatattatgctgtcgaattaggttttatcattttcaatatctatttgaatagcattggctgctttatttttcttttcatcgacaacctttgcatatacttgagttgttttgacatttgtatgcccaagcatcttgcttacagtatagatgtctgttccgtttgcaagttgaagggtagcaaatgtgtgcctaaagcaatgaaagctgaggtgtttctgaatacctgctttttcaatccatgcccttaatggacgagaaatccaagaaggatttggtaacccttcaaaaacgagttgttctggttgtcttggctctccgcaaagcttaaacgcctgttccgagataggcatatactctaccccttttgtctttttctgagtaaagagaagtttggcttggtttccttcgatggctatttcattccattttagtttttgaatatcgcaatgtctcagtcctgtcagagctgagaatagtgctgcacgtttaagtacatcacgttcacagggggtattagctaacttattcagttcatcaagggttaagtattcccttcgggattcttgttcctgtatgcctttgatttttgcagataaatctatggtcaaatatccgtctatgaatgcttgtttgagtgcagccttaaaaatagaaaaatatgtggaagctgtgtttcgtgatattgccccttttttacttccaccacaaggagcagataacaagaaaaacttgaaatcttcagctaatcggttgtctatttgtgaaaaaagaagcgtgtctccagcaaacattttcaacaaaacatgtactcgcttctagtttgtttgaattgaaagggaactattacggtgtcgcttatctgccactttatcaaagtacttaatgaaattttgttgtaatcgttctttctgttctgcttgtgcggtttctgtgtcactatacaagcttgcattatcatattcacgctgccgtagttttctaacactatctgcataaatacaggcctcttggtctatttcgcttttgcaaaggataattccattcaaatctcgtttaggtttgaaagtttgggtcacttcggtagtacgggctgttctacttttatcccaaataggagtagtgatagttcggtttagatactcacgcactctttgcggagaatcttttccagctactctcacaggatagctttctatatacaggtaccattcttttcgataggcactctttcgcaatcgtactgttgcctttgtattatcaagttcctttctcattgtatgtcgtgggttattgtttatacaaattgtctatctctgattttggcgcatagacgtaattaccaatctgccttgttggaatagaatatttgcgaatatgcagatatacagtactatcatggatgccaaacttcttggctatttctccaatcgtataacaatcttcaggctcaagccgataagtctttacttctgattgtttttcttttcttctttcatcgtaaggacgtagattaaagcgttcttgtaaatcagctttgcaaatacgtatcatccttcgtccgaggttataataacgaacttgcttattcctgattaagcgataaagggagtcgcgaccaatatcaaataacgctgttgcatcagctattgagagataaggttgattcttcggaactcttgcagccttttctcttttcaatgcatctaacagttcttccttttttctttgtttgtatgcagcttgagaacagttcttagagcaatatctagaggtaagcgtctttgcaataaaagatttaccgcaaatttcgcatttccgctctatttgaaattttgcactcgccatactatttgtatctatttgattatcaatctatcttttaaattaagtcgcactttatctcccattaagtagcggcacaaatatggtacaaatataagcacaaaaacgattaaaaacgataaaatttaactattattaagaaataaaaatcccagcaacttattatgttactgggatttacctatttttgattagcgtttattagcacttttatttcacttcctcaaagtctgcatcttggactgtgtcgtcggttgtgctgccttgagactgttcgccacctgcttgctgttcaccagtaaagcctgcgcctgcacctggttgtgcaccacctgcttgtccatacatttgggcactggcagcttgcatgacggtattcaggttattgatggcagtatcaatggctgctacatccgcattcttatgcgcatctttcagttgttgcaaagcactttcaatgttaggcttctgatcggcaggaatcttgtcaccgttgtctttcaagaagttttctgtggtgaagatcatggaatctgcctgattcagcttatccactttttcacgttcagccttgtcagcagcagcgttttgttctgcctcagccttcatacggtcgatttcttcttgactcaaaccgcttgaagcctcaattctaatcttctgttccttgcctgtagccttgtcttttgccgatacattcaagataccattggcatcgatgtcgaaagttacttcaatctgtggaacaccacgacgtgcaggagctatgccttcgagattaaactgtccaatgcttttgttttgtgatgccattggacgttcaccttgtaatacatggatagttacagccgtttggttgtctactgcggtagagaatgtttcgctcttcttggtaggaatggttgtattggcatcaatcaatttggtcattacgcctcccatcgtctcaatacccaatgttagcggagttacgtcgagcaatacgatgtcaccaacgccactctctttattcaagatagctccttgaatagcggcaccaatagcaactacctcatcagggttcactccctttgaaggctcttttccaaagtaattctttactaaggtttgtacagctggaatacggcttgagccacctacaagaatcacttcatcaatgtctgatgtggatagcttagcatccttaatagcgttttgacaaggaaccaagcaagcctgaatcaagtcatgtgccaactgctcaaactgagatcgtgttagcgtctttactaagtgttttggcacgcctccttctgccgagatataaggcaagttgatttctgtagacgtggtacttgagagttcaatcttggccttctctgcagcctctttcaagcgttgcatagccataggatcttttcgcaagtcaattccttcgtcagctttgaaaccgtctgccaaccagtcgataatcacttggtcaaagtcatcaccacctaagtgtgtgtcaccattggtagaaagcacttcaaacacaccaccgccaaattccaagatagagatatcaaaagtaccaccaccaaggtcgaaaacagcgattttcatatccttgtgggctttgtcaacaccgtatgccaaagctgctgccgtaggctcgttgacaattcgctgaactttaagaccagctatctcgcctgcctctttggttgcctgacgttgtgagtcagagaaataagcaggaacggtaatcacagcatcagtaacttcttgtcctaagtagtcttcagcggttttcttcattttctgaagaaccatggctgatatttcttgtggggtatatttccgtccttcaatgtctattcttatgtagccattttcgtctaccaccttaaagggtacgcgctcagcttctttttggctctgtgcataagtttcacccatgaaacgtttaatagagtaaacggtgttcacagggttggtaatagcttgacgcttagctggatcaccaaccttgcgctcgccatcttttacaaaacctatcacagaaggcgttgtgcgtttaccttcactattagcaattaccacaggctcattgccttcaaatacagcaacacatgaatttgttgttcctaagtcaattccaataatctttcccatatttatattgtttttttagtttacgagtttataagtttacgagtttacgagttcacatgtaatattacatatttcgtcgtttcgctcatataaaaacaaatgccatgccaaaaacaatattttagtgcatactgacaagaaatatgccaatctgtcattttcatattcttattgtcatgcgtggaaagagccaaggaagaggaacgagccaccgatgtcattctaattttgtcatgtggtagcccatggacttaagttgtatggcagcttccaaagaatatagttggtgcagggctgtgactaccgcacgatacgcatcttctgatccatgtgttatcggaaaatgttggagaatgttattggtgcgggcagcacattcgccaacaacggactgtagtgtttgtgcttgttctgtgtttagacacaacaccttttcgcgtatgtagtcgtccatgtgatcaaagtcgatgcggttgcgcaaatagagatacaaattttccaccttattatatagttcccaatcttcatcccaatatttggctacagccatgccaatatacatcatccaaccaaaaacaacggtagggtatttattaaattcacgtacagcatcgggcatataagcattggctatttgtagccacttctcttcaatgtcgggtgcatcgggtaggtgggcgtccactttgttcagagacagcaggtagttgtaaaggtctttttggagtgttatcgcaaattcggtgacaggttgtatctcattcatcatatatttcttttgaaaagggccaagttaaaagtcatcccttagttttatccttccaagaaatgatagattgcaaaattacgaatttattgtgttgaatacaaaggggcaaataaaaagttttgcaattttactttactcaaggatatcttcaaaaaacattactgttattttgtagttacgaaagcgatatctattttcgtacttgaaattataatttaataaaaataatcaataagaaaaccatatcattccgccgatagcggttgatatggttaaatgcttaaaataccttagccagctaaggctgttcgtatcttgacaaggtcaagttgctctgtcttatcagaatttatagagaaaacctgcagagatgacgccttgattggagtttttaataatttggaatttaacctctgcattgagggcaaacttttctgagaggtcgtattggaaaccaccaccaaggtttacaccaagattgccgtcactgtgtgattcgttacttcctactgtgatactaccagctggcgtgctgactgtttgagtgaagccatcaacagaaccgcgtaggtaggtaagtcctgccagggggtagaccttgatattgtctccaagtgagaagagataatgtacatccaaattgaaatcccaccaagaagcgttgttcttttttaggaagtagtcgaatgttgcctgtgtgcggatagcgtcagtgattccatagccaccttttagacccacacctaacgatttgatgtctgttggatacgccagttgcccacctaagtaggcttgtccctcttgcgcaaaagcgccaatactaagcaatgcgatgactgctgttaaaaataatttcctcataactatgttgattaaatgaataatgtatcctatttcttagtcattgatgcttagtgggaaccagctttgactgataccaccagccttgacttatggttgaagaatatgttgctacaaagatagaaaatatttattatttatggatgaacgtatcatcattttttttaagtttttttattctgtcttttctgcaatggcttgtttgatttgtgcttccaattcttcacacagctcaggattgtctttcagtaactttttggttgcatcgcgtccttgtgccaatttagagtcttgatacgaataccacgaaccacttttcttgataatgtcatattctacgcccaaatcaacaatttctccgattttagagattccttcaccaaaggtaatctcaaattctgctttgcggaatggaggagctaccttgttttttaccactttcacacgcacttgattaccaacaacctggtcgccatctttcaggctggtcacctttcggatgtccagtcgtacagaggcatagaactttaatgcgttaccacctgtagtggtttctggactgccaaacatgactccaattttttctcgcagctggttgataaagatacaggtggtattggtcttgctaatattcgaggtgagtttgcgcagtgcctgactcatcagtcgagcctgcaaaccaacgttgctgtcgcccatgtcaccgtcaatctctttcttaggtgtcagtgctgccacagagtctataaccaagatgtcgatagctgaagagcgaatcagttggtctgctatttccaaggcttgctcaccgttgtcgggttgcgaaatccatagattgtccacatctacgcctaactttgcggcataaaaacggtcgaaagcgtgttcggcatcaatgaaggcagcaatgcctcctgccttttgtgtctcagcaatagcatggatagccagtgtggtttttcccgaagattctggaccatatatttcaatgatgcgtcctcgtggatatccacccacaccgagtgcgcagtctaatgcgatgctacctgttggtatcacttcaacatcttctatttgttcgtcacccattcgcataatagaacccttaccaaagtccttctctatcttcgccatggcagcctgtagtgctttcagcttgccttcgttggtggctggtgattttgtttcttcttttgccatattttgtactttattttttttgttgttgagctaattagtctcattgttcctattgaccttgtcagccaaaatgactataattccaaatcttttccaaactcttcgtgccaaggcaagccttgtttgttaagttgttccatgaaaggatcagggtcgaagtcttcaacgttccaaacgccaggtttcttccaaattcctttaagaaacatcatggcaccaatcatggcaggcacaccagtggtatagctcactccttgcattcctgtttctttgtaggcgtcttggtgtttgcagttgttgtaaacgtaataggtaagttctttgccgtcttttataccacgaatgcgacagccgatgctcgtctcaccgtcgtagtgctcaccaaggtcttgcgggttgggcaatacggctttgagaaattgtaaaggaacaatgtttaccttcaccttcgtgccagagccatcagccatttctgcctcgtattcaatctcatcgatgcgcgacatacccaaattttgaataacatccaaatagttaaggtattgttcaccaaaggtcatccagaaccgagcttgtttaatggtaggataattcttcaccaaactttccaattcttcgtggtgcatcaaatagctctcacgtggtccgatgttaggataggtaatgggttgatgaatttccaaaggttctgtttcaatccatttgccgtctttgtaataaagtcccttttgtgtgatttctcgaatgttgatttctggattaaagttggtggcaaaagccttatggtgattgccagcattacagtcgacaatgtccaaataatgtatctcgtcaaaataatgtttggcagcgtaagccgtgaagataccactcacacccgggtcgaaaccacacccaagaatggctgtaagtcctgctttttcaaacttgtctttgtatgcccattgccatgagtattcaaagtgtgcctcgtcttttggctcgtaattagccgtgtcaagataattgcatccacaagccaagcatgcctccataatggtaagatcctgataaggcaatgccaagttaattaccaactctggtttgtaatcgttcatcaaagcttttagttgctccacatcgtcggcatctacttgggctgttttgatgtttgggttaccaatagcttttactattttatcgcatttctctttacgtctgctggctatcattaactctgtaaacacttctggattctgtgaaatcttaaatgctgctacggttgcgacgccaccagcgccaatcattaaaactcgtgacataatcatgaatccccgtcacctccgttgtggaggagagtgcctcgcagggtacgcctttattggcactttctgttggttgttatactttattttatttcttcgctcttaatccctaaggcattcattaacgaatagcccaagatttcttgcctgaagtttcctcccactaagggttgcatggcaaaaacagtgatgcgtttattctcatcgtctacgctacgcagacttgtccgaatgcggtcaagcaccccttcccgttcacagttgggaactatcatcatccgtttgacatttggatgctggcatacggtgagcaggatgtccataaagaagtcggtatcctgcacaatatcttccacaggaaacgaacttaacataaattcgcctaagtgatctttgaaagcctttccgttcaagtcattttcaaaattgcctggctgaaagttttccagtgtggtcttttccttgctatgcacaaagattacttgtgtgtcatgtgttccttctctgataccgccatctaaggctatgcaatcaatccaacgagcagtgtcggctgcaggtatgcgccgtccaatcattcgttcaaagttcacaatcaggtcaaaagcaacctgatcgatataatcaccatcaacgagaatgatattctcgctccattgattgtttgaaatttgtgcatccatactttgcaaatttacataaaaataatgataccaaccatacaaaatataaaaaactaattgcatgaacacagctcttccatgtagaaaggctgttgatgatacaaaacaatctttttccttcttttgtttcaacaaccataactcttctaagaaaggtgcagttttcttatttttttggtaatggtatttgctacttttgtcctattattttaccaaaaaacggccatctaaaatttgcgaaatagaaaaaatcaataggcaaacgacccgcaaaaatgcgctgattttcacaaaatagacgtcttttcaagctggaacattgattttacgctcttggaaacactctttagaggtattattcacatgcttcagccgcattaaagcatgcaaattgcagcattatctcaatgctttagccgcaaaaaaatggtaaaaataggaaagaaaagagatgttgtaaacgtaacatgcttaataacaaagaattacaaacctcgctcatttctcgcgtatttgcgacccactttgtcgttgattgttttcacgcgagttatgagaggcactttgtaaagaaaattcagcattaataagccttccatgttttctgaatatgttataaaaactaaaataaccaatgacctgaacgattattacacttttgtgtagtgcatatttattttgtagattctacttttgcgaaaaataattattgactatggaacaaagatacagtagaaacaggctctatgtgagcgaaagggaacaaagtattatcaagcattataagattttacttggcggcgcaggtattggcagtataatcgctgaatgtgctttaagatttggttttgaacatatcaccattattgatggggataaggtggaggaaaacaatcttaacaggcagaactatacggagaatgacattggtagatacaaagcgaagtgtttagctgaacgcttgcaaagtattaatcccaatgcgcaaatagattaccatacggagtttctgaccccacacaacattgaaaaattattgaatggtcatgatgtggctatcaatgccttggactttaaggataagaccccattcgtctttgatgtaatatgcaaagaaagaaaaattcctgtactgcacccatacaactttggttgggcaggttttgttacaatcgcagacccattgggacattccatatcagaattggcagacggatttaagggatttgaactaaaggtggctgaatatgttaccggacatggagctttttggaatcagccaaaggagtggctggataaaatagttactcaatatcgagaagaaagtgaaacgctcccacctccgcaactgtccatagcatcatggattacagcgggattgtgtacaacggcaatgtacaatcttgctacaggaaaacctgtgaactattttccaaaattctatttctcctcacttttgcaataagcgaagttcttttctcagaacaatttgtttaaggttgcccttgaaatagcttctgtaatattcgccacacctaatttttcaaaggcgtggcgtttgtagaatttaatggagtctaacgagcgacacatcctgtctgcaatttctgccatcgtaagaccagccacagatagtctgagaacttcaagctcttcttctttaagcgatacaccatcacattccttccaccgatgtccctcgaaagagtaattccaatatttctgttgtccattcttgtgaaactctacatgcccagctgttttatgagaagacagagacacgacacacattccaatccatatcttgccctcatcggttaatagtataggagtaagctgatgattgatcagtttgctcctcgtcccactcttcaaatgaaaatgataggacatagaacattggtatttatcaacgttgtcaaaagtgtcaaagaacttaaacccactgctgttcaactcaacaagcattttctgttcctcctctggcacatgttccaagtaaaaactgtaccctaattccttcacctcctttgccgtatgcccacaaagaaacaaagggttgtccgacacataaagaaactcctgcctgtaatagtctatcaagtaaacgctctgataggtaacacgagcaaatgcctctacggtttgcaccaatgtagagagtacattggaatcataggctggtgcattgcgtacggtatttgatgcgataaagaattcttttatgtctgtcatatagggcgagcatattaggttcttcacttaatctcatggcaaaaatactttttttcttcgaaacaacacaaaaagattacacaaaagtgtaaaaagcaagatagaaaagaaaaattacacaaaagtgtaacgatataatttggagatataaatatttttgcaacagaaataatcaaatcgagaagattataaagcagacataactgtcaaaatgtgtaatgttagaagttataagaatctgattaaaaacatcttagaaatatctcttatgaaaaatttgattgctactttattaatgttaataagtttgcagacaatggcgcaaagtgttacaggaaaagtcgtggacgaaaaacagaatcctgtctcatttgcaaacattgtagtactatctgcaaaagattctacgtttcttggaggaacatcaagtgatatcgatggttttttccgaacagaaaagctttctcaaggaagttttttgaaagtttcgtctgtcggatataagacgaagtttataaactgtaatgacgcatcatccattatcataacgatggaagaagactcccatttgcttggagaggtcattgtaaaatcccaattaccaaagaccttgctcaaaggcgagggaatgacaactaccgttgcaggtagcatattggagaaaacttcgtcaatggagcatctgctcgacctgattccgaatgtatctgtaaggaatggaaatatcgaagtattgggaagaggagctcctgaaatatacatcaacggaagaaagatgcgcgatggaatggaattggaacgcttgcagcctgacgagataaagaatatagaggtcataaccaatccgggagcacgctataatgcaaatgtgaaaagcgtgatacgcatcactacgaagaaggttgtcggcgaaggattcagtattgacagtaagactaactcggaagtgaatgagcagaagcgaatgagttgggttgaaagtctgcggttgaattaccgaaagggaagatgggacacgaacattcatctctatggggcctataggcataagcaagatgacaagcaaattcatcagatgacctatcttgacgatatttgggaacagaattctgctgtttctcaagaatacaccaatgtcaatccttatgtgcggctgactacaagttactcgttaaatgctgataactctattggggcaagtatcagttatgaccgatatgccaaagatttgggcattggagatattaaaggactgtctatgcgcaataatgttcagacagaacagtcgctgtcatatttcgagtatcctagcaattcaaaaacattgttgtccaatgtttattatgtcgggaaaataggaaaaatgaacattgattttaatactgattattattggtctgggataaacgaacagatgaataataccgagaagattaatgaggtaggagtacaggaaaaagtgcagaaaattaattctgaccggcggacatataatcgtctgcttgcttcaaagttggtgctttcggtacctttcatatctggtaatctatcgtttggaagcgagttctctgcatccaaccggaaagaatcttatactgtattgccgcaagatgtggtaaacgatgagaacagtcggataaaagagaatatgacctctgtatttgttgattatagcaaaacttttggtaaactgaacgtacaggcaggactacggtatgaatacatcaacttcaactattatgatcacaatatgtacgtagcaaatcaaagtaagacgtatggtaatttctttccctctttggcactctctttgccagttggaaaaacacagatgcaactaacgtatgctactgatatttaccgtccttcatattatgaacttcgcaatggggtgcaatatgacaaccgttatacctacgaatccggaaatcctttccttgtcccatccatcagtaaaaatttaagttatgccctttcgtggaaatggctcaacctgtcggctatgttcacacacatatcggatgaaatctgcacgctggtaaagacgtataaagataatcctcaaaccgcattggcacgcccggaaaatacgccatcatataataatatgcaagtttcattagcattaagtcctaagtttgggatatggaatccttcactcgaaatgatgttattcaagcagtggtatcacatggatacgaatggaacaaagaatctaaataatcccgttgcaactttccaactgactaatacgtttgatacaaagtggttgacggcttccataatactgtctggacaaacagaggggaatatgggaaataagtttgttcgtagaggatattttaataccgatatatccttatataagtcttttctgcatgaccgccttacactgcaactctatgtaaacgacctgtttgggactgctgacgaacatcgcattttctattctggttcacagcggtcaacgtattacgacggctactcttcaagttccgtaacactaactatacgttatcgtttcaatacaacagccagtaagtataaaggtacaggtgcagggcaagcacagaaaaacagaatgtaagaataatcttgacgagatagttattatatgaggtatccaattgtttgtcaatcagattcaatgttatgtggaattgcttgtctacaaatgatatgtaagtcatttggcaaaaatattctataaagctatatcattgctgtccgctaaaaatagctaagcgtcagcatgtcactcactgcacaacgcatctcaaagatctctttgacaaaactatattccaaaataacaaagactgaaacagttcaggcgaacctaatttatttaatttttaacttgtccatttttagtggacgttaatgaaaaagaaaacgcctttagcttattaaataaatgtaaacaaaccgtaataatgataaaatatacgatgatttagttatgaaatattgtgtatattgttctttttgtttatttttcgtcaaatttagtggacaaaatgtttactaacaatctaaattacaaacaattattattgtaaataaatgaaaaacttgttgaagaattgttgtgttatgtcggtggcagccctgttgctgtttcccatgtttgcctttggtcaacgcacagttaccattaaaggaaatgtaaaattcattgagaacgatttcaaagtaggtgtgtatcgcttctcgggtacgttgaagcagttgttggctgaaaccactgttgatccaactacccataattataccatatctgtgccagccgataagataggtgaggctatggttgattgtggcggatggcaagctgtgaatgtgtggttgcaggacgaggacatggatattgattttcgtggagtagacacggcagccattaaaattaaaaatcctccattcgtatatataaaaggtggtaaaaataacgagttaatgaacttgttgaattttgatgcttatcgtaattatcagtcaatgatcgtctattcacaaaaaacttatgttacgaagtttgccgatgaggagaaccaaaaatcgttgaccaatgcgctttatgatttcatgggtgatgattatgacgcacggtgtcgctattatgtggagcactatgctgaccgcccaagtgtgatggtggctattgagcaattggattatgaaaaagacaagaagctcattgatgatgcactggcacgattggctaccgtatcaccacaagccaatgagttggctgcgcaattccacaaagacaaggcagaagagaagctacgcattgagcgtgtcaaggttggtgcacccatgcctacttttgaatgcaaatcaccaaaaggtaagacacttcgccctgctaactttaagggtaaagtgcttgtactcgacttctgggccagctggtgtggaccttgtcgccaggaaatacctaatcttaagaaaatatatgccgatttcaaagataaagatgttgagtttatgagcgtttcaattgatgcaaagcgtgacgcatgggtgaaagccatgagtgaagaaggtatgccttggcatcaaggttgggtgtctgatggaggaaaagaggtaatggatctctaccaattctctggcattccatttattctaattattgataaagacggacgcatttacagaaaacatgttcgtggtgacgaaataaggaaaggtgtagaagatgtgttagctggtaaagctccagcagaagagaaaggtaccagcattagcatgggtgccatgtccatgtaaacaagcctaaagccattcacccgtgacagcgggtggatggacaggttcgagctgttcgaagaaagacagatttagcgttttagatagttgtgttgtattaattttaaaggttttggctatgaaattgaagtattctgtttttatattgcttgcaaccgtagttgcagcatttaccgcttgttcagatgacgaagataaaaaggaacaggctgtcggtattgtgtcgggaactatcacacctatgggtagtacggtgtcatataagttggtaccaaaagataatgccacgatagaaaacaccaacgacagtttggcttgggatgtgacagaggttgctctgtccgaggcggtcttaaaggtgactcctaccctcgagaccacagttagctataatggtaaggaagttggtgccgatggtgtaacggtgaatgccaacaatcctgtgactttgcaagtcaaaggctcatcagggaagacagtgacatataagttgaatgtggtacgtgccaaaaacctgaaagagggtcttgccaaaaagtcaagtgcaatgccaggcgctgtaaatggtgccgtttggcaagatgtagtttcctttaagggaaagttttatgcgctcgttgtcagtgccaaagctactggagaaaagaaaggtgagggtgaagaacattatcagctcttcagttctatcaatggtattgattggcaagaggtaaactatgccgtattgcccaaacaagacgtcattggcggagaaggagcacgattggttgtatttaacgacaaactctatgtcttaggtggcattcgtacgttgggtgcagataaatatggaattccagccgagattgaggacggatggatgggacctgctcctgtcatcaaagtgtggcgtggatatgtcaccagcgatggtacaaactttgaatcgctggctgaaaagttgaaagtggaggacgaaggaaaagcggttgaagcggaaaatacttggctgtataacaacccatattgtagctatgctatattgaatggtaagattttccaacatggaggttttaccatgttcatgggaatggcacagggagccagcaatacgcttgagtcttctaatggtaatgaatggaaagtcctctccacactcgatgacaaaggtaaatctattttattgccatccattggtgcaaacttcttctctttcaagggaaagctctatatcgtaggcggctttactaattttatagatgcaaaattcatgaataatgctgtttactcatctaccgatggtaaagtgtggaagaaagaagctgaaaatgtggaaggtttcagcaatctttaccaagctactattgtagctacagacaatgtcgtttatatcatgggtggcgagattttcaaggaagacaagacacgtgtgttgaataccaaggtttatcgttctaccgactgcatacattggacagaggtgagtgcagaaggtttcacaggagtacgttacgctgcgggtgtcgtggcaggacaaggagcttggttctttggcggctacgaaagtgtgtctacaggcaattatgcgttcccacagcagccgtttaagtggtcaaatacaacttggaatgcggcaatgaagtaacaatataaaaacaacaaagcttctcccgttgccatagagtgcattggagaagctttcttttttagcactatgaaaaaagctcttttcattctttttctaatctttctatcatgcgtgtcgattcgcgctcaacaaaaggccatcaatggcaacgtggtagaccgtaatggcaaccctatagaatgggtttcggttgttgtcaaacacacgaatgtgcatacaaccaccaaccagacgggagcgtacaatattattgcttctgtcggagatacattatcgttcagtattattgggtttgacaaagagcagcgggtcgttggaaagtcgaatcgcatggatatcatgctccacgaaagcaaagatgttgtacttgccgaccttatcgtgactggctacagcaagcaagagcgtcgtgacctcacggggtctgtggcatcggtaaagctcgacgataatgtctcttttcgatctgtggatcagatgttgcaaggcaaggctcctggtgttttcatgaccacatcgtcgggtgctttgggctctgctaacgtcttgaccattcgtggcttaagctccatcatcggagacaacaaccccctttatgtcatcgatggggtgcctatctacggtacagaccgttctgccaattccaccgatgtatctggaggagcgataccagctgcctccatgatgggtatgcaaactggcggcgggtccttgcaatataacactgacctaaaatattcgttcgaaaagaatccgcttgctacgctcaaccctgatgatattgagagtatcgaaattctaaaggatgcttttgccactgctatatatggttcgcgcggcgcctctggagtggtactcatcactaccaaaaagggtagccaggcacgccctcgtgttacggttaactacactctgggcgtggacaatcccttgggtaaactcaaattgctcaacggaaagcagtatgcgcaaatctactcacaatattttaatgggatgaacttccctgaactctatgacaccgattggattgatgcagtaacacgaacggcagtgagccacaacgtctccgcttcattctctggtggaactcaaaagacggtttatttcttgagcttggcagcgtcagataacgactcgtatgttatcaataacaacatgaaacgttattctgcacgactgagccttactactgcaattagttcaaaactggatcttggcgtcaacgtttctatttcccgtttggacaacaacgccttgcaagctcctgaaatttttgcatcagcgataaagaaagcaccaaaccttcctatatatgacgaagatggggcgtattattatggatatgctcctaacagtaagggtgaccccgagacctacaaccctgtggcgcaggcttatatcaatgacgaaggcagcgaggacacccgaactatcggaaacgcataccttgagtggcatcccatgagttggttgatactccgctccgagattggaacagatttatacaactctttttcgtctattaggaaaggagctttgcccgaccatgtcaagggtgtcgctggtaatcaagcacaagaaaccaccacactcaacacgaaatatgtggtgaccaatacgctgaatgtcaacaaggtgtttggtgatcacttcatgcaaggcattgtaggacagagttatgagtacactcgtgaacgtttgaacgctgtggcaggagatgatttctttagtcctgatttggttggagttggtgctgcccgatccaaacgagtcatcagtgcctattcgcaacagtcagctctattctctgcctttgcgagaatgaactatcagtatcgaatgaaatacatgttgggcttgacctatcgtatagacggctcttcccgattcaaccgctcacaccgatacttaggaacaccgtcagtgagtgccggatggcgtatgtcaaacgagcgcttctttcgtaaggcactgcctttcattaaccaagccaagctgcgagcttcgtttggtgtgtcgagcaaagacggcaacaatagttattatggtgcccaagcaacctataaactcaattctgccgtcaactatggcgaccgcaactatctgcaaatgtcgcaacctggcaatgataacctcaactgggaacataccttgacctggaatggaggacttgacttagaggcattcaaaagtcgtctcaagctcacgttggactattattacaagaaaactaccaacatgctcttcccttctaatctccctttatacacgggatacaaaaaagagaatcaaaacattgccgacatgatgaattctggacttgaccttcaaatcattagtgagaatatcgttggcaagaattttggttggcaaacggtactcaatgtatccacgacaacgaataaaatacttaaattaaactttgaaggcaatcagcttgaccagctgaacagctcttttaagtactatcaagagggaaaggcggcagcccagtggtacctgcatcgatgggcaggcgtggatccagatactggcgatccgctctggacttatgcagacggaacacaatctacggtgccaccagcagccaataacgaaacatcgcaactcaacaaatttgtttgtggaacggcattgccaacggtttatggatcgattagtaactcgctgacgtatcgtaattttgagcttgatatcttctttaactacgcgttgggtagccatatgattaacgccactcgagctacgatgcttacctacacccagaacgccaccaacttgtccaaggagatgatgaacctttggcaggtgccaggacagataaccgatattccaaagctcaacaatgcatctatcatcggagcttacgactacactactgccgttacttctgatcgctttttggagaataactcctatctaagactaaaaacgcttaccttgtcctaccatgtttcaccagcattgttacgccggtataagctatgtaggcagctgcgtatctatgcaacgtttacgaacctgttcacggtgacaggttacagcggactggatccagaggttagtgcttttggctcttcggtcacagcgtcaggatacgacaactgcaccatgccatcgtctcgcagtatgcagtttggcgtgagcgcaacattctaaaacgaaaggtagttcattatctaaggaaaattaagatgaaatataaaaatcatttgcgaaccctgctctctacagtcctcgtcttctcactgtttagctgtgatttggacatggagccagaaaacgtgtacgttgacgaaaaggtatatcgtactcaaaaaacagccgaagcggcgcttacgggcagttatgtgaggcttaacgtctttcttagcggtgctccgcaagatcagaacaattattccaacatgggttatgccctcatgttggctgacttaacgactgacaatctcaaagtaagaccatcgtctacaacgctcgtggcggttgagaccagtcaatacactgccaacgaacacggccaattgttatattatgtatggcaatggggctacaatgtgattgactacgccaacaacgttatccatggtgttgaggcgtatgggcaatacaaggacgaagtgaaacgccaacatatcgctgaggctaagttcatcagggcatacgcttacttctatatgctttgtctgtttggtgaccaagcgcttcttggcaatgatgcgggagacggattggtgatgcgtcttgaaccttacaaaggatatgatcccaataatcaccaacctcgtgtaagtaatgctgaatgctggaaacaaattatcaccgaccttcaagaagccattgtcgacttaccacagtctgttccttcaccatcggctcgagttagagccaacaaaagcgttgcacagggactgcttagccgcgtgtacctctacaaaggaacgtttacgaacaacatgggagagttgcagttggctgaaaaatatgcggcagaagtactgaatagtggagcgtatggtttctctaattcgcctaacgaatatacggacaaccttttcccgtctaatgagttctcgcagtcaacaggctatccaaatcctacagcgcatagtagcgagcttatgttcttcgagccaagccgcatatacactgccaattaccctaacgggatgcgttattatcaaaaacgacttttctatgttcctcgaactgctgtcgagaattatgcgcctaacgacgttcgacgttcacaactgatcgtgacaggttccacttcagacaaccctaacgacctcactacgcgcaaatactgtgggggcatgtacgatgacgttatctatatgcgactggcagagatgaagctcacttatgcagagacgcttgtccgtaccaccaacagtgtgtcacgacaggctattgaccaactcaacgacatccaccaacgagcctttcctgatggtatgaaaccgcaacgattcaccgtgtctgattttcttgatacgcaatcattgctgaaagccatcttgctggaaaggcgacatgagttggcgtatgagggccattatcgttgggatcttatgcgaaccaacaatctcttaaaggataagacgttaagtgccgtgacgcccaatcgttggaatttgccggtaccagattatgagttgcgtattaccaaaggacttatacgtcagaacgcaggatacatcaaatagtttctgcaaggctttctcatgagtcttgctcttaaatgagtcatgagtgtttgacccctttttaggaataacgaaactcgttttatcctctttaagcaattaccccagtttgagcttagtccgaactggggtagcctatttacattattttccaaaagaactgtagcgacaagatgataatagtcttgatatgacatgccaagatgtcaaaacaacacttgtaaaaataaacacctgcttttatttggtagaatagttttcaaaacttatctttgcaaacaatttaatctatgaagaactaacacatgctcttttataggttgttagcaataaaaatgtgggcggaggacattctaaaaaacaatgcctgtatgtccgtttattttcattaaaaaggttttaagtttttattttatggcatctttgacattagcgattgttatcgttttttgtattggctatttatttatagccatagagagtgttacaaaagtgaacaaggcagctgttgccttgctgatgttcgtggcctgttggacactgttcatgctggatcctaatacctatttgcccggattctctggacaagcgttggtaaacgaggtgagtagtgtgattgaaaagcatttgggtagcacgtctacaactttgttcttcttgatgggagcgatgacgattgtagaagtagtcgaccaaaacggtggtttcaacttcgtacgagatgttatgaagaccaagagcaagcgctcgttgttgtggcgcattgcctttatgactttcttcctgtcggctgtgctcgacaaccttactaccagtatcgtgatgattatgatactgcgcaagctggtgaagtcacacgaagaccgtcttatctatgcagccttggttattatagccgccaattcaggtggagctttttcgcccattggagacgttactactattatgttgtggaacaggggaaccatcaccacagcaggtgttatagaggaaatctttgttccatcgttggtagcaatgattgtaccagcgtttattatgcaatatcaattgaagggcgagttagaacctactgatgttcatgttacctccgactatcaggtgcttgactttagcagtacacaacgcaagataattttcttcttgggtgtgggcggattaatgtttgttcctatttttaagagcattacgcatttacctccttttgtgggtatcctcttagtcttgggcgtattatggaccgtgaccgaggtgttttaccgtggattgcatcgcaaaaaggacagtatgaccaagcgtgtaagcaatttgttatctaatattgatatgtccactattctgttcttcctcggtatcctcatggcggtagcgagtttggaacaaataggtgtgttagaaggacttggcaaatggctcaatgacgcgtctaacggtaaccattacattgtgacgggtatcattggtgttatttcaagtatcgttgataatgttccattagtggctggatgtatgggcatgtatccaatcgaggcagcaggagatatggcagtagatggcatcttctggcagttgttggcatactgtgctggtgtgggaggttctatccttatcgtgggtagtgctgctggcgtggttgtcatgggattggagaagataacctttggttggtacctcaagcatgttagttggattgctatggtaagttatttatcaggaatcttatgctattgggtcattcgtactttcattttccccgcagttatataagcttatcgctgattacgattgattgataataacataacctggcaacaacatgattgataaaattatttgtagtctatttgtgttgttgctgggaatacttcctgctacggcacaaaacagttctgtttttgaacgtttttttgcaaatgctgtaaccttttccaaaacgttcccacgggagaaggtgcatttgcatttagataacagcagctattaccaaggtgatactatatggtttaaggcgtatgttgtaacagctacaaataatcagttgagcagtatcagtaaaccgctttatgtagaattgctcgatcagctcggcaatgtaatggagcgccatatcattaagttgcacgatggcgagggagaagggcatattgcactgacgaatgcctttttcacgggttattatgagatacgagcttacacccgttggatgttggcttttgacgatgcatcgtacttttcacaaaccattcccatatatcggaaacggctcacacataaggagtcaccgaggagtattgctgtatacaacatggataagagtatggcgcaacgtccgcttcctcaaaaagatgagttagaagctcgtttttaccctgagggcggtaacttggtgcaaggcattccctgtgtgattggtttcgaaactgtgagccgtgacagcggttttgtaaacctcgatggattcttactttctccttcgggcgaacgtacaatccccatttctacgattcatgatgggatggggagcttcatgtatacacctcgtgaacagcccgcaaatgtagaaatcctttttcgaggcagtacctatcgttttgtgttgcccaaagctttgcctcaaggttattccatgtctgtagcaaaccgagaatcatctttcgatgtgacggtgaagagaagttcagaatcgttgacagattccttggcattgttcaccttttctcaaggaacaccgcatagtttcaacaccatagaatttgtgggtaaggtgtcgaagacactgcgaattatgaaatcagacttaccttctggcattgtgcgcatgtcgcttatcaatgcagcaggacatactctttgcgaccgtttttgtttttcctatccaaagaagacaatcaccatgaaaggtgatagcgatagtaaggtgtacacgccctatcagaaagcacgctataaggtaaaggttaccgatgcggaaggaaagcctgtgcgcaatgccagtgtgtcgatagccatacgtgatggtgaacgaactgactatataccaagctctcaaaccattgagaccgacttactgctcacttccgatctaaaaggttatattcatcaaccagcgtattattttgaagaacagagtaggggaaggcgcaaattgttagataatttgttgcttattcgtggttggagacaatatgatataactcagcttattggtcagaagccgtttgagccgaagcaaatgcccgaaccaaacttgaccctgtatgggcatgtagactcttggtttggcaaacaacagtctaatattgccgttacagtgttaggtaagcgcgacacaatttatgtgtcgggggctacctataccgattcgttagggaatttcagtcttccaatggacgatatgtatgggcgtatggagtctgtcattcagaccaaacgcaatggtaagcaaaagaatcgttatgccgatgtgagtctttatcgcaattttgaacctggcttaagagcttatgattggcgagagttgcaccccacttgggaggaacctgtagacactttggcactgcaacaattggtcgattcgcttacaacaaatcaacttgaagcgaatgctttgcaaatagacgaggtggtggtgaagggcaaaaagcgtcataatactttgaaagacacagagtcgtttgaacgagatattctcgccttttataatattcgtaaacatatcgacaagctacgcgacgaagggaagtatgtatccaacgaggtgggatttttcttgcacaaccttaacccattaattaacccggaaggaacgcaatatggtgttaatccgttgcgatatagcgtgaatggagaagagatacaactgccctatatcgagaaagaccttgacatggtagaaacggcgatgttgtacatggacaagtttaacagatacgcttattcggttgatgataactatcgcatacagaagtctgaactcaccgatgcttatactcatttacgtgtagacactgccagtcagatagcactcaataagtatgtagtacgttgtgcgttcaagatggctgacaattggagttctaacaaaaactatcgcccatcacgaggtattcgtcgcacagtgattcaaggatatgatgagccaaaggctttttattcgcccatctatccagagagtggatactttgacaacaatgccgatgagatgcgtcgcactttatattggaatccgaatttgaagacagacgaaaacggaatagctgtcgtagaatattacaatggtagctacacaacttatatgaatgtgtgtgcggagacgctcgtagatggcgtacccgcatcactgaacgctttttcttatcctatccgtaaaaagtaatcaaatactgtagatgtttcatgggatgtccaccccagtcggtgtcgtctacataccgaaacccttgggttgtgtagagacgctcagcatgtggattgtctttatctactaaaagtccaattttatctatcttcatgtctttcgccttatttaaggcatgcatgatcagttctttagcaatgcccttgcggcggtattgcggaagaatagcaatactgtcgatatatagttcgtcaggttgtgcctcgtctttcatatctcgatagtcgatgttaaatttttgaagtgctttttctatgaatacctttctcagcttcttcagatcggcaccatggtaactcacacaaatacctgctacctcgttgttctcattcactgctaccaaggtgttcttatagctgtattggctttcgtccatgctcaccaattcggtcatcaagtcttcaaactcgttcagcgtgtgattgggacctgctaagttttgacaacactcataattcatggcaagcatgatgagttttgcaatttctcttgcttgttctttggtggcttgtgttattttcattcgttattctttttaatgttaaaatcaaatcgcagacctcctgtgggcaggttttttgcttgaatcgttcctccgtgaatcatcactgcattctttacaatagcgagtcctaaacctgtgccgcctaactttctgcttctccctttatctacccgataaaagcgttcaaaaatgcgggacaaatgttcatttgcgaccccaatgccattatcataaaacgcaaaactccaatctttattattttctacggcatccaatgtaatcgtggtgccatagcctgcataggtgatagcgttatctgtcagatttctaaagacgctatatagcaagcttttgttcccgtgaacaatgatgttttcaggaagattgatgataaagctcatgtggtgcttttctaattgtagcgctgtttctttcctaatatcttccaccatttcagagatattcacttctacattctcttttatttcaggggcatcgtccatccgatttaacgtagagatatcttgtaggagagaggttagtcgctgactctgggcatagctgtgtttcaaaaattgcttcttcgtctcctcgtcgatatggggattgtctaagatagtttccaaatagccttgaatgcttgctacgggagttttcagttcgtgtgcaatattttgagtaagctgtcgttttagcttgtcctgttcttgtcgtgtactctgaagacgtttatagattttgataattctttcggctatctctcccaattcgtcgtcaggaaaagcaatcaaatcttctgtttccaagctttcattatggtcggctctactggcaaaaagcttgagttttgtaatgttggcacctaatctactcaagaaacgccataataccagtgtcaatataataatagttgtcaacgcaaaccaaatgaaatgctgatctgtttggagcgattttgccaaatcattattatacggtaaggcactgcgaattgtgattttgctatcgttgaagtaagttgccgaataaaaaaactcctgctttaacgtcttactatttctttctacacttgagcctgacccttttttttgggcttctataatctctggacgattggcgtgacttgtaaaacggttgtaattcttttctaagttatcaaacgtaacatgcccttcgttgtctataatggttactcggaggttaggtaaactgtgtgtcttcacataggagtccaatgtcgtctcgtcggtcttgcccatatacttcatggcatcagctaactgcttattatagttttgcagtttctcattcagcagttctattttatattgtttttcacggacttgttgaaaaacaataaatgcaatagcaaacagcaaaaaaatcgccataatactgacgtataggcgtgtccctacggatatttttctcatagtgcgtcaaaataatagccaaatcctaaacgtgtgacgatacattttgaaaaccgcccaatcttttttcttaagcgtgtgatattaacatctacagttcggtcgagtaccaacacatctttcggccagatgcggtcaataagctcttgacgtgaaaagacgtgtcctttttctgagagtaagagatgcaataactcaaattctgttttagtaaaaggaacatccttgccatcaatagaaaccgtttttttgtccaaattcatctccaaaccttgatatttgagcacctttggttgttcatgattctccgtttcggcagttcttctgatgaccgcacgaatccgtaccaggacttcgcgaatagagaaaggcttgctgatatagtcatctgcccccaaattaaatcctgtcaccgtatcattctctgtgtctctggctgtcaagaaaataattggaatatgggctgttgctggctcctctttaagtttctttgccattgcaaagccagacatcgttcccatcatgacatccaacaataacaaattgtacgatgttagctccatattcatggcttcttctgccgaattagcagtgtcaacagcataaccttcagtttcgagattgaacttcagaatctcacataagtcttgttcatcgtctacgacgagaatgcgataattgttttcttccatatttgataacaataaatgtattcagttgacaaagttagcacatcaactcttcatatatgtttcagaaatattacaattctgttaccttgaacaagatgtgttagatttttattcaaatcacattcttttgaagctattacttttcccatgcggtagtaacccgccttgtcgaacgcttagcaaagaggaattcatctttattttgtgtaattgtatgcttcacacaaaattaagaaaaagctatgagaaaatcaaacatatagatgatgttattttgactatgctcgattctttcatcaaaagagcgacatatttacaacaaaaaagcatccataaaacagcagatgtataatttttggtacgctgttttggaggataataaatgctgaattttctttacaaagtgcctctcataactcgcgtataaatcaccaacatcaaagttggtcgcaaatatgctaaaaatgagcgacgtttataatttattggtgttgaagatgttacgttcgatacaactctttttattccgatttttgccattttttggcgactaacccattgagataagcctgcaatttgcatgctttaatgctgctgaagcatgtgaataacgcccctaatgtatgtttccaagaccgttaattcaatatttcaacttgaagaggcatttattttgttcaaatcagcccattattgtatgtcgattgcctattaattttttctattttgaagattttcaatggtcgttttttagtaaaatgataggacaaaaacatcgaatgcctttgccatagataataatgataaaaagccgcagctctttcatcgaaaggtcactcagagacaaccattttttctcaaataaaagagccgtgttcattttattctatttttttacagttcttttcatgtattttttttcaatcagtattcatccttggatgttttatttttatttttaattgagatagcgcttggcacattactgagaattctgtatatttgtccaatcaacaggtggcatgggtggtagccttggcattgtgcgagtgttgccatgcttgacagataaaacattggacagatgaaatacgcagattatattaaacgaattgagatagactctctgtggagtggtagacggcatatcgtgtggaatcttgacaggcaggtgaatgtgcttagtggtatcaatggggtgggtaagagtaccattctcaataaagtgatcaaaggactgttagaaggtaataacttgatttcagaattgccaccaagtgtcaagattaccgtgtctcctgatgatgcagatcgggtacgatatgatattattcgctctttcgatcgacctttgatgagctccgataccgttgccaaagtagataagcgattggcaacagaattggattggcaattgtttcagttgcagcgtaagtatctcgattatcaagtcaatgtaggaaataggatgatagaggtgttgcagaaaggtggacctgacgctgctgctactgcccaacaactctcttcagccaaggtgttgtttcaagatatgatggataaattatttgccgatacgggtaaaactatcattcgaacacaaaacgaaattcgcttttcccaacttggcgaaacactggtgccttaccaactctccagtggagagaagcaaatacttgccatcttgctcacggtcttaattcaagaccaccaaccctacgtgctctttatggatgagccagaagtaagtttgcacattgactggcaagagcagctcattgatttgatattacaattaaatccaaatgtacaactcattctgacgactcattcgccagcggtgattatgaatggctggatggaacacgttactgaggtaagtgacatcacagatgtgaatcgatagcacttgaaaccaccttgaatcagggtttgaaatgggaaaacgactaaaagataatatttcatctgcctatattggggctgccaatcaactcaaatcattgaacgctaaacggcgcattgtggcgtatgtggagagttacgatgatatttatttttggcgcacggtattgagagagtttgaagatgacaaatgttattttcaaatcatgttaccctctcgtcttcaacgcttggagcgtggaaagaaggcagtgttgatgaatctgcttacaaataaagtaggtcgtgatatgattgcatgtgtggatgccgattatgattatctgatacagggagccacccaaacctcaaaggaaatactttccaatccatacattttccatacctatgcctacgccattgagaacctgcaatgttatgcgccatcgctctttgatacctgtgtaatggtaacgctgaacgaccatcatatttttgatatgcagcgatatttagaagattattcgcgtgctatttatcctctttttatatggagtatttggttttatcgcactcccgattacaacaaatttaccattaccgactttcttcgcatcatcatgcctgggcattttacgatagcgaatgccgagcataatatttccaatgttcgtcaaaaggtgggaaaacgcattgccagatttcataaagaatatcctgatgccaaggaaagctatctcaaagtgaaagccgatttgcgccggttgggggttacgccagaaactacttatctgtacatacaagggcatcatttgttcgataaagtagtggtgcccatgttaaataaagtgtgtgtgcaattaacacaagagcgtgagcgagagattatgcaacaaagcaaacacggaactcaacagcgcaatgaactgacaagttatcgtaactctgtggagaacatttcttccatgttgaagaagaacacggcttacagggagtctgaaccttttcagcgcatctgccaagatatacaaaaatatttcaaatcgtgagctgatacgaggggttacctttctttccgccttgtgtcttgacactgaggtgaggaagtttatcttgttattttcttcgtctaagagtctttatttgtttgtctgcatgctttcgttttttttattataatccctattctgattaaatcgtggagatagggtaggttagccctatgttatattttaacagagcattgctctacgtgaagaagctcgcaaaaaagagttaaaaactaaattacatacgtgtgtatctacgtaaatctatatacttttgtatccagattaaggaattaaatagggataggattcatggcgcaaaatagaattttgtatccattgtaaacgattcctgttttcaaaccaaacaataaataaacaaaatgaagaagattagagcagccatagttggttatggcaatattggaaaatttacggttgaagccgttgaagccgctgaagactttgaattagttggaattgtacgcagacaaggcgcagaaaacaagccagccgaattggcaccttacaaagttgtacaggatattaaagagctcgaaggtgtagatgttgccattttggcaacgccttcacgcagttgtaaagaatatgcagaaaagatattgcccttgggcatcaataccgttgacagttttgatattcatacagatattgtagactatcgcagcgcactaatgcctctctgtaaagaacatcacgctgtaagtatcattagtgcaggctgggatccaggttctgactcggttgttcgcacgttgatgcaaagccttgcacccaaagggttgagctatactaactttggaccaggcatgtcgatgggacacagcgtgtgtgcaagaagcaagaaaggtgtgaagaacgctctctctatgactattcctttgggcgaaggtattcacagacgtatggtgtacgtagagttggaagaaggtgctacactcgatgaggtaaccaaagagataaaagccgacccctattttgcacacgatgaaacgcatgtaatggcagttgactcggttgatgccgtaaaagatatgggacacggtgtacacttagtgcgcaagggagtgagtggtaagacacagaaccaacgcatggagtttagcatgagcattaacaaccctgccttgaccgcacaagttttggttaatgtggcacgtgccagcatgcaccaacaacccggttgttacaccatggtagagatacctgtaatagatttgttggcaggtgaacgagaagatttaataaaggcactggtctaagtgctatttgggtgagacaattttggacaactttgtgaatgacaggttcactcatcaacaaggtcatggtagaagggcaatgctgttgacagcccgataccatgaccttgtttctatgcaaaacatttattacctgtttccctttgtcacttaaagtgctttcttaggatacagcgcatcccaccatgtgctgtcgtttttaagccatttggcaaaccaagcaaaaatagtgttttgccatttttgtcgtttatgatagtcgagtatatggtggttctcaccgtcaactaccacaaaagctgttggtctacccaagagtttcaaagctgtaaacatctgtatgctttcaccaatgggtacgttggtgtctgcactgccatgcaagaacaacaacggtgtgtggattttatccgcatgaaatagcggactttggttcacgtacaattcgggattgctccatggatagctgtttgccatggacacttcgctataactatatccccaataaccttcaccccaatagctggtatggtcgctaatgccagcatgtgaaatggcagcagcaaaaatatcggtttgagtttgcaggtattgagtcatgaatcctccatacgaagcaccaatacatcctattttctttgcattgataaaagcatgttctgctacaaatttcttcgttccttcgataatatcttctgccacacctttgccagctgtattgacatgtcgtgacgagaactcctgcccaaaccctactgcaccactgggctgcaatacatataccacatagcccagtgcggcataggcatgttgtgggtagcgtgtttcaaagttacgactggtgggcgagcaccctccatagtagttgacgatgagcggatattgctgagtagcatcaaaatttggcggcaaataataccttccacaaattgtatctccacgtgaattgacaaaattccaagtcttgcaagcacctaattgaacgtttgccaatgtttcttgattggtgtcttccacaagttttggctgactgcgacgtagatttatcgtataaactcggtcggcattggaggcactctcaccgctataaaccatggttggcgcttgacttgcaaaagcaatttgtttgacaatctcttcgggttgagccatcttttgaattttatgggtacgcatatcgcaccgaaacaagtgaacatagtcacgatccatggcagtaaaatataactgaccatcgtatttattccatctgaacttacttataccaggcttaaaatccttggttaatggcgtcacttttcgattcgcaatattcaaaagatatagttgataatcgtacatactgggtactttcccttgaggaacattcgccccaataccgtgaaatgcttcgggtgatgccattactacgatttcttttccagacggagcgtaagcagcatccgctacaaaaccgtcatccttcaccaattgctctacactcaaagtacgcaagtccatgctgtaaatgttgtacaaggttgtgggtcgctgggtgagacgagtatggttggtcataaacagcaagtgagttccatcggcagagatgtccaacaagctaacgttgcgatagccaaaagtgagcggttggcaaagacctgttgcaaaatcatatttcaacaagcttaccctatcacgccaaccaggctgtcgatcgtcaggctcgagaatctcataaatagctttatcttcctttggtcctttgttttgtttcagcaatataagataatcttctgtgggggatatgacaaaattgcttgttggaagatttgttgctaagacattttcttgacctccattgacatcggtaacaaccaattcacgtccttggttgccttcacgagtccaataatactgcatagaacgcggcatccagtggatagcatgatgggtagatgcaaccactgcacctgacttgagatttgtaactttccaagtataagttgtttttccgcctttcgcgacatcacgataagcagtaattaaatattctcctgaagccgaaagttctacgccagtaacaaagttacggtcagtaagatgacttagcgtgaagacttgatgggttggaccaatgtgcagcaattcgctctgcggtgaatctaattgaagttggagcgtgtccaacggtccattggtagagaggtatttaataacaacatcgtgtgttttaggttcaagtgtcagtttgccatccttgttcaattgcccgtctacatataattgataatgtgtaagtccacctacatggagcatcgcacgtgcatacccatcggactgaatttgaaaacccaacaaatgaagagcacaagcagcgttggcttttggcaagagaggagacgataagaaccgccctcgaaacacttggtgaagatcaactggggtttctaaaattgataacgtatcgtaagtgtgctggcaaacatcgacactgtccaatctataaggtgcttgaacgacaaatggtccagcataccgaattttttggatgggcacatcagcaccgaaagaaaaatcagctgtccataagacagctgataagaggaggaaaaatttgatacctatatttttcatttttcgtgtaatttattgatcaacttcaaacaaaggatcttctggcatcaccatgatgggcttttgctcatattcttttaacagtttggcaggtacatattttttgtgtactaccaatctaaacatatattcattaaaccacttgttcgtcataatgagacaaccttggtgtcctgcactggcaccccagctattctctactttccactttaggggcataccctttacgtcaaggtctactgccgttagtgtcatggcatgggtagagccactttcaaaggtggcaattcggtcagcctttgacatgttaaacgtggttccaaacaaactgctatagtcataattgtctacatcaagatagcctcgcttgcgatcgaactgcttcccaacgtcgtaagagctatacattttatgtccatcttttaagctggcgattgccaactctgcaatctcgttcatggggagatttagatatttccagttatgtccatcgtaggtgtgtcgatcatactctacttcgtaagtttgatgataaggtcttcgagggtcgttcatcagcatgatgaaggttccattcagtggatgacctaccgtagcgttataaaattcacgaggagtataagtttttagtggagttacagtcttcccttctttgttcttaaaggcataagtaaactgctcaacaggcttgcctatcgtcattgacaagatgttataaatggtggaaagcatttctgttttacgagcttctatcgtgcgtttgttctttccagcatgcaccatgcttcgcaactccaatccatattcacgcaatttcgatgccaccatacgtgccatgagtcgagtgttgttgctcgaatacgtctctggcatcacgctcattggcaccagtccatacttttcggctaagtcagccactccacaaaaggtgcctccgtcattgataggattcttgaaaaagaactgcatccgagtgtcttccaatggcttagaggcattgtcaatcactccttggagcatgagatttgccttttccaactggtcatagaagaataaataagcgtgagaaaattctacagttattgtatcattgtgctgtttagcaaagttagctcgcagcacattaaagccagaaaacatccaacagcgtccgctactcttttgatcatgaatactttgctttggcgtttctatactaaaatagtcgtctatagcgccactattggcataattctgtgccagattatcgatgttgttagacgccaaagcattgaagatgcctttggaagactgcgttgagggctgcatacgctctattttttgtaacatatcagccgagataccacctgccctttgggcatacatagctatgctcgaacacaaaagagcagtagccaataagatttttttttgattcataacaggtttcatgttttcggtttcgggattcaaagatacaaaaaacaaatgaaagtccacgtggttcatagaaatttattatctttgcatggatattgttgagaacttattgatgaacaaagataaatttggacttctaaatcagattgattatccagaagacttacgcaaacttagtattgaccagcttccccaaatctgtgacgaactacgtcaagacatcattcaagaggtatctgtcaaccctggacattttgcttcttctttaggagcagtggagctaacggtagctttgcattatgtctttgacactccaaaggataaacttgtttgggacgtaggtcatcaagcctatggccataagatattaacaggtcgaagaaaggctttcaacaccaatcggaagttgcggggtttgcgaccttttcctacgccccttgaaagcgaatatgacacctttacctgtggtcatgcatccaattccatatctgctgccttaggaatggcagtggcagccaaacaaaaccatgaggacaataaaaagattgtagctattattggcgatggtgcaatgagcggaggacttgcctttgaaggacttaacaatgtttcgtccacccccaatgatttattgattgtactcaatgacaacgatatgagcattgatcacgcagtgggtggcatggaaaaatacttgctcacactcgacaccaatgcaacctataacaagcttaggtttaaggcttcgcagtggttacaccaacgaggataccttgatgacaaacgtaaaaaaggaatcttaaggctcaacaatgctattaaatctgccatcagccaccaacagaacgtgtttgaaggcatgaacatacgctatttcggtccttttgacggacacaacatcaaggagattgtacgtatccttcaacagttaaaagaaatgaggggtcctaaattattacaccttcataccaccaaggggaaaggctataagcctgcagagctgtcgcaaatagaatttcatgcgcccggaaagttcaacattgaaacagggcaaaggatacagcaagataacgataaccaagctcctaaatatcaagacgtctttggagacacgttagtagaattggcaaagctgaacccaaagattgttggcattacgccagcgatgcccacaggatgttctatgaacaaactgattgacgtgatgcccgaccgtgccttcgatgttggaatagccgaaggtcatgccgtaaccttttcgggagggttagccaaagaagggatgatgccattttgcaatatctacagttcgttttcacagcgtgcctacgataacatcatacacgatttggctatcttaaacttacctgttgtgctatgtttagatcgcgcaggacttgtaggtgaagatggtgcaacgcatcatggcatgtttgatatagcggcattgcgacccattccccacctaacgattgcagcgcctatggatgagagagagctgagacggctgatgtacactgcccagttacccaacaaaggaacgtttgtgatacgctatcctcgtggaagaggtgtacataccgattggaaatgtccattagaagaaatcaaagtaggtactggcagaagattgaggagcggaaaagatttggcgattctatcgatagggccagtgggaaacgatgtggaaaaagtcctcgacactcttggttcgctttattctatcgcccactatgacatgcggtttgtaaaacctttagatgaaacattattagaagaggtgggcaaacacttccaaaaagtcatcacgatagaagacggaatccgcatgggtggatttggttcagcagtgttggaatggttcaatgatcacggatatgatattcaggtaaagcgaatgggcatccctgaccagtttgttgaacatggaagcgtagatgaactcaaagctctgacgggcattgatacagcgcatatccaacacaccattcaagatctactatcggcagaaacaatgccttcttaggcttatataattcatttcttaaggagtttatcaatatgaaaatcatcatcagtggtgcatacgctatcggtacccatcttgcaaaaatgctatctcgcaatcatgaagatattaccttgcttgatgaggctgaagataggttggcgcaaatagggtccaactttgacttgctcaccatgcaagcatcgcccagcagtatcaaggctttgcgtgcggctggagcagaccacgctgatttatttatttctgttacccccgatcagagtctcaatatcacctcttgtgtcttagccaaagcgttaggcgcgaaaaagacagtagcgatgatcaataatagtgagtatacggatccagagctacaagctttttttgcagatttgggagtaagttcccttatttatccagagaaattggcagccattgacatcatcaatgggcttaagatgtcatgggtgcgtcaacgatgggatgttcatcatggtgcgttggtgatgcttgccattaaattaagagagacctgcgagatattaaacaaccctctcaagaacctctgtggtcctgatgatccctaccatgtggtagccattaaacggttaaatgatactattattcctggaggtaacgacgagctgaagctttacgaccttgtatatttcatgaccacaccacaatatattccttatattcgtaagattgtagggaaagaactatatgcagatgtgaaaaatgtcatgatgatgggaggaggttcgacagccgttcgtgcagtaaatacgatgccagaatatatggataccaaggtattggaaatcagtgaagagcgctgcgaacaactcaataacctcatggataatgataaagcgttgattattaacggtgacggaagagatattcagctattacaagaagaggggattacgaatacacaagcttttgtggcgttgacagacaatgccgaaaccaacatcttggcttgtcttacagctaagcgactgggtgtgagaaaaacagttgccatggtggaaaacgtagactatatcaatatggcagagagcttagatattggtacgatcattaacaaaaaggcaattgcggcaagccatatctatcagattatgcttgatgacaatgtgatgaatatgagatttctgaccactgcgaacgccgatgtagccgagtttgtggctaaagagaagtcaagagtgaccaaaaaaacggtcaaggatttaggattacccaagggtacaacgattggaggtttggtgagaaacgatgaaggtatgctggtttcgggtcacacccaaatattagcaggtgatattgtcgttgtattttgtcacaatgtaaatatgaaaaccattgaaaagttttttatatagcatttcaaagtcatagaaaatgatcaatcttcgttctgtttacaaggtcataggctcgcttcttttcatagaagcctttatcctatttgtctgtttcgtcatggcatttagttatggagaagatgatgctatggcttttatcatctctgtcattattacgcttttcgtagccttcatactgaaatacttaggtcgtgcatccaacaactcattgtctcggcgtgacgcctatcttgtggtaaccttgtcatggattgtttttagccttttcggcacacttccattcaccttcagtggctatattccaaattttacaaatgcgtattttgaaaacatgtctggtttcactacaacgggtgcaaccattcttgataatgtagaggctcttccacatgccctccttttttggcgttctatcacccaatggattggtggattgggcatcgtgttctttactgtagccttgttaccatccatggtgggtggctctgtcaaggtgtttgctgccgaagcaacgggacccataaagacaaagttagccccaaaactctccaccagtgccaagtggatattgtccgtctaccttgtcttaacagtagcctgtatgggcagttacatgttttttggcatgaactggttcgacgctctcaattatgctatgacctcgacagcgacaggtggcttttcaactcacaacagtagtaccgagttctttcactcgccagcgatagaatatatgtgtacactcttttgtttcttgtcgggtgtcaacttcacactcttatatgtatctgttgctaaattaaggataagagacttgtttagaaactccgaattcaagttttacatttctctgattagtatctttagccttttcattatgcttgagctcatctttaggcgtggttacgacgttgagcctgcattccgatcgggcatctttcaagtcgtttcttttatcactaccacaggactattcaatgacgatgctgggcaatggccacatgttacatgggttatccttgcaatctgcatgtttatgggtgcttgctcggggtctaccagtggaggtgttaaatgtataaggggtgtgatgctgttgaaaacgattcgcaacgaatttagacaaatacttcatcccaatgcggttttaccactcaagattgacaaaacaaatattccctatcaaaaacggggaacactcttagctttcgttacgatgtacctcatactttgcgtattggcatcattcgcactgatggtagcccatatcgacagtaccaactctatcactatcatcctgagctgcttaggtaacgttggtcccaccttgggattggaaataggaccaaccatgagttggaacattcttccaaattatatcaaatggatttgtgccctcatgatgctcgtcggacgtttggaaatctttagtgtgttagtgattttaacacccgagttttggaaaaagaattaacatatcatttcaatagatttagtaaaatatctaacttatgaaaccattaaaattcaatgcgttccttaaacaaacaatatggggcggtaacaagattattccgtttaagcatttagatagccaattagaaaatgtgggtgagagttgggaaatttctggcgttaaagatcaccaaaccatcgttagtgaaggagaatatgcagggcgtgccttaaatgaagttgtagaagaattgaagggcaaactcataggagaatctaactatgagcagtttggcaatgaatttccactcctcattaagtttatcgatgctcgtcaggatttgtccatacaagttcaccctactgatgaaattgcaaagaaacaaggtaaatcacgtggcaagacagaaatgtggtatatcatggattctgacaaagatgcacatttgcgcagtggcttaaaaaagaagataacacctgccgagtataaagaaatggtagaaaatgataccatccttgatgcaatagccgactactcggtaaaagaaggcgattgcttctttttgccagcaggacggattcacagcattggtaagggatgcttcttggcagagattcagcaaacttcagacgtaacctatcgtatttacgactttaagcgcaaagacaagaacgggaactatcgagagttgcacacagacttggctgctgaatgcataaattacgaggtgttgaacgactatcgaactgtctatacatcacaaaaaaatcaaggtgtgagccttgttcactgtccttattttcataccgcagtgtacgatttagacgagcccatgacactggattatagcgaattggatagttttgtaatccttataggcgtaaaaggagaaggcaccattgttgacaatgagggtgatgaaacatcattacgggctggcgaaacgattctgattccagctactaccaatgaattaaaagtaaatggaacggtgaaatttttggaaacttacgtatagttttcagacattcatataaagataacgtgcaagacctatatcccatatttaccaaggatataggtctttcttttggttagaggtgtaactacctttctttatatacccactgtggatgattggagcatagagtagatgcttaaaacatagatcatgagctttaagttggttgaatgtttttgaggatagttgttaatatatggtatgataagatgttgcgatactaataaaaaacactgaagctattgaattttttgcgcaacgtattttcaccttttccttttgtactttctacccataggagcaatatcttgccatggatagcgttatctttcatgtatatacacaaataaataaggtatgatagaatatattcggggtgaattaacagaattaactcctgctcaagctgtactcgaggcggctggtattggctatagcttaaatatttcattgaacacttacagtgccattcaaggcaagaaagaagtgaagttgtatgtccatgaatcgctcgtaacaggtggaagagatgacaattttacattctatggtttttattctaagcaagaacgtgatctgtatcgcatgttgataaccgtttcgggtgtaggggctaacacggctcggatgatactctccaccatttctcctgccgaattgtgcaacgtgatagcaaatggagatgagcgaatgttgaagtctgtcaagggaataggattaaagacagcacaacgcatcattgtagatttgaaggataagattgtaagtagtggcatcgctaccgagctacacgtgagcgatcagccgcagaatatggtgcatagtggcattcgtgatgaggctgtaagtgcgctcactatgttaggtttctcgcccgcaccgagtgcgaaggtcgtagaatctattctaaaggagagtgattcgatgcctgtagaacaagttgtaaaactggcactgagtcgcataaaataaaacaagttcgacaaatcgtcaagctgaggacgcagcggaagcatggagttgagaagacgtatttatagtttgctgctggtgttactcgtcatgagtatggcgggatatgcctttactttaccttattggcaaggtagaggtgtacagcgtgtgcaacaacagtctcctcaaaagccccaaaaacgcaataagaaagataccgttcaggtgaaggtgcagcccgaaatcgaggatgaaacccatatacccgactctcttttacatccaagatggaaaatacagcgcaccactcctgtcatattcgacgacttagaggaaagtcctttagacttaaagcgtcccagaaatctgaaccaagatgtggtttataatgacacgttgaaccggtatatctttggatctaagattggtaactcttgggtgaatgctcctattatgatgacacctcaagaatatcgcaagtggagtgagcaacaactcattaagcaatactttaggacaaagaacgcagaagttttcgagaaaaaaggaaaagagaagttcgacttcaccgatatgcactttgatttaggaccagctgagaagatttttggacctggaggagtgcgtatcaagacacaaggtacggcagaactaaagtttggtggaacgataaaaaagattgacaacccatctttgcctatccgaaaccgaaagatgaccacaatgaactttgatgaaaaaatcaatctgaatgtcaacggtagggttggagataaggtgaatatgaacttgaactacaacactgacgctacattcgactttgatgcgcagaacatgaagttgaagtacgacggcaaggaggatgaaatcatcaaactggtagaagctggtaacgtatcgtttccctctaactcgtcgctcattaagggtgctagttctttgttcggacttcgtaccgacatgcaatttggtaagctaaagttgcagatggtggcatcacaaaagaaatcatctgacaagaccgtatcttcaaaaggcggcaaacagtttacgccttttgaaataaatgtggcgaattatgaagagaataggcacttctttttgtcacaatatttccgcaagcagtatgatgaaaacatgaaatcgttacccaacatcacctctggggtaaagattaaccgcatggagatatgggtaaccaacaactcgggggtgacgacgaacactcgtaatattatagccttcactgatttgggtgagaatgaaaaggtgtcaaatcctttatggaataccaccatgcagaaggttccatctaatcaggcaaacaacgtatattctaccattgtaaacacttatggcattgtgcgtaacatcgaccaagctaactcggtattaacatctgctggattagtaggaggcgtggactatgaaaagctggaacgggctcgtttactcaatccttcggaatacaaagtgaataccgccttgggctatgtgtcgttgaaaactggtctgcaaaccgatcaggtattagcagtggcgtacgaatatacgtatggaggaacaacgtttcaggtgggcgaatttgccagtgatgtgaccgatgtcaatgccgcattgttcgtaaagtcattaaaaaataccagcaataacccacagcagggcaactgggacttgatgatgaaaaacgtctatgaattaggtaattctatcgaacgtgagaaatttagattagatgtgaagtatcaaagcgatacggcaggcgtttatcttacttatatcccagaagcacaagtgaaaaatcagcctatcataagactgttaggtgctgaccgtttggacaataacaacaaggtgcacagcaacggttattttgactatgtagaaggatataccgtgagtgatgggcgtgtgttctttccaaaggtggaaccttttgggagttttatcctcaattatcttagagacaagggcgttcagcatccagagaaatatgcttttaccgaactgtatgattcgacaaagacagtagccaaacaaattgccgagaagaataaatacgtactcatggggcagtatcgaggttcagccgctaatgttatctctttaggggcatacaatgttcctcaaggttcggtcgtggtaacggcaggaggagtgcgacttacagagaatgctgactattctgtagactacgcagcaggtgaggtcaccatcttgaacaaaagtatcttggatgcggggacaaatgtcaatgtttctttagagagtaatacagactttgcacaggaacgcaaaacgatgttcggacttaattgggagtacgattttagcaaagactttcagttgagtggtactgtacaacatttgtctgagcaagcactgacgaacaaggtaaatatgggggcagagccgctcaacaatactctttggggagttaaccttaattggaaaaaagaaagtcagtggctcacaagtctgttagataaaatacccttcttgcatcttacacaaccttcgcacatttcattcaatgccgaatttgcacaactcattgcagggcagagccacggtacacaagacaatgcctcatacttggacgactttgagaatacaactacaaagatagatgtttctacaccaacctcgtgggtcatgtcgagcgtgccttccatgttcccagagcatagcgacaagaccaccttgcgtagcggatttaaccggtcgttgctggcatggtacaccatagaccctctgtttactcgtcgtagcagttcactgacgcccggccatatcaaaagtgatttggaacagttgtctaaccattatgtgcgcgaggtgtatgtgcgtgagttgtatcccaatcgagatcaaagcagttatagtggtgctaccgcaacaatccctatcctaaacttggcgtattatcctgccgaacgagggccatataatttcaatcctgaccttactgccgatggcttcttgaaccatccgcaagagaaatggggaggaatgatgcgaaaattagattatagtgatttcgaagcgtccaacatcgagtacatagaattttggatgctcgacccatttatctataccagaagagacggaacggctcatcagtatggtggagacttttatatcaacctcggagaggtgagtgaagatatattgcacgatggcaaaaagttttatgagagcggactccccgtcgacggaagtcaagcctttacgacaacgcaatggggtaaagtacccacacaacccagcgttacttatgcctttgcaacgagcaagggagcaagggctttgcaggatttaggtttcaatggactgaccaatgaggaagagaaaaactttgccgcttatcaagatttcttacgtcaaatacaaggaaaggtaaaccctgctgtgtttgaagccattttgaaagatgtagcaaacgatgattatcattatttccgtgggcgtgattatgatgagatgcaagcctctattctgcgtcgttacaagtatatcaacaatccgcaaggtaattcgcccgatacagaaaatcgtagtgagcgttacgacacctcttataaaagtatgcctgatgtggaagacatcaaccaagattatactttgaacgaatatgagaagtactttcagtaccacatttctattcgtccagaagacttggtggtgggacaaaatcacattgtagacaaacgagaagcaactgcgcctttgcgtaacaagaagaatgaaaaggtgacttggtatcaatttcgcattcctattcgtgactttgaacgccgatttggctccatttccgactttaccagcattcgtttcatgcgtatgtttttaacaggatttgaaaagcccatcgtacttcgctttggtagtcttgaccttgtgcgtggcgactggcgtatctatcagcaacaactcgacccctcttctgcccaaacgggtacgatgtcggtaagttcggttaacatagaggagaacaatgacaagtcacctgtcaactatgtgttgcctccaggcatcgttcgcgcacaagatccaacccagcgacagttagtagaagcgaacgagcaagcattagacttggtcgttcatcacttggcaactggcgagtcgaaggcggtctataaaaacacgtctgtcgacttgcggcagtacaagcgtatgcaaatgtttgtgcatgccaatgccatggagcagaacaccactaatctgcaagacaatcagttggctgtcttcgtgcgattggggaacgattacaaaagcaattactatgagtatgaaataccgttgcgattaacagaacctggtgtgtacgaccgttattcgcttgcttcggtgcgaaaagtttggcccgaggaaaatatgttagatattccacttacggtatttacggaagtaaagaaagatagaaacaaggcgaaggcgcagggacaagcatcatacaatcgagtatttacctcttatgatgcagagtgtccgaataacaaggttagcgtaatgggtaatccaacgcttggtgaagtaaagacgatgatgattggcgtacgcaacaagtcgggcgaggtgaagtcgggtgaggtgtgggtgaacgaacttcgcctattggaatacaacaacgaaggaggctgggcggcacaaggaaacttaaatgtgcagttgtctgattttggtacttttaatgtacagggacgttatatgagcgaaggatttggcggtttggaagagggagtggaccagcgttctaaggacgattatcaaaactacagcgtcacagccaaccttgaattgggcaagttctttcctgacaaggcaaaggtgagtgcgcctttgtattacagtagacaggaagaacaggtaagcccaaagtacaatccactcgatacggacatgcgcttgcaagacgctttagatgccatgggaagtcagcaggaacgcgattctatacaaagcattgctgtgacgaaaaccaccaacaccaacttttcattgtcaaatgtgcgagtgggcatccaaaccaagcgtcacccgatgccctacgatcctgccaatttctcgttctcgtatagtcatgctcatcgatatagcagtggaaagactaccgtttacgagaaagaagacaactggatgggtagcctttcttataattggtctcctgtctacaaacctttagagccattcaaatttattaaaagtcgtagcaaatggtacgatatcttgaagcgttttggattgaattggctaccacaaagtgtagcattcaacacagatatgtctcgtaactattatgaattgcaagaacgtgacatgcaagatttgggcggttcacaactcccattgacctttaatcagcagtttatgtggaacagagattttacgctacgctgggatctcacgaagaatatacacatgaactttcagagtgcaacgcatgcagagatagaagagccctatacccctgtgaacaaagacctcttcccagatagatattcagcatggaaagactcggttcgcaccagcattcgcaatcttgggactcctttagactatcagcaacgattctctttgtcttatcagttgccactcaatctcatccctattttcgattgggtgcgagcagatgccaactatgccgctaactatacatgggtgcgaggcactatgttggaagatggcacatcgttaggaaacacggtgaccaccaatcggagtatgaatctgaatggtaattttgaccttcagcgattgtataatcatattccattccttaagaaagcgaatgatagatttaataaagagccgcagcgtcgtcagacaagaggaaggaactcgcgaatggtgaagcaagataaaaaacaatccaccacacagaaagctactgtacaagatgctcaagctgaagcccagaagcgtgccttgccaaagaaccaaaaaggctttcaacaagaaatcgtgctgttgcccgatacctttattaccgtgaaacatggtaagcaaaccaaacgcctgatagtgtcggcaaaggcggaaaatggaaaatcttacccccttcgttatcaaaaaatcgacaataatacaattcgtatcaagaataaggtagactctgcacttcatctaaagataactgtggcagcaaaagagccactcgaaaacaaaggctggtataaggcggctcaatcggtggcacgcctgatgatgatggtgcgtagcgtggggttgagttatcgcaacgactatgcgttggcgttacctggctttatgcccattgttggcgatgcctttggacaaaaccgtacccccagtgcgctttcacccggtcttgattttgcctttggtttcgtagacgatgggtatatagagcgagctcgagactaccattggctgctgatgtccgactcgatagcgacacctgccacttctaatcgtactgaagatttgcaattacgaatgacgttagagccagtgcgcaacttcaaaatcgaccttcatgccagcagaaccaagaccatgggaaagagtgtacaatacatgtacgaaggaaatcctaccgttctcagtggcaactttaccatgaccaccatctcacttcgtagcgcattcgaaggaatgggcaacgccaacaacggtttctttagccaatcgttcgttgatttctgccagtcgttagagggcttccgtcatcgtgtggaggcacaatatcagggcgctacctatcctcgtggaacttccttggctggagaaacatacaatgctgctaatggtggggtgaacaagtatggctctgatgtgatggttcctgctttcttaaatacctataccagtatgggtggacattctttagccctcttcccagccattacacggttgcttccaaactggaccattcgctatagtggactgggcaagttgccatggtttcaagatgtgttcaaaagtgttacgttgaatcatgcttataaaagcgtcttcgccattggctcttttagtagttttagtaccttccaagaatacatgaatggattgggatttatcacagaccccactacagcagctccaatccccagcagcatatacaacatttcgatggtgagtatcaacgaagctttctctccattactcggtgtggacgtgactcttcacaataaccttaccgccaagttggaatatcgttctacgagagtgttaagtctgagtacaaccagtgtgcaaattaacgaagccatcagtcgtgactgggttttgggattggcttatcgaatcaatgaccttcatctttttgatagtggtagaaatcgcaggatgagccgcaaccgaaacaagcaacagcaggcacaaaccactacggctacaagtaacaacacaacttcgaaccgaggactgaaccttcgattggattgtagttatcgccgacaggcaagtattagtcgtgatattgccactatgacaagtatggcaacgggcggaaatacagcttttaagttccagttctctgccgattataatttgtctaagctcatgacgatgacgatgtattatgatcagcaagtcaacaatccgctgctttcgagcaatagttatcccaccacgacgcacgattttggcatcagtttgaagttaagtctga

SEQ ID NO: 102 - DNA, 99125 bp, Prevotella timonensis
  source 1..99125: mol_type = genomic DNA
gtattaggccgtctttcaacgggttatcccgtagttatgggaaggttggatacgcgttactcacccgtgcgccagtcgtcatcaaggaaagcaagctttcctcatgttaccctgcgacttgcatgtgttaagcctgtagctagcgttcatcctgagccaggatcaaactctacattgtaaaatataattgaaatggaaaagataaaacatataaagctaacgccatatacatctatctcagccaacttcgttgtctctgttcagaacgaaactccagaatttaaaagtattctcaccttagttcttttctaatgaattgaacggttcgtaaaacttgttacctatgtatttatgcttcaagaaaactcatcaactcgtctcctcatcaacttgttaactcgttaactcgtcacctcgtttcctaaaaagccatacatgcttcttgtactacttctgtcttatgtaaatctttttcaaagaacgcttctttatcgccccgaagaatgtttcattttcgtttcattctcgaaagcggatgcaaaagtacaaactttacgactaacttccaaatatttttcaagaaaagttttagaaatttgcagaaattgatttatatcaagggaggttataggttttttagttgacgagttcacgagttcacgagttgacaagttgatgagtgtataaggtttttagttgacgagttcacgagttgacaagttgacgagctgatgagtttccgagtttttctaaagcatgttaacaacgccgctatctacatacaatagaccgactattacattactttagtgcctttatctccatgttccaacaacgccaactgtcgaatcatgcaacctacctgtcgaatcatgcaacgtcacctgccgactcatgcaacgtcacctgccgacttgcgcaacctcagctaccaactcatgcaacatcagctgccaactcatgcaacgtcagctgtcgaatcgtgcaacctcacctgccaactcatgcaacgtcagctgtcgaatcgtgcaacctcacctgccgactcatgtaacgccaactgccgactcgagatttgagtagacgatttatttcctttctgaaaaaactttacaaaacgtcgacgtcggcgatctcacgcgcgcttcgtcgtcggattattgatattattgatattattgatattattgatatataagggacggggtctgattatcaacgagttaagaggggtaaaattgaacggttcttcaacggttctctcacggttgttcaacgaacaattcatttccaacgaaaaaatgaacccatgaagaccccttttttatggtaaaaaaagaagacaaacatcatgaaatctgtcacgaaaaaacatctcaatgaacgaagagaaaatggtgtgcctctctcacaagcatgcttatacctaattataataaggttatgcgcttttgtcaaactcttttcgttctttcaattccgttgttgaaacaaaagctaatatccacgccaaagatgataatataggcatgaatgctcagatttcactgtcgtggaagttccagattatcaatgacctaacgatgtttggttgttgtggcaatcagcagcatgaaatgaataccaacaactgggtatgggatgcccaaataatctacaatctcattaaaggttggttctataaattaccaccgtattattgtgagtaaattttacgaaatacgttttgttaccttttggattctttttggctcaaaatataagttcgctcagtcgtgtagcccgctacactcctttgctcacttacattttgatctcaaaaataagtccaaaatctaacaaaactaatttatagaaccagcctaaagggagactcatgactaagcctaaggatttaaatctattgcatcagctctccaatacgcaatacacgatgaattaacagggggtggtcacattcattattcttcttatttttgttcaaatctacccaagttaagatacaatacagttatacgtacctgttcgaaccattgttggcatcatcatatttaggtatttatgagtatagtcttggtttagtttttcattacacgttttgtttttgtaactttgcaacaaaattagcacccgcaatgaaattatcagaattaaaagaaggagaatcaggagtcattgtcaaagtcacaggccatggcggtttcaggaaacgcatcgttgaaatgggctttatcagtggtcaaaaagttgaagtcttgatcaatgcacctctaaaagatcccgttaaatatagaataatgggatatgaagtttctcttagacactctgaagctgaaatgattgaagtggttggtattgacgagtcagagactttgacttcgcaaccctcttggtaccaagcaggtgtgccctgtgaatgcaaaaacgactcccaatccgtaacagacgagcaattgcatgccatggcgatgaaaaaaagaaaagttatcaatgtggctttggtgggaaatcccaattgtggtaagacatctcttttcaattatgcttctggagctcatgaacgtgtgggtaattattcgggtgttacggtagatgctaaggaaggttacgccagttttgaaggctatcggtttaacattattgaccttcctggaacctattccctatccgcttattcaccagaagagttatatgttcgaaaacaaattgttgaaaatacaccagatgtaatcatcaatgtgattgacagttctaacttagagcgaaacttgtacttaacaacgcaacttattgatatgcatctacgtattgtatgtgcgttaaatatgtttgatgaatcagaagagcgtggtgaccatattgatttcaatcaactgggtgaacttttgggcataccgatggtacccactgttttcaaaacaggaagaggtgtagaagaactttttcaccaagtgattgagctatacgaaggcaaagaagatgtgagcttgcaatataggcatattcatattaattatggccacgaaatagaacaagggattaccaatattcagaattatctgaagcaaaatgatagcttgcgcttaaaatattctaccagatatttaagtattaaacttttggagtttgataaaaaggctgaacaagttgtgagtcaactgccacaggctgaaaacattttcaaagcaagggacaaggctgcgcaacgtgtaaaggaagaaacaaatacggatagtgagacagctattatggatgcaaaatatgggttcatacatggagctttacaagaagcacaatatgaaaccggtcatgtgaaagatacctaccaactgacacattggatagatcgtatcattacccataaatattttggctttcctatttttatcgctttaacctggcttatgtttgaagttaccttctccttagggcagtaccccatggactggatagaagatggtgtaggctggttgggtgacatcatttcacaacacttcccacaaggtcccatcaaagatatgttggttgatggcgttataggtggcgtgggcgctgtcatcgtattcttaccccaaatattgattctatattgcttcatttcctttatggaggatagtggttatatggcaagagcggcatttattatggacaagctcatgcacaagatgggacttcatggaaagtctttcatccctttgatcatggggtttggttgtaatgtgccagcagtgatggcaacccgtacgattgagagccggaaatcaaggcttatcaccatgcttattcttcctatgataagctgttctgccagattacccgtttatatcatgattattggaaccttctttgccgctcaatatcggtcgtctatcatgatatccatctatatcatcggaatattgatggctgttattttaggaagactatttagtcaatttgtcattaaaggagaagacacaccctttgtcatggagctgcccccctatcgttttcctacggggaaagctatcctacgacacacttgggaaaagggaaagcaatatttgaagaaaatgggaggtatcatccttgtagcaagcattttagtttgggcattaggatactttccaaaaaacgaacatcttagcaagagtaaacaacaagagatgagctatatcgggcgtataggcaaaacgcttgaacccatattcagaccacagggatttaactggaaactggacgttggtatcattgcaggagttggtgcaaaggagattgttgcttcgactattggagtactctattcatcagatgaagactatggcgatgatgactcatattcaacggatactagcaaatacacgcaactgagacaccaaatggcagccgatggcatcactcctttaagcgcttacgcttttttactcttcgtgttactctatttcccctgtatagcagtaatcgcagctattaaatcagaaacaggtagctggaagtgggctttattttctgccttctacaccactctattagcttggattgtctctgcgacattctatcaagtgggattattgttttattgatgtgcggaatgtgaaaatagtaggatacagaatttttataaaaaaatcttgaattgtttggatgttcaagaaaaacaatgtacctttgcactcgcaaaaaagaaatatgcacccttagctcagttggtagagcaactgactcttaatcagtgggtctagggttcgaatccctaagggtgtacttctttcgattgcacccttagctcagttggtagagcaactgactcttaatcagtgggtctagggttcgaatccctaagggtgtacaacaagagggtgtatcataattctgctttatgatacaccctctatttgaaatcactcatgatactgtttctcggttgcaagaacttggagcctatggtattcccgtatagtttgagagagatttccaacttttcctttatccgttgcatgcacaagggcatccatttttctgtatttttcttctaaagaaaaagcattttttattcatatgggcttatatatcgcaatttttttgtaaatttgatatcataaattggatatatggcatttgaaaactgcgaatcaattttatacgcgaggtatcattctaattcaaaagttgactcttccacgttgataaattgtcctataagccaagaaaaatcatatgagtaacaactataaaaaacatagaatatgaaaaaaattgttttattgacagctgctgtctgtttaacatctgtagcattcgggcagaatgcaagttcttcttccgtagatgaatacgagtgcatctacgagtatcaagtaaaaaacaccaaaggttctattgatgcgacctctaccatacttcaaattggcagaaacacagcaaagttttctgattataccacctttcaagtagactcagccatagcttgcaaagctcccgaagctgacattcagaagtacaaggcacaagaaatgagaaacgacatgctcttcgaccagtctgtttcccaaaatgaacctaaaggtaagttgactgtttatagtgtcatcacaccgaattattacagttataccgagagcgccacacccatcaagtggaacctttcagaagaaactgacacgatctgtggatacacttgtcaaaaggcagtgggagaatatggtggcagaacatggacggtttggtattcttctgaaatacctgtttcctttggaccttggaaactttgcggtctgcctggattggtattggcggctaacgatgcagaaaacatacatcagttcaaggcaatcacattccgaaaatccaacactccgatgaacttgaaaccatacgccaataccatcaatatttcaagagaacaattcattaaagcaaagaacaagtttgagataaatccgatggacaacatccccgtggaagccatcagcgagatgagcgttcagaaattcgataacggcgaatataaaaccttggtcaatggtgtggtgctgagagttcgccctaacggatatgttccgctggaattgaagtaaacattgggcatcgatgaataggcgaatattcttgactttcatgctgttgacttacctctgtaactcctctttttcccaaagtgtagttacaggaatagtgcgtgataccactggtttggctttggaaggagtcatcgtaaaggctactgctgacaaagcaactttagcttttgcacgaacatcagaaaaggggacttatcagttaacgctgaagacagatgccaaacagctcatcatcacagccgaaaccattggatatgagaaagccaagagagaggtcaagaatatctcacagaagtgcgacttcatcctgaaagagaaaacaactgcattaaaagaagtcgtggtaaaagctcccgccatctaccaacgaggtgacaccctgacttacaacttagcctcatatacaggaaagaatgactacactttgaaagaagccttgaagaagctcccaggcattgaagttgaggacaaaggttccatcaaatatctgggcaaggagatttctaacttttatattgatggcatggatttgttgggtggacgatataacatagcaaccactaatattcctgcttcgtttgtaaactccgtgcaagtgctgagcaaccatcaagctgtgaaagccaaaaaggatgtcttttccgacaacgtagcaatcaatgtcaacataagcaacaaggctaagttcaaacccgttggctcttatggtgggtcgcttggtgtgggtaagcatactttgtatgaactgaatggcgcaggaatgctcttcatgtcaaacttccaaatgttggcttcactaaaggctggcaacatcaatcagtttgctttgacagacggaaccaatcactttgccaatagagaaacatcatctacagtgtctaatttattagggaatatttcggcttccacacctcctattgatgtcgacagatatgcctcgccaacagacaggttggtgtcgttcaacctattgaaaaagattcataaggatgttaccttaaaagggaatataggatatagttatgccaaaagcaagtatgactatagtttgacgagaaattatgcggatgcagatcatcatatcatgattgcccaagcgtattcacctctattaactgtacatcgtccgagcattctgttggaatataaagacaattcggataagacttatctcagaaacactttgtctggcacaggttcttttctaacatcagaattgccaacaagggaaaacgggttactctttaaccaaaagcaaaccatgcgagagtttcatgtaaacaacaagttctccaccttgtggtatcacaagaatttgcgttggtcggttacatctgtcatgtcatatcaaggttcgcctatgggaaagataacgcttgacaaggaaactgccggtgatgtggtgcaaaatgccaatggacaaaagttccaaacagagaataccatctctgtatcgaagaaacatctaaactctcgcatctatttgccattgttgttgaactactatatagataaggtgaagacgaacttgcagccgacagatgaaggcaacgacgtgagtatgcagaacctcagaatgacattggcgccacaatatgagtattcgcatccgcaatacagatatgtttttcgattgggaataccgatgcgcatagactatatagctcatagagaccacatggcggcatcatcgtctggctcttggtattattctatttgcccaagcgtgtatggcaactataaggtaagctccctttctgtgctgcgtaccaacctgttctatgcccgtaactttggcgacattctggacttcttaaaagcacctgtcagaatcaatgatacctcgctgaaaattggttctggtatattggcagacaacaaaagtttgaatgccacgcttcattacgactataagataccactgaaaatgtggttcctcaatgtagaccttctttatagccaggaaaagaacaacttgcttttgaaccaagacgcaaactcaacgctcgtcaccatgtcgaaaatatacgcctcaaatacaggaagaagtttgatggagcaaatcggtatcaccaaatttatagagcctatcaagaccaaaatttcagtaaatggtgtttaccaatggaaacgacaaacgactttgcagaataatgttcagcagaaatacacctggaaaagttggattattgctccaaaactaacttcacaaccctgtaagtatgtggagttagattatcatggaatgtttgccaagacttatctttctacagagcatcagagcaacagctatttgagccaacagcacaaggtgtctttgaaaatcatgcctctcgatggcttcacattcgacacctctgctgatattgtcaagaatgaattgacgaaagatgtaacaaaggtaatgagcttattggatatgggattatcctatcgaaagaaagctgtcaaggtttcccttgacatcagaaacattctgaaccaacaacaatatggatataccatctacaactctgtcaatacatttacctataactatcaattgagaggaagagagtgtgtttgctccgtaaaattaaccatgtgagtcttacatgacaagtgttgcaaaagtgagttttattatttctcgattctgaagaggaattcagccattgacagcaaagattttgaatgttaaacaaaaaatattgactatgaagaatctactattaagcgccgcaattggcgacatagcaggaatgccttacgaatttgaaaatcgaactaaaaattataatgcggtcgatttactactttcatcaaatacttataccgatgatactgtctgcacgtttgcatgtgcggaagcacttataaagaatttggatatggcagaaaacctttggaagagatgccgtgcagacttatatcgtggatttggcggacgatttgcaagatggctgatttccaatgatattcaacctccgtataattcctttggcaatggcagtgcgatgagggtttcatcggctggatttatggctaaggatgccaaagaatgtatagaactggctacactgacggcgatgcctacccataatcatcccgagggagttaaaggagcagtagcaaccgccttggctatattctacggtatgcaagggcaaaacaaagattttattcgagagcatgtgcttgaaaaatactacccaaattggtcggacttgacctatcaaggtataaaacccaactatgactttgatgagacctgccaacagactgtccctactgcccttatttgctttttagaaagcgcagattatgcggactgtttgaagttggcaattgccttaggcggtgatgcagacactttggctgccatttctggtcccatggcatacgctttttacaagaccatgccacaagaattgattgataacgcaatcgcgaaacttcctgaatggatgcttcaagtgaacaaacaatttgacgagtttgtgagcaaataacgaatagtgaatgtaacatccccattcattttatagtacaacgcttttgtgttgcatcgttcaacccctcggtataaaagagtgaatacaaaaaaaaattgattgtctcacgacaatcaatcttcattaaccttaataatctaataccatgaaaaacacaatgcaaaggtacaaatattattgttacctacaagttttctatggatatattatgttttctaacataaattaaatctttcaatattccagttaagcttcatttgcatgcataaaaaaacgtgattagatttggaaaatcttctaaaaaggtccaaaggttaattccgtattccagttgccttgtcgctttgcaactgaaatagtgaacaagtgccctatccccttaggagatatcccacccttgtaaaagtacaaaccatcttcataatcttctgcaagagagtagtttttcttgaaagcttctgacaacctacttaaatctttgaccgctgcagctttattttttgcatagataaaaaaacgggcttcattgaacttggcggctttgaatttaaacaatactttatcaaaaacaaatcctctatatgataaatttctgaacaataccgtatcttggttcactatgttaggctttccaaattctgtccgtatagaatcaagtgcttgctcgtaatccattcccatcgtgacatttccaaccttagcacctctttcggcataagtatttgtagccaaaataagactaaaaataatcactaaaaatctcgataacatatttttattgtcctcatatttacgtttgaggtagccttgcgaatgcaagactacctaaacatatttacaaaagtttcttctccctattcctcgactgctgcctgcgcggctgctaatctggcaataggaactcggaaaggtgagcaactcacgtaatcaagtcctacacgatggcagaatttaacagacgatggttctccaccatgttcaccacagataccacacatcaagtttttacgtgtggaacgtcctttctctacagccattttaattaactgcccaacgccacgttgatcaagtacttggaaaggatctactttcaaaatcttcttttccaaatatacaggtaagaagctggcaatatcatctcggctataaccaaacgtcatctgagttaggtcattcgtaccaaagctaaagtattccgcacgtttggcaatgagatctgctgtcaaagctgcacgtggtatctcaatcattgttccaatgtggaatggaatctcaacaccttcttcttcgaagagttctttggctgttgagcgaattacatcctcttgaacgtcaaactctttgaccataccgatgagtggcaccataatctctggacgaggattgaatccttctttcttcagctgtatggcagcaccgaggattgctcttgtttgcatggcagtaatctctgggtatgtgtttcccaaacgacatccacgatgtcccaacattgggttaagttcactcaaactattgacacggttctgaatgtattgtacacttacgcccatatctttagccatcacttcctgacctgccaaatcatgaggtacaaattcgtgcaacggtggatctaacaaacgaatgttcactggatgtccgtccatcgccttaagaataccatagaagtcttgcttttgataaggcaataacttctctaacgctttttctcgaccttcttgcgaatcggccaaaatcatttcacgcatggccttaatcttttcgttttcaaagaacatgtgttctgtacgacagagtccaattcctactgcgccaaagttgtgagccacttctgcatcatgaggtgtatcagcattggtacgaaccaccagttttgtatatttattgcaaagcttcattagttctgcaaaatctcctgttacctcagcggctcttgtttctacttgaccttgataaacctcacccgtagaaccattgatagaaatataatcaccttcgcgcaagataacaccatcgatttctaccaagcgttctttgtaattcacactaatggctccagctccagagacacaacacttgcccataccacgtgctacaacggcagcgtgtgaagtcataccgccacgagccgtcagaataccttctgctgcactcattcctgccaaatcctctggcgaggtctccatacgtaccataaccacttgtctgccatcttcgtgccatttgaccgcatcgtcagcgaagaatacaatttgaccgcatgcggctccaggagaagctggcagtcctcttgtcaataccttggctgtactctgagccaccttatcaaatacagggtgcaataactcgtcgagtttatttggctcacagcgtaacaaagccgttttttcatcaatctctccttcgtgaagcaaatccatagcaatcttaaccatggctgttccagtacgtttaccattgcgagtttgcaagaaccagagttttccttcttgtacagtaaactccatatcttgcatatcgtgataatgcttttcaagtttgtcttgaatactgttcagttgttcataaatctcaggcatcgcctcttccattgaaggataatttttggcacgcacagcttcgtctatattctgttgcttagcccatcgtaaacttccttcttttgtaatctgttgcggagttcgaataccagcaacgacatcttctccttgtgcattgacaagatactcgccattaaaacgattttcgccagttgctgcatcacgtgagaaacaaactcctgttgcagaagtgttacccatgttaccaaagaccattgccattacagagacagcggtaccccactctgcaggaatgccttccatcttgcgatagaggatagcgcgctcgttcatccaactgtcaaagactgaacaaatagccccccacagctgctccattgggtcatcggggaaagctttacccgtttgtttcttaattgcctccttaaagcgaactaccaactgtttcaggtcgtcaacagtcagttcattatcaagaagaatacctcgcttttcttttacatccatgatgatcgcttcaaaggggtcgatatcctctttgttaacgggcttcatacctaaaaccacatcgccatacatttgtacaaaacggcgatagctgtcgtatgcaaaacgttcattgccagtcttctgaatcaatccctttaccacttgatcattcaatccaaggttcaagatagtatccatcatacctggcatagatgcacgagcaccagaacgaaccgaaagtaataacggattgacaacatcaccaaattttgagctcatcaatgtctcaatatgcttcacagccttgatgacatcctcttgcaggagttgcacaacttcttctttacctttttcaaagtattcattacaaacatctgtcgtaatcgtaaatcctggaggaacaggtacgccaattaggttcatctcggcaagatttgcgcctttgccacccagcagatttctcatatctgccttaccttctgcttttccattaccgaaggtataaactctttttacactcatattcaataattaattaaactatttgcaaaaataacaatattttaaatatctacaaaacaattggttcataaatgctatcttcagattgcatttgtgtacttattatgaagtctctaatgccacaaataattgttggcaagcatcttctattaaattaagcgcattgttgaaatctttttcattaccataatatggatcagcaattatttttacatttgcatgttgtgttatgtagtcagccaacatcactacttttttgcgttcgtcttcattttgagtctgcgaagtaatttgtcgataattttcttgatccatgacgaagatgtagtcgaaatactgaaaatctgattttgtgaactgtcttgcatgactgttaaacacgtatcctcttttcaatccacaagctctcatccttgagtcagggagctgtcccacgtgccaattgccaatacctgctgaatcaacttcataattcgcattggctttgtttgcattgataattgacttcatcacaccttctgcggctggactacgacaaatattaccaagacagacaaacaggagctttttcttatttattttcattcttcgttatttgtgatagtttgtaaatcgggctttgttgcaggtatggcttggttggcactctctttcacgcccaactcttttagttcgttggctttctgcacaatgctttgtcttcctgtgtatgctttattatatgcttcgtcataatgtttacgaaggttgataatatccgtatcaatcttatcaaaacgtttgataaactcccctactcttttcaacaactcctctgctaaagaaaaaactcgcttctgattttctgtttgtgtatattgtcgccaagcaatttgaatcatctttagaatcgccatgaggttttgctgacttgtaataaatacttgcttctcaaaggcctctccccacaagcgaggttcggtagccaatgctaattgtagcgcgccctcattgggaacaaacataattacgaaatctatcgcttttcgaggtgcttgaacataactgctatagtctttttttgatagatttttagcttgagttcgaatgctgttgaccaaatctgtagcatattttctctttagtccttcttcggttgtctgcacatatttgtaatatgcgtctattgacattttggcatcaataataacatcctcattattaggataatgcaaaatcacatcagggcgcattcgttttcccgtatcgtcatttctgacggcatctcctttctcgttggtaagggtatattgtatatcataatcaactccttcaatatatccctgtgtttctaagatgtctgtcagaatgcgctctccccacgagccttgaacctgattaccgcctcgtatgacatttgttaattgatgtgccgaattttctattttttctgtttgcaaactcatttctttgagctgctgtgtcagggatgctgtgtttttgatagattcatgattcgtttgttgaatagcttgctgcaattgctccaaattaactttcagtggattcgtaatgtgttccaatgactctgagtttgtcaatttcaaacgctcagatgtctgttctaatatttgcgttgccaaattagaaaattgagcttgaaccgttttaagttgttgctcaaactgttcacgacgcatttccgattctttggaatggaatattttttgcgattcaagttctgaagatacacgttggaaatcaatctgtccttgaatcattttgttttgcagcgagtccttctcttcctgtaaaagttctatacgtttctccaattcttgcttacccaattgttcctgctccatttgctgtttgaccaaaaacaattgtgtttcgataacttttttcttaccgtttatcaacaaaaagataaaaactccaccaaaaataagtcctactgataaaaataaaaactccataatgcaaagatataatattttggctgtttataaaaacattatgtttaattatttagatgagattcttgaccatggaatcacatttctatataatatccactgaataaaaccacgaagggctaaatacaccagaaatgccaaccataaagcatgattaccccataattgcttcaatgagataaagaagacaaagaaggcaatcgcagaaatgacagaagataccaacatgccttttgtttctgtcagtcctataaatatgccatcataaataaaagcggaaacgcctactataggaataaacacagcccaccaaaaatagtcttttgcagccgccacaacatcacgttcatttgtaagcaataataagaagtgatgaccacccaaagcgtacactaaagtaaaagtcagtgccataattgcgccccaagcaaacaaacttctatacaccttgtcaaatcctatcttgttattagcaccgaaatacttacctgtcaaagcttctccagcataggcaaatccgtccatgacgtacgagaacaaagtaaataaggtcatcagtaaagtattcactgacagaatgatgtcgccttggcgagcacctgcagaaatgaagaagaaattaactccaactaaaaataaggtccttacaaagatatctgtattgaccttgaagaaacgcttcaaatcaattttcttcaacaacttgtgtgtccaagggtagcgattcaaacgcctataatatctataccaacagcatatagcaatcataaatcctgaccattgggcaataagagtacccaaggctaccccatcaactttcattccaaacccataaacaaagacgaggcttgctatgatattgataatgttttgaaagatggacacaaccattggaacacgcgtgttctgcatgccaatgaaccaacccgtcatgccatacagccctaacatagctggtgcgccccaaatacaaatagaaaaataaattgttgcttgttctgcaatctctggagatggctgcatcagctctaatgcaagccaacgtatgggtgtttgaaaaatgataaaagaaaaagcaatgataaatcctatcaatagcgaacaaaagagatgacgcattatttctgtaaaatctctcttccctaaagcctgcgatgttaagccactcgttcccattcgtaagaatccgaaaagccaatacatcacattaaatatcatggaaccaatggcaatggcgccaatatagacaacatcacccatatgacctacaattgtcaaatctatcaaccctaaaagaggtatggtaatgttagaaatgatagaaggtaatgctaatctaaaaacttgcttcataacttatcaaaagaatagtgagtatggcatccatgaagaactttcaacggacagctacaatatgcacaacaaaacaaaaactctacagaccaaatctgtagagttgaaatatagttacctgtatgaagagtattgataatcacaactttttctcttcattgagtgttctatttaattagttcttaaagaaatctttaacagcttcgtttggaaccatttgttcatcaaaaacataagcacccgtctttgggctcttcaccattttgattactttcgtatatgctcgaccatccatcttaccttcatggagggtagcgaccgctttttttgccatttgataatctccttattacttaatctccttatgaagagtcatcttcttcaaaataggattatatttttttaactctaaacgctcaggagaattcttacgattctttgtcgttacataacgactcgttcctggcagtccactatctttcatctcggtacattccaagataacttgaactctgtttcctttagctttctttgccatgactattattctcctattactttaatatctttccaatcgcaataaccttttgaaacagcttgcttcaatgcggcatcaagacctactttattaatgagacgaagaccagctgcactgatcttaaggctaatccagcagccttcttctacatagtagaatttcttgctgaagaggttgacatcaaagctgcgctttgtacgatgctttgagtgagacacattgttacctatttgtgccttctttcctgtgatttgacaaatcttagacattgctatcttaaatttttgttttcgacttttgatacttattccaaacaggatgcaaaattacaaatatttatcgtaattccaaaagaatatttaaaagaaatgcctaaattaagtttttttattggtattttctcttcaatccacgagaaagccctctcctatcaaggtagattattccttagaatcaagctcttgatgagacagagattctttaagaaaatcaagaaataagttcaaagcttggttagttgcgttggctaaattcacatctcgcccattatcttcggtaagcttaaaggttcgcatatcatcttttgagccatacgcaatccaaatagtaccaacaggaatggtagatgtacctcctccaggacctgcaatccctgttatggcaatggcataatcacagtttatcgtttgacataaccccacagccatttgcatagctacttcttcacaaacagcagattgctcttcgatcacttgcgcattcactccaagcaagcgaatcttcaattcattgctatatgcgataataccgcctttgaaataattggaagctccgggtacagcagctatcacttctgcaattcttcctcctgtacaactttctgcagttcctaaggttttatttgaatcatatagaaattgttgtatttctctactgattactttattttcaaaattcatgatgatgatgtattatttttatgcagctatatctgtttcaatctcttactattcagcttaatcactactgaaaatgcggtctacttaaaagttactttgctaaatgcaggttgatcgatactgcaataatcatgatctaaatatttataatagcctgtaattcctatcatcgcagcattatctgtggtataactgaatttaggaatgtaaatagtccaaccatatttatctgcatgttcatggaacgcattccgcaaaccattgttggcggaaacaccacctgccactgcaacatgcttaatacctgtctgcttgactgccattcttaatttcttcataagaatatctacaatcgtaaattcaagactcgctgcaatatctgttttatgtttctctatgaaatcaggatcatcagccatccattttcgcaaactgtataagaaggaggtctttaagcccgaaaagctgtaatccatgccttcgatatgtggttctgaaaattgataggcatgaggatttccctgccgtgccaatttgtcaatgataggtccacccggataaccaagtcccatcacctttgaacatttatctatcgcctcacctgccgcatcatcaatggtttgtcccaatacctgcatgtcattataggcatttaccttcactatttgagagttaccaccagaaacgagtaaacagaggaatgggaacggaggctgatggaagtcctcctcattttctttgatgaaatgtgccatgacatgcccttgaagatgattgacatcaatcattggaatacccaacgaacgggcaaatcctttcgcaaaactaacacctaccaataaggagcccatcaatcccggacctcgcgtaaaagcaacagcatctaactggttctttgagataccagctttctttaaggcttggtctactactggaaccacattttgttgatgagcgcgagaagctaattctggcacaacaccaccataagcttcatgaatcgcctgtgatgcagtgacattacttaataatatgtcgttgcgaagtacagctgcagaagtatcgtcacaactactttctatacctaatatataaatatctctcatcctttatcaattatctatttacctttcctatgttataacactctcggggcgtgcgactctcaaaacgcaatcggttttaaaactttaatgtgtcaagatttcaactccatgttcggtcataacaaacgtatgctcccattgtgcactggggagttcgtctcctgttatcacttcccaaccaaatgggtcgtctgcatcaatatatactttccacgttcccatgttaatcatcggttctatggtaaataccattccaggaaccaataacatacccgttcccttatgaccgtaatggttcacattgggttcttcatgaaacttcaaaccgacaccgtgtccacacaaatctctaactacaccgtaatgatatttttctgcgtgcttctgaatagcatgccctatatcccccacaaaagaataaggtttagcagcctctgcaccaatttccaaacattctttggttactcgtaccaactgctctttctctggagtcgtttttccaataataaacattcgggaggcatcagcataatatccatcaacgatggtcgtcatatcaacattgataatatcaccttcttttagcacatcagacgttttgggaatgccatggcacaccacttcattgatgcttgtacaaacacttttaggaaatccttcataattcaaacaggctggaatggcattatgctctttacaataattcatgcaaatatcgtctatttcctgagtattcatacctgcatggatatgacaagccacttcatctaatacccctgtgttcactaccccacttttgcggataccttctatctgttctggagtttttatcaattcacgagtaggaactaacttacctttgttctcccaatacatcacttgcttatcgagttctgtcaaaggaacacccggtaagctatgccatcttttttttctcttaaaattcatatctactgatcaatttgagtagtctacaaaagtacatcaatttatagataatacaaaacattattctatctttttggaaaggtgcacaaaaaagtggtgtatatcttcggctttttcattgaagaaaggtgatgggttgtgaaactgccatctttgttcttttcgtttcacaacaattacccatcaataaaagcgctacgttttcttattattcttggtaaagatatccgttgtttttgtcctataaaattaccaaaaaacgaccattaaaaatcttcaaaatagaaaaatttaataggcaaacgaccaacaaaaatgcgctgattttgtaaaaatagacgccttttcaagttagaacattgacttaacgcgcttggaaacactctttagagatgttattcacatgcttcagcagccttaaagcatgcaaatagaaggcttagagtaatgctttagcagccaagaaagggtaaaaacaagaaagaaacaagaagaattacgtgtaatgtattcaataacaaaaggttatgaacattgctcatatttagcgtatttgcgaccaacaatgacgttggtggttttcacgagagttatgagaggcactttgtaaagaaaattcagcatttataatcttactatgtagcgtattcgtcattttacatacgctgcttatttggtgctgtttgctgtaaaaatatcttttttaagtcaaagagccgcagcgtatatcaacaacattctattggttaagtaaccattccacatgcgtcatttctttgagcacccactaataatgcttcaatgcacgatccatctctcgctggtcttccttttctttcaaactttggcgtttatcatactctttcttaccttttgctaagacgatatccacttttgctctacctttctggtcgataaagagcaacacaggaagaatggtgtttccgggatttttggcatcaatctccaaacgtcgtatttctcgttttgtcaataacagtttacgatctctccgagcttcatgattggaaaacgaaccataaaaataaggacttatattcatgcctttaacccaaatctcaccgttattgatatagcaaaaggcatccaccaacgacgctttgcctaagcggatggattttatctccgtacccgtgagaacaattcctgcggtataggtgtctataaaaaaatattcaaaagaagcccttttgttcttaatttggatggggcttttctttcgaagtgcttgttcatctttattcatcatcaaataattttagcaaacttatcaatatgctgatctacatagtttgcaatctcacttgtccaacgttcttcgttttctacaaacgtatcatcataatcgtcaaattcaggatacttttcaaacaatgccataaattcatcttccgaacaatcgcgctcaatttcctcgccatacttacggtataggttatgacactttttcataattctaaataagtctatcattccccacgctctcactgccttatcaaacggattatgaaagataaatgcaccataaccattatggattaactggataaaaccgccgtccattacctccttatgaagaatgtcgtaagccaataatgtaatttgatcggcgtttagctgactcatcgtatcagccgtcagctctccaccaatggcttgataaatagcatcaataaaggtttggagaaaagcatccatcccttgttcagcagctttctgcaaagcgatatctctaactgtaacttctaacatatctttgtttcttcgtgcaaagatatttattttttactaatattctatcattcctttgcgatatttcaattactgaccgtgccgacaaaacatttcaaacaaaaacgcagcaacaatcaatgaaacataaattattcgttttctttgctcgttgtattcaaaaaagaattatatttgcagcggttaaagaaagagagataaaatgcaaccatcagaacaaacaatcaatcaaattgaacgtactattcgtaaaattgcacagaaattttccgaagagatagaatctgtgaacatcacagacatacatctaagagtaggtcaagacagtggtgagctaagagcttataatgacgatgaccaagaaattacacgatgtgttatttctgaatggattgattacaaagacgacgatttttatgatgtggtgacagatatcttaagaacgaatcttaagaaacatagccacctcgttgaccaaatgaacattcttaaacccttcagctttattcttgaagatgaagacggtgaacatcttgcagaactctatgtggcagatgacgatacagtgattattggaaaagatttgatgaataatttggaagaggacttagactccttcttagatcacctattaaatgaaaatctttcataaacgtcaaaagagcttttttgaagctcttttgatgttatagttttatatttttcttttttcctttactctcattattcatcctatctacggctgttaccacatatctatattttgtcttaccatcggcataaggcaacttatacatcgttttatttgtaatggtaacaatctttgacgggtcgtctaagtcgacacgttcgcctttattaaaacgatataccacatacttcgtggcaacatcatcccaattctttccacgaggtggtgtccaaaacaacaagtaaccgctactggtccatacagcttttacctttcgtggctttttgggtctcttatcatcaataaaaggcattttgggttgcagggcaggatatttccagtaatagtttcgcaaagtagtgccgtagttaccaatattatcaaccaccgcctttgcataccacagcacagtgccttttacatgattcatctcctcatggagtttgaacttagcaggcatttggtgactgttaggattcttaggatcagcaaatttaacagttctctcaacatcctcacctatataaagaggtcggtttcctgcatacttgttccaccattttatcaaagtctcataatcagcagtcgaatgtcctatttgccaatagagctgtggcacacaataatctacccatccattgtttacccataacagcacatcggcataaaggtcgtcatagttttgcaacccacgtgtattgctgcctattttcggatcagacttcttattacgatagataccaaaaggcgaaacaccaaatttaacccatggctttcgttgatgtattttctctcctaactctttgataaaaacatttacgttgtaacgacgccaatcatcgatattatttataccattgtgatattgcctgtactcacgtccgtcttgaataatctcgcctggtgcaggataaggataaaaataatcatcgatgtgaaaaccatcaatgtcgtatcggctcacaatatcatctactacttggtagatataagccctattggcaggattaccagggttaagaataaattgtcctccgtaggtaaatacgcttcctggttgctttattgcaatgtggttgctggctaaagccgttgttccttttgtctttgctcgaaaagggttaatccatgcatgcagctccattcctctttcatgacactgttctatcatccattgcaacggatcccacaatggataaggggcttttccttgaacacctgtcaggtatctgctccatggttcatatctacttggataaagagcatcacattctgctcttacttgaaagataatggcattaacaccgtccttctgtagttcatctaactgataacgaagtgtctgttgcatttgctgggtacccataccttcaaactgtccattgacacattgaatccatgctcccctaaattcatgtttttgagcatttcgtgcaaaaacaaagacactgagttcacaacataagaataagaataataaccttattgagattaaatatttgttcatcttgctatttcttttctgcaaagataaaacatgtaatgcgaaaaaccaaaaatccctacatgttgttatataatttcatgtatagccatgaatatttaacgacttaattggttcagtttcacaaagattttctacctttgtaaaaaagaatacgatgctacacatcaaagaaataaaaaaggattcaaaagatatagagctcgtgaaaagactctatgtagaggcatttcccaaagttgaacgcatgtcttttgactcattattgctattgcaacgaaaagcagatgtccgttttttaggcttttatgataaaaatgacgaattcaaggggctcacatatacatatcatcatgacgatttgagttggttgttttattttgctgtaatgcctaacgaaagaggaaaagggtatggcacgaagattatcaaacatcttttaagaatatataagaacgaacgttttatgattgatatagaggatgtcgaccaacccgcatctaataccgagcagcgaaaaaagcgatacgaattttacaaacgtatgggatttattgattatggggtcagaaaggtttggcctggcattacttacaatatcatgtcgtgtggaggaccggtcaccttagaggattacaattgcgtctataatgagttttgggaaatcatcgaacctttagaagaatcagaataacgattgaaggacatcattgcatataacaaacaatggttgcaaaagagattcatcgtctaattgcattcataccttcgtttgctgacaagtagagaggaaatcagataacaatccatgctatcggtcagatgatgtgaaatagatgcaaaatacatccacactatttgcagttgaatcgaaaaagaagccacgaaccatgcgttacaataatagtaacaaggttcgtggcttggtgataaagaaatatatcaatcttccattaacttacgatagcgtccttttttaatatcttcgttgcctaaacggcgggctttattgatttcatattcagagtaagttccttcaaaatagaatacttcaccattaccctcgaatgccaagatatgcgtacaaatacggtctaagaaccatcggtcgtgactgatgacaaccgcacaacctgcaaacgactccagaccttcttccaatgctctcagggtattcacatcaatatcgttggtaggttcgtccaacaacaaaacgttaccctcttgttttaacgccaatgccaactgtaaacgatttcgttctccgccagaaagcacttcgcactttttgttttggtcggtaccagaaaagttaaatcgcgacaaataagcacgtgcattgacatcacgaccgcccattcttatattttcattgccttgcgaaacaacttcataaactgtttgctgggggtctatatctttatgttgctggtctacgtatgccagctttaccgtttctcctacttcaaaagtacccgcatcaggctgttcgagccccataatcaaacggaaaagtgtggttttacctgcaccattgggtcctatcacacctacaatgccattgggaggtaacataaaattgagatctgtaaacaacactttttctccaaaagcttttttcacatgttgtgcttcaatcactttattacccaagcgtggtccgttaggaatgaagatttctaatttatcctctctcgctttctgctcttcattcagcatctgttcatacgagtttagacgagcctttccctttgcttgtcgagccttaggtgccatacgcacccactctaattcacgctctaatgtcttgcgacgcttagatgcggtcttttcctcttgatccatgcgcttggtcttctgctctaaccacgaagtataattacctttccatggaataccttcaccacggtctaactccaaaatccactcactaacatcgtctaagaaatatcggtcgtgcgttaccgcaataactgttccctcatactgctgtaaatgctgctccaaccaatcgatactttctgcatcaagatggttggttggctcgtctaataacaacacatcgggcttttgtaagagcaaacggcaaagtgccacacgtcttcgttcacctcccgaaagatttgttactggcagatgaccagcaggacatcgcaaggcagccatcgcacgttctaacttagagtccatgttccaagcgtcggtagcatcgatgatatcctgcacttctgcttgtcgctgcatcagtttgtccattttgtcagggtcgccataatattcttccagtccaaacttgacatttatttcgtcatattctttcaatgcgtcatagactttatgcactccttcttgcacgttttctttcacggttttcgtttcgtccaatagtgggtcttgtggcaaatatcctacactatagccaggactccacaccacatcgccttgggttggctgctctataccagcaataatcttcatcaaagttgatttaccagcaccattcaatcctataataccaatttttgcaccataaaagaaagacaaataaatgtctttgagaatttgtttttggttttgggggataatctttgatactcccaccattgagaagattattttcttgtcatctacagttgccatataagtttttgagttaatgagttaatgagttattcagttgagttgttaagttaataagttactgagttattaagttcttaagttgatgagttgttggttgtggttccaaatttcaagcgcaatttcatcaagagatgcgtcattttttgaattatatttctcgtaatcgagcgatatattttcctaagatatcaaactctaaattgacgatagaccctactttgatatcacaaaagttggtatgctccttcgtataaggaataatcgctacggtaaaacgattgtctgttggttcgcaaaccgttaacgaaacaccatttaccgtcacgcttcctttatcaactgtgatatatcttcgtttcgccatttctctgctataaggatactcaaaagtgaaataagtagaaccatcagcatcttgcatcttcacgcaagtggctgtttggtctacatgtccttgaacaatatgcccgtctaacctgccgttcatcagcattgagcgttctacattcaccttgtctccaatggttatcaatctcagattagaccgttccaacgtttccttcatcgctgttaccgtgtatgtatcatcatgaagacgcacaacggttaagcaaacaccattgtgactaatgctttggtcaatcttcaattcgtcaacaaacgaacatttcaatgtaaaatcaatgttttcttgatcatggctaatcgcaactacggttgccatctcttctacaattccagagaacataaacaaagtttttaattgggttctataaattatccttgtcaagttttgaacttatgtcacacgaagtaggctgcacctcaacgcagaaagcaaactttcgctgcattcggcttgcactaccttttgttatcaatctgtaagtgagtaaggttgtgtagctactacactcccaatggcactaacgcattgaaccataaaggtacgaaacgttggcaagacgtaacccataatatatttagttgtggtggtaatttataaaacccaccttatatttataaaggcaggaaacacacctgcctttatgtatgaaaaaggggttgctcgatgatgtgatgaaactccgaactatataagatttgagagctctccgtctttgtaatccaccggctttacagcttagtcctaaaaggatttatgtggcccgccattaacaaaagaagtcttctcggtttcatgtttttattgatgagtatcccgatcaaatcgacacaaccccatgttgtactctttctaaatgcaaagatacaaatttagaatgaaacctacaagccttgtcacctttttacatccttataataatgttttttaattattgctgtccgctgaaacttcatttaccccaaccgttacaaataatcatggggttttggtttattttgtaaccttactacgattgtacgctttatatgaagtttcttttcgttagattaaatgtctgtctttgtattcctttgattccacttcgcaatgaacacctttggtttttggttatataactcccgctattagtgcttactcgggattttcaccaattagacaatgttcatgctgaagatacaaaaaaagtccgcaatacctgtcattggtatcacggacttttgatgattgttatactcatctgtcagctctgaatgggttgcgatttagcgcacttggagcgtgtaatcctcaacttcgccattgttgaatcctccacaaggatcttgatagccgtcaggactggcaacaattcggatgcgatagttacctttttgaatcgttgtgggtacatagatatagccagagaacccgtaataagagtagcgctcaactttcttttcgtttggtgagaagactccatcgttgttgaaatcgacatagacacgccaatacatcttgcttctggaagaagatttgaagcctggagtgagcacatacttaaaggactgaccaagacttgcgtatgcaatatacgaagtaaaatctgagtatgaacttccgcctgacaccttcgtcatagtgctaagactgatttggctgatataagctgatgagaagttgacagctccaacagtacagtatgtgtttggattaggtgtcgggtcaggttcaggatcgggatcaggggttgggtctggcgtaggattgggatctggatttggcttaggatcaggctcaggtggagctggtttcgtgatgacagccgtataatcttcaacctccccataagtaaagtgctcgtcaggtttaggataactgccccattttgcactgacccgcacacgcgtttcgccattcacagcgttggagggaaccttgaacatacggtagaaatagttgtccgaattcatgtattgagccaacacgcgctcgttgtcctcaaattttttgttgccgttaaagtccacccaaacacaccagtacatgggataaacaccgttagggaatcgcggcatgagtgtaatgtagttgctgctgccagcctcaagctccactttcttgttctggaagaacgtgtaggacgaggctccactatagtttttcatgtcgcctatgcttacataataaatataagtggagttgaaataatccgaataggaggatgcgtagctatctgtcggggttggatcaggagttggatcaggggttgggtcagggtcattgccgtcgttataacctggaggagcaaagtttaccacgatggtttgccagtaattgaaacctccagagccaccaccgatgcccaaaccacttgggtcgagtgcattaagcaagaaatagccatcagaatatccgccccatccccaattgatgtggaagtatccgttagagctgtaaccatcacaaacaaaggaatggccaccaccgttaccactccctgcatactgcacgggtctacggttgtcaagctcgttgcgcacgatgctctcccactgagtagtggaatagtctgatcgttccaagctcgttacagcatcaggataagaatagtaggtcttcaacatcttcggaacgtactgctgataggtgccgctaccagagggcgagaagcccatgtccaagcccacagccacaccgtagcaaaggcttgctacatcgttattggattcgcggagcacagaatacggcatgttcttccaattcaaatcgtagttataattgaaagacagtgtgccataactggagttgtaagagtgatagccctttcctcgagcaggatactcgtagaaacgcatgatttgggaggttgccgtagcgacacaacccacaggacaattatacgggcagtaagcgttgtaataaggagcttggttccaatgaatgttggctaacaacggacttactgatgtctgtgcgttcatctcctggttagttcctgcgatggctgtctgccgcatttgtttgatgcgattgtcaatctttacgttttcataggcaaagcgaatctctttagaatatccgtcaagcagctcgcgcatattcacaggtattttgttagggtcgaacttgccattggtggaatagcccaaaatgggataagtacccttggaggcagaaacgacaacaaagccatcatcgccacaattgataatgtaataggtagagcgttgtgcgttggaagcacgggtgcgcggcattccgtctgtatacaccacttttaattcaggtataccacttgccctggtcttcacttgaaccacatcactgttttgatcaaggaagtttcctgcgatttccaaagcttctttttcttccacgaaattactttcgttattgcttgtcatgatggattgaaattcatctgtctggcatccaaaaagagtcaacaagccaacgaagaagaatccatacaataatttaaagaaacgtttcatcagcgtataggttttaatgatgtgttgaatatgataataataaaggtaatagaaattataggagagtgcgaatttttatctgattcgcactttccgtctatagtgtataatagtccttggcggagaagtagatttccccgccaagaaaaaagattattctgtagcgtagcttacatcaaagacgatggagccatggtagtccactgcaatcttgcggcgtgtttgcatgccgaactgatagtcttttgcatcgaaaatcaagtctttcaacgtcttggttattgtcaccgtaccaagatcatcacccttggtagttcctgcagcgacagtgttacccagcgtaacggtgatttccaccttctgattgaggaatgcttccatgtccataccgtttctattcagcataattgttgcggtaggtgcatcgatttgggtgtaaatgttcggaccattcatcttgtaagcgtctgaataaggagctttgaacaaggatatcgtttgaccatttggcaatttcatcgttgcattaccccaaacgtaaagatcgggtttgctggcagcggcagcctccaatgcggaaggtgtgagtttgaaggaaatactcttgcattctggtacaaacacagaagaaataattgggaatctgtcggtagtaagaacctgtgccacagagttgtcatctacatagcggagcgtgtaagagattggctctgctgtagaaataggcatgggctctgcaagactcttacggaagccttcccaaccaccgtcagcaaggcgtccatgttgctcagccttgccaccgatgcaaagcaggtggagcgcagactcatcaagtacttttttatattgtgtctgcaagttcaaactaaggttgccccagtttggaagcaataaaccaattgcggctgtcacctcgtcataggtataattactggaaactaacatgtaggcgatgcgaccataatacacgtcactgacataaacaggaatggtgccatcaaaattctttgctacctcaggtgcatttgcaagtatacatcctgttggtgtatccattgaaacgctataaactttttggatgaactttaacaacacatgtgtcttgttgcgttgccatgagttgctcaagtcccatgtaagttttgcagaggtaccgatggagcctgagagctgtacagaaccagacctatcgagtgtcacctgatgatactcgtattcggtcatggcacctgcatcctgtgctccaaaagatagccaatctttgagtacatcctggtaagaactccaagttggatcgttaagtggtctggagctcaaagagcctggctctcttggcacaagcgtgttggagatgacgataggattgagcttctgtcctttaactggtttgtactcgccacttgtaacacttccaccaacaaacacatgtccaggataaatggatgtctgtgctggattgaagatcataaactcgttgtaagccgtacctgactgatgataggtggtgcgagtgattttcacgccaggaacaccattaacgaagtcataagaagaagtttcggtgcctggagttggagcggggggaacattcggggttggcgcaccgctacgcgccataccgacgccaagcgagtaattggcaaatgagaacgactcattaggaactgggttggtggtctcatcgtcgaccaacggatcctcactcgaacaagcacaaagagccaaaacggctaccatcggaagccagatcttgggcgcatgcaatttaatttttttcataatagaataatttgttaataaaataaaataataaagtcaaaaataacaacagcattcttatttcttttctgtaatgtagattagtagctattatcattgctttgcttatcgtcaaccttcatgcctgcaaagatatctttgagttgttcagttgaccaagagagtgcagaatttctgcaaatgttcacaaactttcatctcatcaagagaagatacgattcaaatagtcaagggagataggttcgaatttcaagtccatttctacttcgttggagattttcatcagcaagaaagagaacgctcccatatagcatcaggccacattgtccacataagaactgtaaaaattagtaaaacatagttcatttcttcattattattgccttgaatctgaaacacaaatacgattgtaataccgcaacaaagttaataaacatctataaaactataaagaaataatgagatttttttataaaaaaaaatataaacagtatataacttaagaatagttataaaacaaatgtgtttatttgagggttgtaccctctgatatctttctgttgtgttggctctaaactgagccatatagttcacaaaaataagcgaatatccagtaattttgcttggtttttttgtacgtattgacacaattattccatagagacgagccattcggttggaacttattggtttgcacatatcatgatggtggcggtgtcgcttttcgcagatcattagattcatcccccaatcaaagacaccccaaaggaaatcaaagctctccttcatcgatgtatgaaacttttttgctacttttgtcgtcaaagaaacgtatggcaacccatcatcatacaaataacagttacgagtaacaactcatctaaaaaatctactatatgaacaagatttttcaaatcagcctttgtggcatggctttacttctaagtacatccacggtccagtctaaagagtggtcgctgaaagactgcattcattatgcgctaacccataacatttcgttacaaaagaagacactacaacatttgagtgcgcaagaagacacgaaacaaagtcaagctgccctattgccgtcattggcggtaagctcctcccaaaatttaacataccgcccctggccgcaaacaggaatttccacaggaggctatatgcaggcatcggtagataaggtgtactataatggttcgtatagcattaacagcaattggacggtatggaatggtggaaaaaacagacatacgataaagctcaacaaacttcttgagcaacaaacggcattggattcggcagaaatggctaacaaactgattgagcaaattgcacaactatacgttcaaatactttattccaaagaagcggtagctgttaatcaatcgattttagaaaccagcaaacagaacgaaacacgaggcgaagagttcctaaaagttcaaaagatgagtcgtgcggatatggcacagttgaccgcccaacgtgctgcagatgaatataatgtaatagaagcagaaaacaacttgcgcaactataagcgacagttgaaggaacttctacaaattattgacacagaagagtttgatgtgttgcctcctcgccaaatagagaccgttgaaaatcaggcgatacccagtgtatctgagatttatacgactgccctcaacaaccgacccgaaataagaaatgcagcattgggcatcgaaagtagtaaccttagtgtgcgtattgccaaagctgggaaattacccacattgggagtaagtgcaggcgtaggaacgagtactacctccatgagtaactatgaatggggcaaacaaataaagaataactttgatattggagctggtatttccattaacatccccttgtttgacaatcgacaaaccaaaacagctgtcaacaaagcgcttttgcaaaagcagagttatatgttggatctcaaagacaaacaaaccaaactctactctactatcgaggattattggctacaagccaccaacaaccaacacagattgcgagctgccatgataagcacaaagagtgccgaagaaagctaccagctgctcaaagcgaagtttgacgagaaccttatcaatattgtagaactgatgaaagggaaagatcagctgatgaatgctcaacaaaacgagcttcaagccaaatatcttaccctgctcaacatccacctattaaagttctaccaacaaggagtcatggaataaaataaagcaaaagtggcttctatctattattgctcgcagatagaagccaccactttccaaaatttttattacttgctatctaacggtaacatcaactcttgcggagacgaaacgaaggttgtcgcaccatgttccagcagaaattccttgtcacgaaatccccataacacactgatacacggcataccgctgttacgagccgttgcaatatctacgtcactgtcaccaatatagacggcatctgttttatctacccctaattgtcgcaacgcttccattaccgtatcaggtgcaggtttgcggtgaatatcctctcgttcaccaatggctacgcttacataatcgctaaaaaaatgttggcaaagctcgcgagtagcgtcatagaacttattactgaccactgccaacttttttccatgttcgtgcaaatttttcaataagtccatcacacccagataagggcgtgtgttatctaagttgtgaaccatataatgctggcggaaatcctgataagtttcttcaaattcaggatgttcaagaccgcccggaatggcacgctccatgagtttttttacaccatttcccacaaaatgccttacctcttctattgttcgttcgggcatttggtgtttcttcagtgcataattacaactaacagctaaatcttggagactgtctaaaagtgtgccatccaaatcaaaaatatacgtactatactccatattgttacgtgcatcaatcgcacatcattaaaaaattaattcttaactcaaacgattaagaaaatcgttgctctcatcaacatccttatcatttaacaggaatgatgcaagcaaaacaacctgacacatcagcattgctttaatgactgcaaaggtacaaattgtattatggatttccaaatcatcttccgtctttcgtgacatagttccacattcgctcaacatcgcttctaaagttcagtaattaactgtcaataaatttaacaaaacacctctcataactttcatattttcaacaaaaagaaagttggttgaaaatattcgagtatttgcgagttttcataactctttgaataacacatacttataaaaattcaccactaataagcccattatttaacctgaattttccactaaaagcaatgatttatgtggattggaagcaccacctaagcccgctattccattacaatagggcaactattatcaccatctaacggggttaactcaatgggataacacccaaatctactcattttcacgataaaaactgccaaaactgtatgaaagaaagccatattttgtgctagaatgcaaaattaaaaacgctcatttttggtaattaaaatttacaaactgctgtatcacataaagggaaaaatctatttgtcaattcacaattttttgccatgaaagaacatgctgattataagaaattataaaattaataaggttttattttgcccaatgtataacttctactacctttgcagccgttaaaatcatttgataatggatcaacaacataaaaatagatatttagtagcggctgccacgtgcttatttttagtctttggcttgatgtactattactttttttccgcattctcaaactcagaaaccactcagtatatctacattgatgccgatgacaatgcagactctgttgtcgccaaattaacgcccatcgccagacaacacagtcttcatggctttaccacactgatgcgccatagtcagtatgccgaccatatacgaacgggaagatatgccattaagccctcacagggtgcattcactgttttaaggcacataaagaatggcatccaagaccccatcaacctcacgataccctctgttagaaccatggatcggctctcggaagaattgggcaaacgcttaatgcttgacagtaccgacatcgccaaggctttgaccagtcaggaaatctgcaagaaatatggctacgatacaacgaccattgcttgtatgttcattcccgatacctatgaaatttattggaatatatccatagaccaactgttggacagggtaaagaaagaaagcaatcgtttttggaatagcaagcgcacggcacaagcacaagcactgaaactatccaaaaatgaagtcatcacattggcaagtatcattgacgaagagaccgctaacaatgcagaaaagccaatgattgcaggaatgtattacaatcgtctgatgcttagagatagcaaatatccaaatggaatgcctcttcaagcagaccccaccataaaatttgcatggaaaaattttgatttgagacgcatttatcaaaaacttctaaacatcaagagtccgtataacacatacaagaatactggtttgccaccaggtcctatccgtatagcctccattgctggcattgatgccgtattaaatatggtacaccacgactatctgtacatgtgtgccaaagaggactttagcggtactcataactttgcgaaaacttaccaagaacatttgggaaacgcaaataaatacaccgcagcactcaacaaaagaggaattcaataagatattttgcaaagatgattcatgaaaaggcaacaacctatcattgaatgattaaaaaacttcaattaaaaaatgcccgtttcttcacagagatgggcatttattttcaataggtattagttttctttaaggtaaaagattgtattcaggataacattgcaaatatagagaattaaaatgaatcaaacaaatttatttccatattaaataacatatttctatcatttgcacaaaaaactatggctggtagaatgaataatctttagtttttattatctttgcacatattataaagatgatataaggttagccacggcttttgtaagccaagagttatcccaaaaatagttgaatatgacagtaaaagaggacaatcacacagaagagaaaaagagtctgagttttgtagagcaactcgttgaggaagaccttgcgaaaggcaagaatggtggaaggattcagacacgtttccctccagagcccaatggatacctacatataggacatgccaaggctatctgtatggactttggcatcgcagaaaaataccacggtatatgtaatttacgttttgacgatacgaacccaagcaaagaaaacaacgaatatgtcgaaaatattctcaacgacatttcatggttagggtttaagtgggaaaatatttattacgcttcagactattttgaaaagctgtgggattttgcagtttggatgattcgagaaggacatgcctacattgatgagcaaaccgcagagcagattgcagaacaaaaaggtacacctacaactcccggtgtggcttctccttatagagatcgccccatagaagagtcgttgaaactctttgaacagatgaatacaccagaagccgttgagggtagtatggtgctccgtgcaaaattggatatggcaaattccaacatgcacttccgcgatcctatcatctatcgcattatccacattcctcaccaccgtacaggaactaaatggcacgcctaccctatgtacgactttgctcatggacaaagcgattactttgagggtgtaacacattctatctgtacacttgagttcgttccacacagaccgctctatgatcatcttattgattttttgaaggagatggacggaacaagtggcgtcatggacgacaatcgcccacgacaaattgagttcaaccgactgaacttaacctacacagtgatgagtaaacgcaaacttcatgcactcgtagaagagcatgctgtttcgggatgggacgaccctcgcatgccgacactgtgcggaatgagacgtcgtggttattctcctgaaagtattagaaactttatcaagtctatcggttacaccaagtttgatgcgctgaatgacgtggcattgctcgaagctgccgttcgcgacgatttgaacaagaaagcttgtagggtgagtgccgtgttgaatcctgtaaaactggtgataaccaactatcccgatggcgagtctgaagaaatggaagccatcaataatccagagaatgaagcagacggtacgcacaccatcacgtttagcaaaaatctgtggattgagcgagatgactttatggaagatgcacctaaaaagtttttcagaatgacacctggcaaagaagtgagactgaaaaatgcgtatattgttaagtgtactggatgtaccaaaaacgaaaatggtgacattatagaaattcaagccgagtacgatccacaaagcaaaagtggaatggaaggagcaaatcgcaaggtaaaaggtacactacactgggtatcagcagaccattgccaacaggcagaggtgagagagtacgatcgattgttctacgtagagaaccctggagcagatgaaagagacttccatgagttgctaaatcctgacagtctacatgttttcaaaaactgctatgtcgaagaatatgcagctaacaaaaagcctggagaatacttacagttccaacgaattggttattttatggcagacccagatagcagtgcatcgcatttagtattcaataaaacagtaggattaaaagatgcttgggctaaagtaaagaagtaagcatatccatttattctatccaaagaaccgcttaaatgacaagtaacgaaaattcgtattttgaatcgaaagagtttaaaaatattttgcaacaatttgaaaattcacaaacgtcaggcaatcctatgtttatggattcggacgaattttcagatatagctgagtattattttaatcaaggagatttcaaaaatgcaaaaaaggctattgatgacggtttggatatctttcctcattcaacggctctgtggattatcaaagcgaaattaactgctttagtagagaaggatgatacaaaagcttacacctatctcgaaagagttgaagataagaccgactttgagtacatctactttttaggtgagttgaaattgcgtgaagaaaaaacggaagaagcagagaagttgtttcggaaacacttgaatgacttagacgaggaagatcgagaagattttatcttcgacatcgcctcactatacgcaataaacgagcaattcacgaaagccgaagactggttcgagctgttgaaatcaaaaacagatgaagactgccaagagttgaaagggcgtatacttttaggtttaggcgattatgaggggagcgaacgaatctttcaaaaactcatagacaagaatccatactctgctgattattggacagatttggcttctttgcaagttctctatgaccgctttagtgctgcgattacaagctgtgaatatgctcttgctatcaatcccaagaactcactcgcaacgattatcaaagccaattcacttttcgatttagggaactttgaggaagccttgaaatattatcttgcataccaacagttagaaccaaataacctgacatttgaaaggcagataggagattcgtatcttcaacttgaccagcccacaaaagcaattgctcactggaaaaagtcagaacaacagtatcaagacgatccggaaagcttagcagagctttatgaaaatattgccttgacgctgtctcatttaggaaaaatggatgaggctttgtcctacgttgataagatgcagaatttgaaatgcatgaacatggaagacataagactaacgaaagggcacatcctaattgaaaatgatcagatagaagcagcacaagaaatttttcaagaagccatactccagcccgatgcttctgcgaatactgtcttgaaaatagccatctgttcatatgattgcggttatgtacaaatggcttatgaagttcttaaaaactttcttgaaggtgcggatgagacttgggaatatggatattccttttttgctgtttgttgtaaaactctcaataaaacggatgaatttttacaagcagtgaaaaaagcttgcgaaaaaaatccagaagaagcccaaaaggtattgcaaaactttttcccagaaggtatggcacctgaagaatattataactttctccttcagaaccaataagtaaaaaatgtgtttagtatcacaacaaactatttagaattattcacatgaactggttttcttcactcatgggaaacttaaattatggtaccgtctttctactgatgtacattgaaggtaccgtgatacccgttccctcggagttaattgtgtcgccagcagcttatcacgctgccgcaggacaccttgatatgacacttgtcatccttgtcgctacattaggagctgttcttggttccgctacaaactatgtagctgcttattatttaggtagaccaattgtgtataaatttgcaaatagcaaatggggacacatgtgcttgttaaaccaagaaaaggtagaaaaaagcgaaaaatacttttatgatcatggcgttatcgcaacattgactggacgtttgttacctggcattcgacaaataatctctgtaccagctggtcttgcaaaaatgaagttttggaagtttatcctttacaccaccattggtgcaggaatctggaattgtgtgttagcagcattgggatggtatttacattttatagtacccgaggaacaactcaacgaaaagattattgagtataacgaccatatcaagattgtgattcttggcatagctgccattgttgcactctacttccttataaaatatctttatcgaaaaaacaagcaaaaaaagactgtttaagaaattgttttcagcttaatcgcatgatgcgcataagtctgataaaaggtattatcgttcactaagcgtcaaatcagcactattttcatatccgcaatgcccagcaataggcgttgcggacttctttttggaaaagtaagccgcctgtcaaactatccttcatcaacttttcactaaaatgaaagaatggaagacactatttttgaaaagcttctaaactttcgaaaaaagcttatgtgccacaaaaacaaagtttgatttggctttttttcaaacaaatattatctttgcaagagataggagtaaaaatggaaagatattattttcgattagtaggttgttctatctgatgcaaatgaaaaatcaatatttcaagatattcatactactcatcatctgccagtatggcttgttaggatcgttatcagctaaaagcaagaaagattctatcttaactcgcatatttacatatcccgaaaaaataaagacactacaagcacctgacactgtgagttatgcatatatgaagtcttcttttcacattaacaagcgaaatctgctgttaatggctgttccgactatgtatgcaatggcacatgttggcagcagacgttatcttgaagaaagctataataaagtcactttcttaccaaatggcaagtaccaaatagataagattctgtcgctatcctctgctggcactcaccgtctatcatttcctgccatgcttcattacttgacacctaatatatatgatgtcactctgattaacgagaatgtgctttctccttttcacaggcaaaataaaatttattataaatatactattgaagaatcggcagacagcttactaaagctccatttcaagccacggttaaagaacacgctgttagtaactggtgaggcgaaagtcgatgctcgttctgggaaaattagcactatacagctaacgggcgagtatgatatgatcttttacagactatccattcagatgggaaaccatggagtacaatctctgacgcctcaaaattgcagccttacttcacgctttttattctttggtaacgatgtccgaacacattataccattgcatatcacttgcctaaaattctacctaacatctctgaagcgaatcaaaattttcaactgatggagcagattcgcccagaaccgctgacttcttacgaaaaaatggtgtatagcgaattactcaaagataaacgaaacgaagaaaaagacactaccgcattggattctgttgcaactcctcctaaagtacattttgtgaaatctgtcctttgggatatgattggcgaaaatatattcaatgatatccaccaagattttggcccaaacaaagcaggctctctgcgaatagatcccatcttaaatccattatacatggaatatagtccgagtcagggattttattataacttcaacattcgtggcggataccatttttctgaaaatagtaacatctggcttcaactaaaaggaggttattcttttcgactacatcaattttctttttggattcctctcatctattactttgatatacggcacaacggatttatcagctctggattatcaggaggtcgaagaattcaaaatggaaatttagtaaatgaattgagaatagcaacgaacaataatcgtgtttgggataatctgaatttatatgagtttaacgattccttttgggattgttatgcaaactacgactttactcctaagataggcttccaagcaggctttgtttttcaccgccgaacagcattaaacaaagtaggatttgaacttattaacaaaccttctgtatatacatccttagctcctaagtttcaagtacattatagaccatggggatatcaaggtcctacactgatggcttgttacgaaaaaagcatcaagaaattggcaggaaccaatacaccttatactcggtgggagtttgatggacaatatatcttgccccttcacaacgtacaatcgctatccatgcgtgttggaactggattttacaccgataaatctcataatgattactttgtggattttgaaaatttcagacaaactttcctaccaaatggttggaacgacgaatggtctggtgaatttgaactcttggaaagtagtctatataaccaatctaattattacgttcgtgcaaatttcacctacgaatctcctttcttagtattggcatggacacccctcatagggcattttattgaacgtgaaaggctgtatctgagtgcacttcgtgttaaaaatgcgaatccatatttagaattgggctatgcaatcaagacacgctttctctctattggcgcatttatgtcgaacatgaatggcaggactaaggattttgggtttaagtttggttttgaattatttagacggtggtaacccttcatcacagaaataaagaatatgaatacacagcatccgagttctcttactatctccaaggcaagtgcggggagtggtaaaacttttaaattagccacagaatatatcaaaatagtcattgataatccgtacgcttatcgcaacatcttggcggtgacatttaccaacaaagcgacagaagaaatgaaaatgcgtattctcagtcaactttacggtattgctcatggactgtctgattcggaaagttatttccaagaagtgaaaaaagccttagatttatcagacaaacagataagggaaagggctgaaaaggcattagacttattgctccataattacagctattttcgggtggagacgatagactccttttttcagagtgtactacgaaatcttgcacgtgagttagacttaacggcaaacttaaggattgaactcaatgacaaagagatacaagaaaaagcggtagaccagctgatagaagaacttcatcccaaacaacaactgttagggtggatattagactttattgaacaaaaaatagcggatgacaaatcatggaatgtgattggtctcatcaaggattttggtaataatatttttcaagatacctataaagaccatcaaagcgaactaactaccaagctcaaccaagaaggattcttccctcaatatgtccaacagttatatgccattaaagaaaagactatcaaggaattaaaagacattccgcaagagtttacgtcccttcttacgaaatacgacgcttgtattgacgacttgtcgagaaaatcaggaggacccgcgagctacttcctgaaaatgagcaaaggtacttttgactccaagatgctcatcaattcgtatgttcaaaaggctttagatagcccagacggttggttgactaaaacaaatttgaaagacccacggttatttcaattagcaacagagctaacacaacttttagaaaatgccgagaaaaagcgaaaggcattgattaagccttatcgcacagctgaccttattttgaagaatctcaaccagctacgcctattaagtagtattgaaaataaggtcagagaactgaacgatgaaggcaataacttcttgttgagcgacacacaaacattgctacatgagttgatagaccaaaacgacagcccttttatttttgagaagattggaacgcagctatcacatattatgattgatgagttccaagacactagcaccgtacaatggaaaaacttcaagatactgcttcaagagacaatgagtcatcaagacaccaacagcttgattgttggcgatgtgaagcaaagcatctacagatggcgttctggagattggagattgctaaacaatattgagcaagagtttgccccgtcacaccaattaaaaatcgaacctctcgataccaactatcggtcagaacatcatattgtgaactttaacaaccacttctttgaaattgcagcacaacaggaatacgaagagttggttgcctctcatacgcaaggagctgaacaaatgcagaaggcttacgcagatgtcgttcaaaagattcataaatctaaagataaacatggctgtgtacgtatcaaacttttccctaaggagcaatacaatgaaactacaattgatgagattatccaaaacattcagttgttgttagacaacggagccaaagaaaacagcattgccattttagtgagaaacaaagcgaacatccatgatatagccgacgtattgatgcaagcaatgcctcatatcaaactcgtttctgacgaggcttttcgcttagattcttcaagtgcggtgaacatattggtggatgccctccactgtttgacgcatccagaagaccaactaacagtggcaaatttggcaaaaacatatcaaacccaagttctcaaccacgatttgggcgatgatgatttgttgattcaaggaaaaaatatttgggatttcctgcccaagcaatatgtcttagaagaaaaagcgttattgtctctcccagcaatggacttggtggagcgactatacgccctgtttgatttatcttctctcaagcatcaaagtgcctatgtatgtgcattttatgatgtactcagtcagtatatttcagacaatattgccgagatagacagctttatcaatcaatggaatgagacgttgcacgagaagaccatccaatctgatggcattgacggcatcaggatgttgacaattcacaagagtaaaggcttagagtttgatcatgtcattattcctttctgcgactggaaactggaaaaagaaaaaacactatggtgcaaaaccgatgttgccccattcaatgaactacccgtgatacctattacattcaatgagggtaaaatgcaagagtcctattttgaagatagctatcagtacgaacacctgcaaaatgttgttgacaacatgaatcttttatatgttgcctttactcgtgcttgtaagagtttgtttatttttgggcagcgaaaagtacaagcgagacgttctaaaatcattgaagactcgctggagaaactacatgcgtctttatccgacagtagactggaaggagatatgaacaagcgagacgaggtgctttgctttagctacggtgagttatgggtgccttctgaagaagaaacgaaattttctaaaaatgttttcttcgcgcccattcaaacgcaatccgtagagataaagagttatggcaacagtgtagaatttagacaaagcaatcagagcagaacattcactctccccgaaacaaacgaagataccacgcagcaaagctacattcaacttggtaatgtgctacacatgcttttttccaaaataaaaaccacatccgacatccccaccattttaagagagctggagtttgaaggggtgctttacgacaatatcattacccatgaaaagctgcaacagctattggaaaaacgtctcaacaatccaaaagtggcagaatggttttcacctcaatgggaactatataacgagtgtagtatcatccacaccaatcctgtcacaggcgaagtcatgacccacagacccgatagagtaatgatgcaaggagataaagttgtggtggtagattttaagtttggtaagcctcgtcccgaatatcacgaccaaatcagagaatacatccatctacttcagcaaatgggacacgcccaagtgacaggatatttatggtttgtttatagtaacttgattgaagaaataaaatgaaatatagttttttagaatatgttgccaaagatttattagaaaaatttggtaccaatttatcacacattgccgttgtctttcccaacaaacgtgcctcattgtttttgaacaagcaccttgcacagctgtccgatcgccctctatggagtccgtcttacctcaccatcagcgatttgttccgacaacactctacacttaccgttggagatcctatcaaattgatttgtgatctccacaagtcgtttatcacctgcacaggtagagaggacacgctggatgtgttctatgcgtggggtgaactgttattggcagattatgacgacattgacaagaatttagcagatgccgataaagtctttgcaaatctacaaaacattcacgagttggatgatatctcgtatctatccgaacatcaaaagcaaatattgcaaaagttttttagcaattttgatgaaaaccatcacacagaactcaaacgccgtttcatcgaactgtggagtcatttaagcgacatctatcaccatttcaatgaaaagctatcgcagcaaggacttgcctacgagggagcattatatagaaatgtggtatcagacaaaaacctctcatttgaattcgaccaatatattttcgtaggatttaatgtgctgcaacaagttgagcaagagctgtttcgtcagttaaagagcatgggtaaagccaaattttattgggatttcgacgattactatatgagcgatgagaaacaagaggcgagtcacttcatccgccaatatcttgacgttttccccaacgagttagattgccacaatgccgacatctaccaacaattcaaacagcccaagcaaattacttacctctctgcgcctaccgaaacaatacaggcaagatatatcagcgaatggctacaacgcaatggcagaatggaggctggcattaaaaccgctatcgtgatgtgcgatgagtctatcctgcaaacagttatccattgcatccctcctgaagtaagcaaggttaatattaccactggctatcctttagcccaatcacctgtagcgtcattgatacaccagctgctcaaattgcagttgtcaagctatgcgtataatggcaaatatcgattaacagaggtgaaacgcatgcttagtcatccctacatcaaatatctctcagaaaacgcacctgaattgatagcaaacttggaagaaaataagcattatttccccactcggaaggaattgtccgtagatgaaggattaactttggtgttcaaacagttggtagacgattctacaaacctctatctttctgagtggatattagaaatacttcaactcattggcaagaacggcagagatagtgaagatgccttttttcaagagtctgtatttcggatgtacacactcatgaatcgactacatgagctcatccatagcggagatttgcgcatacagctcactacttatgagaaactcatcctccagctcattcaaaatacttccattccttttcatggggagcctgccgaaggcatccaaatcatgggagtactcgaaacccgtaatttggatttcgaccacatcctcattctctcttgcaacgaggggaacatgccaaaaggtgtcaatgacgcctcatttatcccctactctattcgtgaagcctacggactcaccaccgtgaagcacaaagttgctatctatgcttattattttcaccgtttattacaacgagcctctgacatcacactcacttacaacaattcaacagaaggaagtcataaaagcgagatgagccgatttatgctgcaaatgttagtggaaagcggacatcctatccaaaaaattgcgatgctctctggacaggaaatcaaacaccatgaagcccaccccattgagaagaaggaaatggtcatggaggtgttgtacaacatgaaccaaatttcaccaactgcgatcaacagatatatgagatgtcaattgcagttttattacaacacgattgcaaaactctacgaaccagagcccgataacgacattgataaccgcatgttcggaaacatttttcacagaagtgcagaactcatttatacgtctgtacaacatgagagcaagtggatagaacccactgagcttaacaagttaagaaccaaaagtcagctactcgaaagatttgtagatcaagctttttatgaagaaatttacaaatcaaaagacaaggtacgccctattgaatataatgggctgcaactgattaaccgtaaagtgattatcgactacctcaaacgactgttgaaaatagacgaagccttagctccttttaggattctttcgttggaagaaagagtaaatacaacgatttcttttgagactgcacaaggattgaagaccatcactgtgggtggcattatcgacagattggacgaagttaccgacccagacggtacacatcgcatacgagtcgttgactataaaacggggcgaccagccacttctgtacctacagatgtagaagatatctttagtgacgacaacctaacagagaagcacaaggattattatctacagacttttctgtatgccaacattgtaaagcagcatcaagaactcaatccgcatggcttgcctgtcagtcctgccctactcttcatacagcgaaatccgggtgatgactttgacccgacactgctcctatcaaaagaaaaagtgagcgatatcggtacttacagctcgactttcagcaaacacttacaagaagtattgaccgatatgtacgattcagctcaccccttcacccctacacaagacaccaaacggtgtacctattgcccctacaagcgaatttgtggccgaaattagtcagtaaggatgaaagactgacaaacttacagaataacttacataacttacaaataagttacgagaaggatgtcagaacttctcgtcaaaggcatcgcacattagccacttttgtgggatgcttttgaagaagtctatccatatatattgagttattctcattcaggcacatatattacctgtccattatctaattcatatgctattcctatttttttccccttggtaccatcggcattactttgatcgttggaaggagtataacgctctatctttttaccctttttggtaataatctccatattttccttacctggattttttaccatcgtaaaatcctgactgctgaacatctctggcatcttgtaccgtgttaccaatgccaccatgagagccacggcaaagaccatagacacgtcaaaaagattgcccaccacactcatgggattaaaatcttcatcgtttgaagatgatgcataacggcgacgtcttctcatactctctccttgttttctaagattaaatctgccaagaactctaattgcgtgcgctgctgcatgaaccaacgccgcttaacctgcatggttatcatgcctacgctagccgagaataatcctacgacggttgtggcaaaagccacttgcatattgtatgccatagaggcaatgtcgccagttgacaatcccacaagagcaggtcccatgggaataagcgttcccataagtcccaactgtggtcctaatttagccaacaaggcaggcgcgcctatctctttattataatctatttcaaattgggaaagcaacctctcaatgtgttgctcgcttcctttcgcgtctaatatgcgatgagcgtaaactaaaagaggcgacgttctttgcataggcagctgctctttgagactgggcaatccagcgacggtaagagtgtcgaaatgcttttcaatgacacgcaccgtatgtcgcatgccaagatactgcccgaagaatgtacctaacaagagtaatgcccggataaagagcaacaataaaattacgatgacaggaattaaaagtcccgtggtaatccaaaagagaaaatctgaaatataagtcatatctgtttttatttagttttcaatcaagatgtttttacaatcatgtatttatcaatgtcctattttattttaatgtagcgtatcaatgcccctaagaaaacgctcagtgcaagcaacaaagccactccagccgtagcgaaccaattaacaggcgaattgctgttttgtggcgtcgacacccgaaccgttgccacgacagcaatcatcgccacgattaaatttgagaggaaaagcatttctaagcgtacgtctctatcgcctaaaagtcttcgcaacagaaaagtgagcaatggtatggatacgacaaatactgccgccaatacatatgctatgagcgagaacgagagtccgggcaagccaaagatgctctcaaccagcatggcaaaaacaacaggaaagattgcaaagcctggccaccattgtaatatagcgtaatatattttttgacgaaacgtagcagcctgtggcatccttgtcttttcccgcgccgcaaccatacaaaaaagcaattggacgataatgtctactgagagtatgacagccatattttgcataatcgtctcagaagctaaccattcggctatatgcgtacgcgattggttaatggcgatttgccatgtacttatcgtaaacactgctatgagcatggtgtataccgcaattcctttccacgttccaaaggtttgcttcaatagaaaattgaagcaaaccaataacataagaatagctatgacagtaaccattatatcaatttcattgtttatttttttttgctctttgctgatactgaaaattatctatgatggattttttaacttgttttttaagtcaagatgtattctcatataatcacatttacccataagatggtttttcagaaacagccttcattcatctttatcgcattttacgattgcgtcgcactatgaatgcaacagcaattatggcaataagtacgacaatgataataaccgtaccgtttacggtgtcagaggtagtattttggttgtcagacaaagtctccttcttcatggtcattccctgtttgccaccagtagccttctctcttatctgatcaatgtttcggagatattgttgccgttgaacggcattgtccgctccctccttcgcgataaactgacggagtttattattgttacacacaaatcctgaacatgaaggtttaaagcggttcactaagtccatgtgccgcgaagccaaggtctttatttgtccgcgcgtaggtttccacatacctttgcgcgcgccttccagcatcacggccgttatctcttcaagagctgcaggatttttttgttcaaaatacttctgcatacctaccttatattcgtctttgatgtaaacttgataaattttattccaaaactgttggtcaatcacgttggtacgcatcacgttccaaccaaaagtgttttgtatggttttggcaaactcatcagctccctcttttccactcttgatatgctctttgatgtaagcaggattgaagatggtagtccggctctctatgcccaccgcctctttcaaatcttgcatacgcatattgtaatgattgcgcatatcactaatgtaagcatcgggttctttgcctgttgccttggtgacggctatgttgagcccgcccataaactcataaacatggtctaaacttaatgctccccataagttactttgtcgcggttgaacgatgacgtccgtacgagtaagagcagcttcgaaggcatattgtttaaaatcctcccactctttgtcatcaccatagaaagctcccatattattaagataggtatccgcaatctctgaacggttttcccattggtcgctactcattaccatcgactgtatgttggtgccataactgccatttactccgccaaacacccgtcgtgcagccatgcttcgtgcttcttttggtgaaacacctttctctgtcagcactcgctcggtctcctttactccctcgcttaccatgttttcatacttatcatcatgagcagcggcggccatttcgacagccctgttgattaagaataaacgtgatgcggctaagtctcgcaactgtccagaggtctgtacaactacatctatgcgtggacgtcctaactcttttgacggaataagcttgatgtctgatatgcgtccaaagaagtcacgaacgggttctacccccaaaaggtataaaatctgggcaatagatgcgccttgtgtttcaataaactcactactccaaagcgtaaagctcacttttcttggaatgctgtcatggtgatgttgccgatacagggcaatggtgttttctgccagttgtttaccctgttcccatgcagcttcgctgggagttgtttcggcattaatgctatacatgttacgccctgttggcaatgtgttaggattcgtcacgggatcgccacccggtgagggtgatgtatacccaccattcattgcgttaagaatgcttctcaattccattgtggggctttgtatcagcaatttgcggtatttcgacacgttcataattgttcgttcggcttctatgacagcaaacgcgaaatccttttcatgagatgagaacgaaggcttttgcattctcatgccacccattcccattccttttggcatatttcctttcatggaattcatgttctttttcatgcctttagccatcggtgactttttactcatgccttgcatcatagccatcatactggatggcgcattaagtgcctcgcaaagatgatgtgctttttgcaattcggcaggagagatacctaatacttggcacaccatttttggattgccaagagaagggtttgcaagaagtttatctactaacttctgagcagggtaaagataacgttgtacgaacaaagaacgttgtttcatcatgacatcagacgctctccccttttgcttgtctactgcgaattgcgcatatgcaataggatcggcacacatagccataaccgtagagtgcaagccttgggtatcataaggtactcccaacgtgtacaaatgcccaccaatcttttcggttgccaattcttcaataaagttgtctatctgttgcatctgctgttcattgtacggccgcttaaggttctcgtctaattgtaagtcgcgatgaatgcccattttcacaaccatcgccttcacttgcaaggctgtttccgttataccaggaagctttttagccactttagtatgatacacatccattttatccaataatgccttgtacatagtgcgtacgtcattcttcatataaggctgtgtaagataggtttgcaagcaagcatatgaacggcgtttggcgataaccccctcgccaacattgcctactgtgtatatatatatatgaggaattgaacccactaatctatcggaccagtcctcattgctcaaagcaatttgctttttgggcgtaaactccatgctgccatgtgtgccaaaatgcaccaacacatcagccttaaaagcatgttgcatccacaaataagatgcgatgaaagcatgagagggagccgcatctgttccgtgtacaatcttgaaggagttaccctctgtgctaacagcgagttgaggcatgagaacaatattgcccaattgtattcgtggtatagccaattcacctttgtctgtcgctaagtaattaccgggaaattctccattcttctttactacttccttatatttctcaccaacaatagacgcctttacccatttatcatattcctctttatttaccagtgcaggatgccctgtatgaatgaaatgagcgatggtgcctttggcatatgtacccaaaaccgctccttgttgttgaatgagtttttcaagtccctctgcagatgacggaaggccttgcacgttatacccctgttgcttcatggtggtgagcaaattgaacaatgaagagcagacgtccataccacttgctgttaaggcattttggccaggccccttgtaataataaatggcaacacgttttttgctgtttggtatatttttcaagcgaatataatggtttaccgttttcacaaaagtgttcaatctgtcgggtatcgcatccacataatcaagaccgtcttttcccttataatgagcgaaaagagcaaacggacggatagctccatctatctctggcatagttacgctttgcgataaaaatccccccatcattccctgtttgtcattacgccaatcctcctctggttggtttacattgagcggagcgaacaagggaatgttcttttgctgcaagaaagctaccaagttatcaccaactcgtccatgtgccatattgataacggcacgcagaggaatgctgtcagcatgtccctcgtctataaattttcgaatgtcgttaacaggataaacattatttcctgtttgttccaatcgttcaatcaacgaggtaggttctcccatcggacccatgaccactattgccggtgcgccttcgtgccacaacccttgtttttttaagtaagcattgtattcttttacagagttaaactgcaaatcatcggcagccttatcctctgttttcggacgatgatgcaacagcccaagtatatgttctaccacaggttgtggcgttggaaccctgaagattttagcatcaatgtatttgcgtacatacaaggcgagattacgatagttttgtcgtccaccgtttcccaggtacagccgcaaggtgtcagcactaacctggtcaatggtcgtaaaatcgttttcgggagttgtaatcatcgtacttagtatgggaacccccttttgggcagccgtcgtgatgagcttgcgctgttcaccagtaagtttcagccccatggcttgcacaaacaccatgtcgtacttgttgagctcgtcaagattttctgcacttaaattttctatcttaatcattccattgtcgttggcgcgactaatttgagcaagttcaatggcttgataatttacaaatgcaatacgggtacgtgagaaccaatgattccaaccccatgttgccaaaatgatgactattattgtaatagcggcaatgataattttctttttcattatgttctaatatgattatagcttgagcatatctgcaatattaatagaaatcgtagcaacataagtacgaccattttgtggatattgtaatcctgaatcaacagctttgtccttatagttcagcaaattatcaatcatgacaccgatagtaatgccatggggtaactgcgagcgcaagttgagcgaacagatagtgcgtgcatcaaaatcttctcgcgtgaaactctcaacgactttacctgtctgctcatctttattacttttgtaagtgtaggtagagagagccgacacccagttggtgtagagtgacaatgtttctgtcgtctttccccatttctttgaatatacggcacttaacttggcgctatgtggacgcagccatgacaggttatatccatttttcttattataatcggtaatataggtgtatgctcccgcaagttgcagcccccagacaaacttgtaattggccgtcgcctccaccccaaacgtcctaacgctgtcggcgttttcccatctcatgtccatgtttttttctggatgaacatacgcataagttatcttgttgagataattattatagtaagacgacagggaaaggttcaacccattcttatcatattcgacagatgcggacaattggcttcccacttcaggtttcaagttaggattgccatacatttgtataagtccccccatggtccattcctgatacaattcttttaagtttggcgcacgatacccttgtgaatagcctgcgcgggcagtaacaaacgcccaagggcgatacatgactgatagtttgggtgtaaagtgcagcttatatcttgtaaccttgtcggcacgcacgcccgccacgatgttcagttgctgccacggtttccagtcttcctgcaaacagcaagaaaattgacttgtgtgcatttgtgcggtgtctggcaggaaataatgtttcaagtcttcgcgaacatagtcaacacctgcgcttatggtgtgttttcctaacgtacccgaataatatagtcttcccgttgtgttgatgttgcgatacacatgttctttcaggtctaccttgtcaaacacgttggttttctgatagtcgtcacgtatcacggtcagctctatgttctgattgctggatggtatgtatgacagttttccgctcaaagtcaaatccgtgtaaacctgatgcagttttttgtattcattgctcggacgcctgttgttatagtatgagccccgaaaatctgcgcgtagctggtcgttgaacacatatgacaatttttgagagacatccaatatgctgtatccgtgaatggtagactggtacgcaggcagcgtatcacgtttaaccacccccttagacaaacgtgtctcacgcaccttacctatactatcggcaatggtatacgactcacgcttgcgatacccgaacgaggtgagtgctgaaaagttcttacggttgacacctgccgaaaccgagtacatctcgccgtttcgccctgcatatcgggtggaaacgcgagcggtaacgggacggaaacctttgcgtgtaatgatgttgataacacccccgatggctctgctgtcgtataaggtagcggcagctccgcgcactatctctatccgatcaatgtcgtttacgttaaacctgccgtaatctatgttgttggcgccaccctcaccactgattctctcaccgtcgagcaaaaagagtaccgcctttccgcccagaccttggtaagtgatttcggtagcttgtgacatgtcattgtacgagaattgcaatcccggtaatgccgtttgcagcagtgtggtaaggtctatggcgtttatcgtttctatttcgcgccgtgagataactcgtgtcagcacaggcatgtcttttaatgggcggtcactacgggtgccggttacaaccacttcgttcaggttggtgcgcgaggggaacagcgtaatgctggcgtattgaccggggcgtacgatgacatgtttgggctgaaagcctacatacgaagcagtaatgtcataattacgattttcgttgaccgtgatttcaaacatgcctttgctattggttccttgcttaatggtagtgccagaaaccgcaatgagtgctcctggcagcggtctgttgcattcatcggttaccgttccacgaatggtatagcgagaagatgcagcgtcggctttggcagaggtcgttacaaattggagtattgcgaataagcagagcaagaatattttgttcatgaaaacaatgaaaaaatagatgagggttacctacctttgatggtttgtttgtttctcacctttttaatatatagtgattgatattacggtgaaagacgtataggtgacaacgcttttccgaggatggacattcggtttgataggttgctgccttgataaagcaaaaaagccacctctcatgcccttaccaacggaatgaaaggtggttatcttcacaagggtttaattctttttaacaaacttgtagtcgaatgacacttgtttcttctttcctgtcgcatcagtaatgtctgtgaacttgatggctgcaaaacttccatccttgaattttacaataaagatgcgccctttgtttgccatttcatattgccccatccccgcacgacgcatatacttgtgcagattaggattagaaaatcccttgctgtatcccattgtcggaggcatctgcatcatacctgccatatctaccaaaatccatacaggcttgtctggtgtccatgttccacccttgggaagttcagtgatttggtcaagagaggtggtatccttacctgcaatcatcacctcaccgccattggtcatggggtcatacaagtggaaagcgatgtgccacttctttggttcgttattagcacgctcgggtacctctttggtaatctgatccatttcgcccgtttgccggttcatcatgccatacacccatgtgcgataatctgtctgggtttcagtcttgccactttccaaatcaatgtaaacccacttgtcgtagttggtcatttgtttttcttgcaacaaaatatcggcatgcttgcaaatcacactttgttcttctttctctttcttttgggataaatcctccgatttgtcacacgatgtccatgtaaagaccatggctgtaaggcccaaaaacagggcagtagtcatttttttcattttaataattgtttgaataatgagtgttataaatttggttgcaaaggtacgaagatgaaaaaaaatgcaaaatacctatttttatgtattttgttcaattgtagataagctgacaaaatgattttttagagaagtaactagttgtaggtagaagaaaaatgaagagccttaaaataaggtgacaacataaaggacatagattaattattatataagtttcatgttgaacaagctaacaacctgataaacaaactaataccttaacagacttacatttatacctacaaataggtatgcctgagtaacgtcacaattagtaggtattgctcattatattgataagacgtacttttgcaatacaaaaggcgccataactcaaatatgcgtaccgcatttggtttgcgtactattatagagattcatttaaacttttacaaaataacaattaacatgagaaaatttttactacctgctcttttggcagtattgtgtttaggtgttaacgcccaaagtaagaaagcacccaattattacagagctattccaacagttcacacgcatcgtcttgcacaatggagtacgttcggaggttcagaagtctttaaatataaatatgacgacaatggctttctgacagaagtagaatctaccgaaaatgacaaaccaacagaaatcatcaagttcgcttatgatgcgaatggctatttgaaagaagaaacacgctataccgtcaagccagaaggcggacagcgaaaagaccgacgtgacgtttacgatcgtgacgacaacggatttatcaagacctatcacagatacacgttaaaaccggacaaagaggggaatcttgtattgatggaagacgtacgttctacatacgagtacgatgcacagatgcgcgtgattaaaaccaatgacgtgcagtttgacgagaaaaatctgaaactggaagatttcgcagatcgccataccaccattacttatgatgacaagggacgtgagcagacttttagttttatgatgagcaacggcaacaatgtatggaaagaagtgtttgaatacgataacaacattgacgaccgcatggtaggtttgaaatatattccaggagaagaagcgacggagggcacaaccatggagctaaagtatgtgtacgatgacaatggagacatcacgaacacaggaacagaagatttcccctacacattcagctatggcgatgaaggcgatgaactgtacgatgccgcacatacgttcattcctttggtgcaatcagaaggagaccgcctttacttaggtccgcgcaactgtttgtacttcaaccatcttccgctcaacaaggcttttaagcatgttcccacgagcgaagctacggatgataatgaatatagttatgaagaaaacacggcagtagagaagaaaacggatggcattgcagaaattacccatgaccaagcgaacataagctttagcaatggctgcttaatcatagagggagcaacaaacaatggcacggagcaagtttgcgtgtacagcgtaacaggacaattggtggcaacccatgcggtaagaggcaacaagactatctgcctaaacacgctgcctgctggcgaatatatagctaaaataggaagcaaagttatcaaattttcaaaatcttaacacattgcgacagtataagacaggggagcttacggcaatgaagccgtacccccttgccgttactttatttccatacttacgcaagcaacgctcgtgtgcttgcaaaagaaatcaacaatgaagaaaactctattattcgttttaatcgccatttccaccttggccaatgccaatcccatcggaaagcaagaggccatgaagctggccatgcgatttttgaagcaaaaacaatcaacgacaagcactcgtgcaaaatctcagcgcaaccaattgaaaatggtcatgcagtgtcccaacgcttattatgttttcaacaatggaaacgggcaaggctttgtcatcacgtcggcagacgatcgcacagacgctatcttgggatatgcctatacgggaaagtttgacgtaaacaacattcccgtgcaattgaaagacttgctcagtttgtatgaacacgaggtaaaaacagctgtccgtttgcgattaaaaaacctaaaaaccacttccagaacccgtgcgggactaagcgtgaaacgctccattcgtccgctcatcgaaacacgttggaatcaaggagcgccctataatgacgcctgcccgatgggggcttttgaacgaacggtaacaggatgcgtcgcaacagccatggcacaagtgatgtattatcataaatgcccacaaggtgaaaccctcgacacgatacccagctacaagagcccgaagataggaaaggttttggacacgctgcccaaaacgacattcgactggaaaaacatgctgcgaacgtatgacgagaatgccaatcgggagcagaaaaacgccgtggcgaaattgatgaaatattgcggtgtctccacggaaatggactatgcaaccgccaagcaaggaggttcgggaacggtagccgttgagttgccatacgcactgacacactattttggatacagcaaggcggcacgctatgccgaccgtagtggatatacctcaaagacatggaacaacatgatttacgaggaattgaaagaaggtcgccccgttctgtatggtggtgtgacaccaaccggaggtggacacgaattcgtatgcgacggatatgagtcgggcgattactttcacatcaactggggatggagcggcttgtctgatggctatttccgcttgtctgttctcaatccagaccaacaaggaataggatcgtttgagggcggatattcattgagccagtgtgccattttaggcgttaagccgaatgaaggtgaagagcagttggacgccatgacggtaatagacctgcacttgcgcggacttagccagatgtcgagaaaaagaattgagcaaggttttaaaggcctcagtatgtcttacgaggtgttcaattacatgctgttgccctttgaaggtaaaatgggcgtgggcttatataaagacggtaagttgatgaaggtggtgcatgagagcgaacttatctcgtacgagccaatcacccctaaaaggactttctataaggcaatcttgaaaaattttggtgcaggactgaaaggtgactatcagttgttgcccatgtgtaaagacaaaaaggcaaatacctggcaactttgccctggctcagagaaatctgtatgtaacttacatattacagaaacccagctgaatgcttccatcatcaatcctcaaaccatagacttgaaattggtttccattgacatgccaaaagtcatcaagacgggcagaacttataaggctatggcaaaaataaagaatgttggtcccgactttacaggctcgttaagttttgttttcggcaacaaacgctcggtattgggcttatccatagcacctggcgcaacgatagaagtacctttgagctttcaacccgacgtagcgaagccgaaaacgcaatatcgcattaacgtatgggacagcatgcaagatcgtgacatcgatttcgtaggcaaaggagaagtggacgttgctgaaggaaagaacataccagacgccaaattaacggcatcggtattctgcacaaacggcagtagcaaaaaggcggatgaactgtacggcacccacatggaaggacggtttgaggttaaaaatacggcaacagatgattacgaccgtgatttgctcatcgcgatagttggagagaaacaagatgtacagatgaaacagctaaatgtcatcattcccgcaggaaagacaatcacactaccgtttgctttcgacaacttgattcctggaacaagatatatcgtaacattactgggatacgaaggtatctatctaaaaggtaaggctatatgcaatggagccattacatgtaaagctgccgtgatgaagtatctgtcagatggaacgtcaatggctcttgagccagaagggagtattgacttgacggatgccatagcggtagacatgcacgacttgaatgtgaagcaagatacaaagttgaagccaagcaacaatcccaactgtctatattatctgcacgaagcaagcaccgtacccgagactttgaaaggaaaaaatgttatcttgggcgatgaagcaccgaagataaccttacaaaccaaccagcccataaagatgttgcgcaattttaccgcaagagaaattacatgccagcgtcctttggttgccaatggtaaggatgcaggaagcgcatggactaccgtctccttaccttttgttcccgatgccatcaagataaacaaccaaccagccgagtcgcatgtttataatttcattcatgagcaggagaacaaactttattttaacacaactcagcatatagaggcttattgtccttatcttctggaaataaaacacattcataacgcaacagcaaacatgatgctgaccattcatggcaaggatgtagaagtaaatcagcaagtcaagagtgttctcggctctgacaattataactttgttggaacgattgaacaacatcagccagtctcggcttatctctataatgcagaaacaaattgctttgagctgtctcaagcaccaaccgttgagtgtttctctgcttttgtggagcctaatcataccaataacgaaaacgccgtgaagtcgctggctgttgtattggatgacgtagagttgggcatccctacccatacaacgacaaatgctcaccagtatgtcatctataaccttcaaggggttaaagttggagagggtaaagaggacatcgctcgtttgcctaaaggcgtgtatgttgtcaatggaaagaaggtgattaaatgatataggtaactctatgtaacacataagggttcgcccttcatcatcaaaacctattattccatgccttttgaatgggatggtgatatgcaaacgctctgttaattttaaccgattgtattaaaattagcagagcattttaaaattactacaagaagaaaaaagaagattaagagtaagcactcaacattagtcgcctttgtttgatattccttctctactatcatttagattgatatgataacaaccaaaaacgtcaacaaaacagcgtatgcaaaattgggggtacgcaaatggaaggagaattgatgctgaattttctttacaaagaccctctcataactcgcgtgaaaacaaccaacgacaaagtgggtcgcaaatacgcgagatatgagcaaggtttgtaacctgctgttaataagaaagttatgcgaaagtcgtttcttttcgttcgcattttttccctttcttagcgactgaagcattgggttaagcgtgttatttgcatgctttaatgccgctgaaacatgtgaataacacctctaatacatgtttccaagcacgttaactcaatgtttcagcttgaagagacgtttattttgtgaaaatcatcccatttttgttgggtgtttgcctattgaatttttctattttggaaattttcaatggccgttttttggtaaaataacaggacaaaaaccatttgcacgcacctgtcatcatcctattaaaaagtataaggagtgacaagatcatcccccgctaaagaaatttttagtcgatatttatccgtgtaggttatttgcattaaacgcttcggttggggtacatcatttgtcgacaaacttaatgcaacatgtcccatggtgcggcgaaaattgatttcaacgcatgggtgtacacacaattctgttgcatctgccaacttcacaatcatcatatccacgccaaaaggacccacatacttgccagatacttccgcaaccaacaaggaatgcaaggtacgttgcaagaaattgagcaaatcaagggatataaattgtgcaatctcttgacgctttacctcctcactggcaacgatattccctaaataagcgccatgaacagtagaaaagagagaaagccccaaatattggatatccccttgtgcggaggcttcaaattccattccaaaatctaataccttttcatattgtggttctatcatgataccaccctgtcgatgtatcaggtttttgcaccacccttctacatggggtgtgaaatcatgatcaacatatcgcatgcctctcccactgctactccatggtgctttcaacacaaaacgttgacgaggttgattgaacagtgtcttgagactttgaacttgtcctgtaaaataagtacttttccccacaaatcttggatgagaagcaaccaaggcaggaaggatatgggtagctgcaaacctacgattactcatttgtcgaatggtgtccaactgtgcatcgttgggcagtaccgctgtaaagtcaggattacaggctaacaaacgttttaccaaacttttgttcattccccatgattccaccttcatgggtgacaatgtagataattgttgcaaatcacgatccgtgacaaatatcacttcctgcgcatcatcaccatgatgccgtaccgcttctaaagctgctgggacatcgtcgaccaataccatatctccatcttcagcccaaagagctggcagataacccaagtcagcgcgcaattcacgggctgcatgtggcgcagtaaactgttccatattgacagccaaagcgatgtcatgttcaggattgaaaacatgcaatttcattgaacaaatctcctttcgttttaagtacatgcaaaaataataaaaaaagatgatattttgcaatatagactttgcaattatcgaaattaatattacctttgcagtggttaaaacttcataattagttttttacatggaatctttctttcgcacacatacgaaccttgtcgaacatacaaaagcgccagttcgtcgcaccctcatggatgagattgactggaatgataggttgattggaatcaaaggctccagaggggtgggcaagacaacctttctattgcagtatgcgcaagagaactttgaaagcacagatagaagttgtctgtacatcaatatgaacaacttctactttcaaggatgtggaattgacgaatttgcagccagttttgtacaaaacggaggaaaggttttgctgattgatcaggtttttaagcagccaaattggagtacagaactccgccgatgttatgataattttcctgatttgaaaatcatttttacgggttcgagcgtcatgcgcttaaaagaagaaaatcccgaactcaatggcattgtcaagagttacaaccttcgtgggttctcttttagggagttcttaaacttaaaaacaaaccaacaatttagggcttatacgcttgatgaaatccttaaagaccacgaacgcattgttaagcatatcttaccaaatgcaagccccaataaatatttcaaagattatatccatcatggtttttatccattcttcttggaaaatcgcaatttctcggaaaatctactgaagaccatgaacatgatgaccgaggtagacattctgctcattaagcaaatagaattgaagtatttgacaaaaattaaaaaactgttctacctcttggctacagaaggtcagtgtgcgcctaatatcagtaatttagcgcatgagataaagacaagccgtgccacggtgatgaattacatcaaatatctggcagacgcacgtttgattaacattatctatcccgtgggacaggatttcccaaagaaacccgcgaaggtaataatgcataatactaacttgcaatacgttatctatcccaacaaagcaagtgagcaagacctgatggagacgttctttgtgaactgtatgtggaaagatcataccgtcaatcagagttccaaagaccatttcttcatcgtcgatgacaacaaaaagtttagaatttgcgatgccaagagcgaacataagataaggtacaacaatgacacgctgtacgcaagatatcatacagaggttggacaagataataagataccactttggcttttcggttttctatattagcttaacaaaaagcatcaagacaagttcagagttatacaaaagaatatcaggattttgaatacatagatgatatacaaaacattcattaatatttaataaaatggcaaaagagaaaaagtttatcacttgtgatggtaatgaagccgcagcacatattagttatatgttctcagaagttgcagctatttatcctatcactccatcatcaacgatggcagaacacgtggacacatgggctgccaagggtcgtaaaaatatgtttggacaacctgtcctcgtgcaagaaatgcaatcagaagctggcgcagctggtgccatgcacggctcattgcaatcgggtgcactgaccaccacctacacagcatcgcagggtttactgttgatgattcctaacatgtacaagattgcaggcgaacagttgccttgtgtcatcaatgtttcagcacgtacagtagctacgcacgcactgtgtatctttggagaccattctgatgtcatggcttgtcgacagacaggtttcgccatgttctgttcaggttctgttcaagaggttatggatttgtcagccgtaccacacttggcaaccttgaaaacaagcattccattcatcaatttctttgatggtttccgtacctctcatgaatatcataaaattgaaatgattgatgaagaggcgatcaaaaacatggttgactacgatgacattaagcgtttccgtgatcgcgcattgacacccgaacgccctgtaacacgtggtactgctgaaaacccagagaccttctttacccatcgtgaagcatgtaaccagcattatgaggatgttccagatgtagttgaaggctacttgaaacaaatctctgatttgacaggtcgtgaatatcatatcttctcttattatggtgcaaaggatgcagagaacatcatcattctgatgggatcggcttgcgaagctactcgcgaggtgattgaccaccaaatgaaagaaggtaagaaagtgggaatggtttctgtacacctgtatcgtccattctctgtaaagcatttgttagctgctgttcctaagacagtaaagcgtattgctgtgcttgaccgcacgaaagagccgggtgcagaaggtgaacctctgtacttggacgtaaagagtgcattctatgatgtagaaaacaagccactcatcgttggtggacgctacggattgggttcggcagacatcactccaagccacatcatctctgtatttaacaacttggagatgaacgaaccgaagaatcatttcactgtaggtatcgtagacgacgttacatttacttcacttcctttgttggaagataagcctttagcatctgaaggattgtttgaagcaaaattctttggattgggtgctgacggaacagtaggtgcgaataagaactcggtgaagattattggtgataatacagacaagtattgtcaggcttacttctcatacgactccaagaagtcaggaggttttacctgctcgcatttgcgctttggcgatcatacaattcactccacctataaagtgattacgcctaacttcgtggcatgtcacgtacaggcatatttaagaatgtatgatgttttgcgtggacttcgtaagaatggaacattcctgctgaacacggtcttcgaaggaaaagaattagctaacttcattcctaacaagttgaaacgctacttcgctaagaacaatatcaccgtttactacatcaacgctaccaagattgcacaagaaattggtttgggtaatcgtacgaacaccattcttcagagtgctttcttccgcattacagaagtcatccctgttgaccttgctgtagaacagatgaagaagttcattgtaaaatcttacggtaacaaggggcaagatattgttgataagaactacgctgccgtagaacgtggtaacgagtacaagcaattggaagtagacccagcatgggctcaactcgaagatgacccagaggtgaaagaagaagatgtacccgcatacatcaaagagattgtacgaccaatcaactcacaagcaggtgacttgctcaaggtttcagatttcatcaagcatgatatggtagatggcaccatgaaaaatggttcagccgcttacgagaaacgaggcgttgaagctttcaaccccgagtggacctcagaaaactgtatccagtgtaacaagtgtgcgtacgtttgtcctcacgcagctatccgtcctttcgttttagatgaagaggaagtgaaaggctttgatgatactactttaactatgaaggttccaagaccaatggcaggcatgaacttccgtatccaagtaagtgtgctcgactgtgttggttgtggcaactgtgccgatgtatgtcctggaaacaagcaaggaaaggcattgaagatggttccatttacacgtgacgaaaagatgatagaaaattggaactaccttacaaagaacgtaaagagcaaacaacatcttgtagatatcaagagcaatgtgaagaatacacagtttgcacagccgctcttcgaattctcaggagcatgtgctggttgtggtgaaacgccttacgttaaattggtttcacaactctttggagatcgagaaatgatatcaaatgcaacaggatgttcttccatttattctgcatcattaccatcaacaccttacactaccaatgcagaaggaaagggaccagcttttgcaaactcattattcgaagacttctgtgagtttggtatgggtatggtattgggtaataagaagatgcgagacagagttatattgctcttaaaccaacttattgaaaaggatgatacctcaagcgagctgaaagaagctgcacaaaaatggatggaagcgaaggataatgctgatgcttcgaaagaagcagcagctcaactcagacctcttatccaggcttgcgctgacaaaggctgcactattggcaaagaattgatgacacttgaacattatctcatcaaacgttcgcaatggattattggaggtgacggagcatcttacgatattggttttggtggattagaccatgtcatcgcatctggtgaagatgttaatttcttggttctcgacacagaggtttactcaaatactggtggacagagttcaaaagctacgcctttaggtgccattgcgcaatttgcagcacaaggaaagcgtatccgcaaaaaagatttaggtttgatggcaaccacctatggctacgtttacgtggcacaaatagctatgggagctgatcaagcacaaacattaaaggcgattcgtgaagcagaagcttatcctggaccttcactcatcatcgcttactcaccatgtatcaatcacggtttgaaagctaagggaggcatgggaaagagtcaagccgaagaagctcgtgccgttgcttgcggttactggcatctgtggagatacaatccattacttgctaacgaaggaaagaatccattccaactcgactcaaaagagcctgattggagtaaattccatgacttcttattaggtgaagttcgttatctgtctgttaagaaagcctatcccgatgaagcagaagaactattccaagctgcagaagacatggcaaagttgcgctacaacagctatgtaagaaaagcacaagaggactggagtttttctaatgaagtggtagatgaaacagagaacaacaatcctaatacagctgaaacaaaagaagaagtagttgcaagcaagccgaaagaagattctaaggctgagcatgtagatgcaaaagcttaaacatctgtatagactttgtgtatgagtaagaaagcttaacgcaatctcgttacacaaaaacactttatatttatcacagcagggttgtccttgctgtgatttttttataaatagttcggctctatttcatgattgtactgctgtatagagtgttttattcttaaaatctttcttttgaacatattgttatattcatcaattttcgtatctttgtccatgagaatcagtaagaccatttacagattctaataaccatacaataaattatatcactcactattaaaagaaggaatgatcactttttcaacagaaaatatttttctcttaggctctttcttagtattagtcagcatacttatcagtaaaacaggctatcgcttcggcatcccaacattgctgttattcttgtttacaggaatgttttttggtagtgagggattgggtatggaatttaatagcccacacgacacacaattcattggtatggtggcattgagtatcatcctgttttctggcggtatggataccaagtttaaggaaataaagcctatcattggaatgggtgtcatcttatctactttgggtgtagtgttgacaacagtactgacaggcggatttatatttgcattatcgcagtgggctggtatggatattcaattgtccttgattgtatccatgctgttggctgcaaccatgtcttcaacagattcggcttctgtgtttaatcttttgcgaacacaaggaattggcttgaaacacaaattgcgaccaacgttggaattagagagtggtagtaacgatcctatggcttatatgctgacgatagcactcatcaacgtagccctctcgggtgatgatttttcttttttagacttatcacttaacattggtgaacagtttttattaggaggagcattaggctacggtcttggtcgtttaacggtttggttgattaatcgaatcaatcttccaaacgcagcactctatcccgtacttcttctaagtatggtgtttatcacctttacactgaccgacttgttaaacggcaatggatatttagcagtttatatagcaggacttgttgtgggcaactgccgtttgtcgtatcgacgagagatgtctacgttcttagatggacttacttggttgctccaaatcatcttgttcctcacccttggattgctggttaatccttcagagttgattgacgtaagcctcttctccctcgccatcgcagtatttatgatgcttgttgcgcgccctgtaagtgtatttttatgcttactaccctatcgcaaaattccattgaaagccaagactttcctttcatgggttggtcttcgaggtgctgtccccattatctttgccacatatcccattattaacggtgtcgaaggagcagacctcttgtttaatattgtcttctttatcaccctgctatcacttacggtacaaggtactactatctcattagtggcaaaaaaactccagctcgacataccagaagaaaagagcggtaatgagtttggagttgagattccagaggaattaggctcaaaactaaaagaggtaactttagaagagagcatgcttgaaaatggaaacttattatctgaaatgaacattcctaaaggaacgcttgtcatgatggtgaaacgtggaaaaaccatcttggttcccaatggtcaattacctttagagaaaggtgacatcttgttatgcctttccagtgccaacaagaatcctgagtagatgattcaaagcgaacattagcacaacatacaataatgctaaaagagttgtaactcatctgggagttacaactcttttaatatttgtgattaagtttgtcttcctttactttactttgtcaacaatagccttgaatgcttcagggttgttaacagcgagatctgcaagcaccttacggttaatttcaatgccagccttgttcaaagcacccattaaaacggagtaactcattccttcaaggcgagctgcagcattaatacgctgtatccataaagagcggaagttgcgcttcttattacgacgatcacgatatgcgtaggtaagacccttttcccaagtgttcttagctactgtccacacattctttcttgcaccgaaataacctttagtctgcttaaggattcgggttctctttgcttttgatgcaacatgatttactgatcttggcatagtttttctttcctttaaataatttgactaaaagtgaattaacgcaagttgagcaagtcacgtacttgcttcaagtttgacttgtctacaagagtgtagcctactaagtttctcttttgcttcttagtcttctttgtcaagatatgactatgataagcatgattacgcttaatctttcctgttccagtgaaactaaagcgcttctttgcaccggaatttgttttttgttttggcatttttttactttttaaattgttatttatttactactgtggcaacgtatataccaagacgttacgcacaatccagttttattcttcttctttaagtttcttgagtgcctcagaaccatttttagcgttatcaaaaagtccgccattagacttttcctcctttgatgatccgtctgttggaactttcttcttcgcctcttttgcttctttcaaagcttgctcacgatcacgcttttgttgactcttcttctccacacctacttgctttggtgagagataaataaacatccgtttaccttctaactttggcatttgttctactttaccaaagtcttccaagtcgttagcaaaccgtaacaacaacacttcgccttgttccttaaacaagatagaccttccacggaagaaaacgtatgccctcactctgttaccttcattcaggaactcgcgtgcatgcttgagtttgaactggtagtcgtgctcatctgtttgaggtccaaaacgtatttccttgatatctacctttacctgcttctgcttcatttctttagcacgcttcttctgttggtaaaggaacttactatagtcgatgagacgacaaactggtggctgcgcatttggagagatttctacaagatcaacatcctgctgacgagctaaatccaaggcttgacgggttggcattacctgcgatccgtcatcaccaacaacacgcacttcccttacgcgaatctgttcattcacgcggtactgtttacttaatttgtcatttttcattcaactatattaatggttctaagtgtgaaacggctgcaaagttactgattttattacaataagccaaatctttattcatattttttagcacaataagcatcatcacacgaaagtgtagagacgattaacagatacgaaattacgacttttgaatacagacaacctttcagtttcttacaaagtacgattgtagccattcgcaaacaaatttctatgttcagttatttgcattagcgtaggttctatctgtgaacctcgaagcttgaataatcttgctgtttgagcaattcttccaacgtaaaagttctgtgctgtcgcataaattgatcaatcatattcacttgagaagtttgataaattcgtcttccaagcactttatttgttgtccacatcatttttgccatgtgctgttctttcacaaattctgaatgctgatgctctttatttaacggatatttacttaacagatagaacaccaaacaatccgggacgataaattcacgcttcatagattcacgctgtcgctccgtatagaattgtcgataaataggataatctgcccctaaatacttatccaaagaaatacctatcgcatcatttccaatcactatactttgatctaacgccccaatttgtgaataaataacaggaactttgagagcgggcaatagcctctggagttttctaaaggcattacttaaatctttattgatatcgtccatgcttacaaactccgattcggcatcggcaatgatgacctgcaatagcgaatcttgatagaagtttaaaaacttggcattgattcccgtctcgtttacttctccaatattcagtacatcttctatgagtgtacgagtttccataggataggtagtattcatttgttgtaatgccgaataatctcctgtggtgagataacgactttcaagtcgatcatagcgctgaacttctaccagcaacttgcgatcgtcttcattgtttggcttgagttttaattgacaggcactcagcaaaagaacaaataatatgaatatgtgatatacttttatcaaatctccaacctattcttgattatacttagcaaaagtacacaaaaataataaaagttgcaaattttaagataaaaagtataaattttaagcaaatttattttaagatagcacctaaatcctcttattttttgttgttaaccaactctaattatgtttccaattgaaatcatcaagacacgatttcacttaatcaaatagaccttatttcgtgagttcagaaaaatggtggcgaccctttccgtaatattgccacaagacagaatatggcgacaagagttgatgattggaaacacttctatgttgctgtaggtattgtcggtcgctatcaaaatcttttttccacttacgaaaggctttacgtgctttgaatacggctttgaaatcaccccaatgcccatcaagaatcagcattttgaaagcagcaacatagtcaagccaccacctgacacgcatcacatgctgcaactcatctgcctccaagttcttataaagcatggtgagattgttcctaaagttcaaataagttttcattggattgttctttggcaaggttcctccacccacatgaaacaccttactctcaggaacacaatatatttctcgtcccatggcacgcaatctccagcagagatcaatctcttcgttgtgcgcaaagaagcgaccatccaagccgcctaccctccaatagtcggtggctctaatcatcaaacaagcgccagtagcccacagaatagggcaaacttcatcatattgtccctcgtctttctcaaccacatcaaacaccctacccctgcaaaacggatatccatacttatcaataaatcctccacaagctcccgcatactcaaaatagtcgcgctgccttatcgacaacagcttgggttggcacgccgccgtctctggatgtgcatccatccatgtgatcaatggagagagccaaccggaagaaacttcgatgtctgagtttaataatatataataggtggcattgatttgtcgtagagcttgattatatccctcggcaaatccccaatttttatccaatagtatgcgttttacggtcggaaacttttcctttaacaatgcgacagaaccatcggtagacgcattatctgccacaaatacctctactgactcttgcagatgttgcaagagggttggaagatatttagccaacattttttcgccattccaatttaagataacgacagctactttcataaagctacttttaatgctgattgttgatgattgaagtcgcctaacttaacggtaatcaactggttatcgtatttgtctttagctaaagacgcagggagttctacacgaatatagttcttcgtaaaaccatgcatggttcttcctcttaccgctttttcaaacaaaacttctgcctctttaccaatgtacttttgataaaaagcttttgttttttcatcagaaagttgaagtagacgcttagagcgtactttcttttctttgtccgtaacgacataaggtatcgatagcgctcttgtccctggacgctctgagtaaggaaagacgtgcaactgggttacatccaactgtttcaaaaattgataacaagcctcaaaatattcaggtttttctccacgtgaacccaccatcacatctactccaatgaaagcatcgggtattttttccttaatatactgtattttatgggcaaacaatgcagtatcataatggcgatgcatgagttgaagaacctcatcagaaccactttgtaaggggatgtgaaaatgcggcataaacgctctggaatgtgcgcaataatctatcaactcatcgtcaatgaggtctggttcaagactggaaatgcgaaaacgcttgatgccttgcacctgatccaatgctttaaccaagtccaaaaatgtctcgttggtactttcgccaaattcacctatatttacaccagtcaacactatttccttccctccttcggctgcagcctgttcagcctgtttcactaaaaagtcaatagaggggttacgcgagaaaccacgcgcaaaaggaatggtgcaataggtacagaaatagttgcagccatcttgtactttcagaaaatagcgagttctatttcctctcgaacacgaaggttgaaaagtcttgatatcctttgtcttaacagattggtatgtgtgaagagatgaacgatgattcgaactcgttgcagccaactcactcttttgaagccaagcattattgaggtattgcaccaaattcgctttttcgttggaacccaacaccaagtcaaccccttcaatttggctcactgtttgtgattctaattgtgcataacagcctgtcacgatcacaaatgcaccgggattctcacgcaccatgcgccgaatagcttgtctacacttatgatctgccacctcagtgacagagcaagtattgataagacaaatatcagctggttcaccgcactgcaccgttcgtacccccatcccttgcaatagttctgcaaaagtagaggtttctgaaaagttgagcttgcaacccaatgtatagtaggacgctgttttaccttgaaaagcacttgtatctatcatacccataaaatcagactgcaaatttaagaaaaaaaactcatataatataggtgtgagcaccactaatcctaaagtagacaaaaagaaagcatgtctgaaggctctaattgacacgctttaactgaaaacagccaacgttttctcattccacatatcttgtgcaggatagtccatagcattcaactgactatctacttgaatcaagggcgcggaagcagctgtcccacatcgctttaggattcctctatatgaaacgaaacagccaaccgctcctgcctatgagaggctttgcggtcggctgcatatagcttgaatggggatatgaccaatgtactgaatgacagatatgagttcacgaacaatttttcctgaaccaataattctgatgttcagtcttgtcacatcaacaaaccttttctcctaatcttgctgtttctttgaattgacatcgccgtatcgtggcaaatggaactcgtatgacttatcgaatacctgactcaccctatttatttcgagcaaagtagtacctccattctttccaaaactaccactcaaataagctatcttatcttcagactggatgtaacctttttgtcggagcatgcggatagctgctgtgaagatatattccgagttggtgtgttccttttggtagatgggcagaataccataactgagattgagcaagcgctgtgttctctctctataacagatagccaaaataggtgtaggaccacggaaggcagccaaatttcgagctgttaaaccagtttcactgtcggtgatgatgcctttcacacctaattgtcgtgttgattcaatggctgaatgtgccaaaaattcacgttgggtgatattgtctttctgaataggatttacatcattgtcccatgttctatctgcctctgcttgttctgcaatacgagccatggtttgcaccgcttccaaaggatatttccctgacgccgtctcaccactcagcataagagcatcggttctcgaaaagatagcatttgctatatcagtgacttctgctcgtgtgggtcgtggattttgaatcatggtatgcagcatctgtgtagctacgataacgggcttttttttcatcacacacttacgtatgatttgccgctgaataccaggaatttcctcaataggaacttcaattcccaagtctcctcgagcaatcatcacaccataggaagcttctataatctcatcgatattatctactccttcttgattctctatttttgagataatcttgatgtcactgtggtgctcgtctaaaatagcttgtaccgctttgacatcctctgcattgcgcacaaaagaatgagcaatgaaatcgatatcttgctcaatagcaaacaaaatattacgcttatccttttctgtaagtgcgggcaaatcaatgtgttcgccaggaatattcacgcttttgtgagctcctaacactccatcattctgcacttgggctatcaacataggaccagcattctcgattaccttcatgcagagcgcaccgtcatcaaacaagatatcatcacccaccctgacatctttcgtaatatccgcataactcaaattgatagcgtcatgagttgtgtcaatgtctgggcgtccaaagattttcactatttcgcccgttttgtatgtcaggggttgttctacattggtcgttctcacctctggtcccttggtgtctattaagataccgatgtgagaggatactgctcgtacatttttaataatgcgagtcataccttcaggtgtagcgtgtgcggtattcattcgcacaacgttcatccctgcaaaaaacagtttgcgcaagaagtcttcatcgcagcgcaaatcactgatagagcagactatttttgtttgtttcattattcttttgagttaaatggtggtcgtttacaaagattataacggatgtcgcaacatcactggctattatccatatattttgaatcaaaattaaacaaaaccagctacagaaaagtaaactggatttgttaactggttgcttatgtatgcaaaattacgaaagaaatctgatatgtccaaatgattttctggcttatctgcgatacaaaatcgttttttagaatacagctctctcatgcactacctaaggtagcgctcacagattttcaaacccctctatccattcctccttccactttcgttcggttgggatatcttcctctatccaaggattggaaactgccaatcctaacagtcgaataggtcgtatggaatagtctacacttttcaacagttgcttagccaacggcagtatctgactctttgttgtcagtgcctccgaagccgtaacgcttcgagtaatctgttcaaagtcataaaacttgattttcaaagtcaaagtctttccttcaaacttggcttcctctattctttccacaagctccaacactgtgtgatatagttcaattaaaacagcagattggtttgaaatatctttcaaaaaggtgcgttcgcaaccaacagacttgcgcaaccattccgagaccactggcctatcgtcgcaacctctggcatgctgataataaacatgacctaacttaccaaacacctctaccaaatgcttttctgacacttgtctaagttgtgaaccaacaaaaatgcccatcttgtgcatttgcgctgccgttttaggtcctacaccccaaaaatcttcaatgcgtaactgccctataaagtcgtatgcttcatctgccgaaatctcaaaaagtccatctggcttttgatattccgaggcaatctttgctaaaaacttattaaaagaaacgccagcagaggctgttaagtgcgtgcgttcgagtatctttgcttttatctgtatggcaatttctttggcatcttctatttgaaatttattctctgtcacatcaagaaaagcctcatcaatggatataggttctaccgcatcggtatattcgtgaaagatttgtcgcacctctgttgaaacttcatgataacgctcaccgtgatgaggaacgattaacaatgtaggacataagcgtttggctttggcaattgacattgccgaatgaacgccatattggcgcgcttcatagctggcagtgctgacaacgccacgaggcccatcgtgtccaatcgcaataggcttaccttgcagttcaggatgatcacgctgttcaacggctgcatagaaggcgtccatgtctacatgaataattttcctcatgatgcaaagctactcatttttgccaaataacgcaaaccgaggtgactcttatccacggcctttttattttataaaggtggatgacaatgaaaaaccatctttgtgctttcatttcgacaacaaacctaccaaatcaagcaaatctcatagcttagctcattggcttcattagcatcattttttgcaactacaatggcatttcaaattttgtcatttttgataaaagcatttcttatttttgtcctgttattttaccaaaaaacggtcatccaaaatcttcaaaatagaaaaaattaataggcaaacgccctacaaaagtacgctgattttcacaaattaaacgtcttttcgagctgaaacatggtcttaacggtcttgaaaacatgcattagaggtgttattcacatgcttcagcagccttaaagcatgcaaatagcgagcttatctcaatgcttcagtcgccaagaaagagtaaaaatgggaatgaaaagagacagtttattcataacatatttaataacaaatagttacgtacatcgctcataactcgcgtatttgcgaccaactttgatgttggttgtttacacgcgagttatgagaggcactttgtaaagaaaattcagcatttatttttgatgccaatggttttttgaaatcaattgaagattgagcatcattgaggtctcttcctcctcttctaaacatctgaacacaagagcgcttatgtgttgattataggcacttttggcaaaaataacttaatatattttcgtataaggcaaaaaaccactatatttgcagttcaaaaagaaaactaaagtaataacaaacaacaaaataacacgttggtaaaatgacaaaagcagatattattaatgaaattgccgcttctacaggattgcaaaagaaagaggttgcagtggttgtagaaagctttatgagcaaagtgaaggaaagccttcttgaaaaaaaggaaaatgtttatttaagaggttttggtagttttattattaaacacagagcagccaaaacagcaaggaatatacaaaagaacacaacgataacgattgacgctcacaacttgccaagctttaagccttcaaagagttttgtgaatgcgatgaaagagtcgaactaagactttagatagactaaatcattggtctcatctccagcattttacgttatcgcccatattcatttaatggacaaatattatagtaatataaaaagaacaatttaaacatttaacattatgccaaacggtaagaaaaagaagggccacaaaatggcaacgcataagcgtaaaaaaagactaagaaagaatagacataagagcaaataatcctgctaaaacgtctaaactgacagtggggcgtgtcaaagagtcctatcgtggattttggttgacccgccctttttaatgtaactaagtaaagtaaagaagagaaatgaccagcgaagttgtaatagatgtccaagagaaagacatatcgactgccttgttagaggacaagcgactggtagaatatcagaacgaacctcgatcagcttctttctctgtgggtaatgtttacatcgcaaaggtaaagaaattaatgccaggcttaaatgcctgctttgtagatgtaggctacgaacgtgacgcttttcttcactatcttgacttaggaagccaatttaattcttacaccaagtacttaaaacaagtacagagtgaccgaaaaaaactctatccattcgataaagcctcgcaccttcctgacttaaagaaggacggcagtgtacagtctacactcactgtagggcaagaagttttagtacaaatagtgaaagagcctatttctactaaaggacctcgacttacgggagagctatcgtttgctggacgtttcttggtacttatcccctttggagacaaggtatcagtatcgtcgaaaataaaaaaaggcgaagaacgtgccagactgaaacaacttgttcaaacaatacgccccaaaaactgcggtgtcattgttagaactgttgcagaaggtcaaaggattgctgcattagagggtgaaatgaaagtcttgacaaagcgttggcaaaacgcaattgtcaaagttcaaaaaacacagaacagacctcaattagtgtatgaagaggctgttcgagctatcgcacttttaagagatatttttagtcctgatttcgagaacatctatgtaaacaatgacgaagcttaccgacaagtcagtgattatgtctcactcatagcacccaataaggctggaattgtcaagaaatatacgggaagtgttcctatttttgataatttcaacatcacaaaacaaattaagtcaagctttggaaagactatcaactacaagcatggtgcttacctcatcattgaacatacagaagccttgcacgttgtagatgtaaatagtggaaaccgaacacgcaacgaaaatggacaagaagccaacgctttggaagtgaacttaggcgctgccgacgaactggcacgacagttacgtctgcgcgatatgggtggtatcatcgtggttgactttattgatatgcaccttgcagaggacagacaattgctctatgagcggatgtgtaagaacatgcagaatgaccgcgcacgacataacatactccctttaagcaaatttgggttgatgcaaatcactcgacagcgtgtgcgaccggtcatggatgtgagtgttgacgagacgtgtccaacctgtaacggtactggtaaaattcgttcaagcatactcttcaccgatcggcttgaggataaaattgacaaactggttaacaagataggaattaagcgattctatctgcacgtccatccatacgtggctgcttacatcaatcaaggaattatctccttgaaacgaaagtggcagataaaatatggactgggtgtgaacattgttccttcacagaaactcgcttttttgcaatatgaattttatgacgcaaaaaaggaattcattgatatgaaggaagaaattgaaacaaaataaaatgattatctgtagaatttagaacatttcagaatgtctaaattctactttttttatacggtctgttttcaactaaaacaagtcttctttcctcttctgtgcacttcagcagatttcaccgaatgactttcctaccctgcttgttggtcatcaatcttcttcggaggtactaacattaccaaagaagtaccctacaaattatattttccgtcttttgaatgtaacgaagaacgaactctaaatttattagggagcagattttcaaagtttgcaacttgtttcttagaacagctcctcaagcaaattaaagaacaagaaataagtaaaagggataatgactaattcttcatcattaggtattttactgttttatttcattttctttttcaacttaagtgcaggaatcttcaccttatcgccagctttcagttccgctttatcgttcactgcttccatatagcactccattccagggccaagataagctctactgatggagcttaaagtttgtccagggcgaaccgtcactgtttgagcaatgcctgtgatggcgtaagcacccgttctaatgcgaggatctgcatcatactttgaagcatattgacgatttttcgtttgtgcctcttgtgttttttctgcagaagtggctcggtttgctgaacgagttgtagcttgttgctgtgctaaagatgaagtttctttgctcataggagtagcatcctcgtgctgctgtgttgctgtggcgtcgtcacttccgtccgtttggttcgtttgttctattgtattattatcctgctggtcggcattttcatccatttgcggtgtttcttttaccgcactctcattggttttctgtgcagaaagtagttctgccatgagatgttcgatgcgatgatcacgaagtgagaattgttgagcgacataccaaccactaccaatcatcaacaataacaggaagcaaaccgctccaatcaataatttttgattgcgctgagtacgatgcaaagttttgcgtagatattccgtatcttcactaatctcttcgatttcatcggatacatcctctgtcgtttcaaccttttccgtatcggttttagcaaatgtaggtatctcctcactctgtttatcagaagggttctgaaggttctcacttacttcttccttcttttcttcggtcataggagctacgataaccgagctttcggactgctgagaaggttcaaccaatggttcaacttgcttttcttcgggttcatttgtcatctctttagaaggtgtatcaaggctatctgccactacttcttgctgtgcaagctgttcctctggttgcagttcttcttcttttgtaggctgtgtaggcaaagtctcctcttgctcttccgtattttctttagcttgatatcgttcgtctatttcggagaaatcagcatcatcgctaatggtcaccgtctcaaattgttcaaatggagcgttcactctatctctcaacgcaacttcaggtgtaaaagatattttatctcttccctcaattataattcgctctccagtattcacatccacactttcacgtggactcactgcggttaccttgaaagttccaagacctttaatcttcacttgcttgtccgatttcagtcctgttgtcagtacatctataaataaaggtatgaaaaaatcagcctctcgctttgtcagttctgctttttcaaccaagacagttgctaaatctgttaatttaatcatgagttgcctcctttcttcagttgttctttcactaaaggtgtggggcggaagttaagaaccaatttgggcggtaccatcattcgtttacctgtcgatgggttgacaaggatacgctccaatcgcttttttatctcaaaggtaccgaaagaagggatagatacggcttctccttcatcaaagttcgaagccatcgcttctaccaagatattgactaaattttgcgttttttcttgtgtatatccacaacgctgcgcaagttctgcgataaactctttgttattcatggattgtatgatatttcattctacaacttctccgtacaaatcaaactcctctgcatccgtgatatttacttggtaaaatgctccaatttccaagtttttccccgtcgaatgtattaagacttcagggtcaacatcaggagagcaatattctgtacgtccaatatagtaatcgttttcttttctgtcaatgattactttcattgtctttcctatcttttttgcctcaatttctgcactaatttcttgttgtacagccatgagttgatccagtctttgttgcttcactgccaacgacacgtcatcctgataatgcaaagcaccataggtaccctcttcttccgaatacataaaggcacccattctttcaaatcgtgcccaccgtacgaagtcaagcagttcttggaattcttcttccgtctcaccagggaatccaaccatgagcgttgttcgcaaatgaatacctggaacctttgctcgaatagtcttgatgagattgattgtttcctgcttagtcacatggcgatgcatacgagataacacgccatctgaaatatgctgtaaagcaatgtcaagatagttgcaaacttttttgttttctctgattacatctaaaagctctaacgggaattggtttggataagcataatgaagcctaatccattgcactccttctatctctgcaatcgcagaaatcaaatccgcaatatgttgtttgccatcgatgtctctaccataataagtcaattcttgggcaatgacctgaaattctttcaccccttgtgccaccatgtccttgacttctgctaaaatatccgacttcaatctgcttttatgtttacctgtcatgagtggtatggcacaataagcgcactgacgattgcaaccttctgaaatctttaaatacgcataatggcggggtgttgtcagatgtctcaatccataacaggaggatatttccgcttttcccaaatcggacaagagttgcttataattgaattttccataaaatttatccacctcagggatttcattctccagctcatctttgtatcgctggctcaaacaacccatcacaaagagtttctttagtctaccctctttcttagcttcgacaaaacttaaaatggtattgatgctctcttcttttgccgattctatgaaaccgcaagtattaatgaccgcaatttcaccatcaggagactcactgtcatgggtgcaacgatagccgttgtcttcaaacaatctcatcaacttctcactgtcaacaagattctttgagcagcccatggtaataatatcaatttgatttttcttcaaaactatctattactttttttatatttatccaaaaaggctatctacaaattcctttcgctgaaagagttgcaaatcctccatttgctctcctaatccaatgtacttcacaggcactttcaattgatcgctgatgccaatcactacaccacccttagccgtaccatcaagtttggtaatcgccaaagacgtgatttgagttaccgcagaaaactgttttgcttgttcaaatgcattctgtccagtactaccatcaagaaccaacaatacttcatctggagcttgaggcagtacttttttcatcacctctttgattttcttcagctcgttcatcagtcccactttattgtgtaaacgtcctgctgtatcaatcaaaactacgtctgcatgattagctttggcactttgcaacgtgtcaaaagctaccgaagcagggtcagaacccatttgctgtttaatgacaggtactcctactcgctcaccccatatcacgatttggtctaccgcagcggcacgataagtgtcggcagctcctaaatatactttctttcctgcctgcttaaattgataagcaagctttcctattgttgtagtttttcctacaccattgacaccaacaacaaggatgacataaggctgatgatcggttggcagactccaactctcattatcttcagaatgattctctgctaacaaagtggcgatttcctcacgtagaatggcatttagttcagaggtagagacgtatttatctcgttctacccgttcttctatacgttggataatttttagagtcgtatcaacaccaacatcagaggtaataagcacctcctcaaggttatccaacacttcatcgtctaccttagatttccctataatggctcgcgaaagtttgcttatcacactttgctttgtcttctctaaaccttggtctaaggtttctttctttttcttgttgaagagaccaaaaattcccataatactatcttttcctaataattgaacatcccgaatgagagataactgtcaataatttaataacttaattggcatgcttgaagttcttctataagacgaaactctcacgcatgaaatactttatccttgttaaatcaactgtatatatacgttacaaagatagcacattttttcgatactttctcaatctacaagcaattttcaacagccttcagcataattattaaaatcatccacatccatagtcttctatctctatgggtttaacacacaatctttaagagttgactactgctccaaaattactcaacatttttggtttgtatgttcaaaattacatatcaatgtttttcaataaaacaaaagggaaaaacacctacacttaggcaagacagataatgcacaagggattattgaaaagataattgttgcaatcgctgacgcaattcagcagcttgagattttcgtatggctaaggaaatgtggcaagtattatcgaatgtttgagaaacaattcgaggctccaactctttcactactcgcatgacttcatttaacagcggataggtaaaggagtaatcgataatatcttctacatatctcgtctctatttgtgcattttctatggctgccgcagcagctgttcgataagcgacaataagtccactggtacccaatttagtaccgccaaaatatctcacgacaacaattaagatatcagtcaattcatgagcgttaatttgtcctaagataggttttcctgcggtgctagaaggttcaccatcgtcattcgcacggaaaacacttctgtccgctcccagcatgtacgcataacagcagtggcgggcgtcataatatttcttcttataagcctgtaacaactccttcacttcattttcattagtgacatgatgcgcaaaggcgaggaatttactccgtttttcggagtaaaatccctcgcctatttgatttgttattgttctatattgatctgtcatcaagatagtttatgaatcactaagccactacgcagtttaggttcaaaccatgttgctttcggcggcataatttttccagagtcagcaatatccataatctgctgcatggaaacaggataaagagctaatgccatcttcatttctccactgtcaactcgacgttcaagctcttccaagccacgcaaaccaccaacgaaatcaatacgtttgtctgaacgtaaatccttgattccgagcagttcatcgagtatcaatcgagaagaaatgtccacgtccaacacaccaattggatcgttgtcgtcgtaggttcctggctttgctttcaagctataccattttccgtccagatacagagagaattcatgcaactgctgtggcttgtaactcttcgttccttcctcaacgacttcaaagtttttctccaaagcttttaagaactcttctgatgtcattccgttcaaatccttcaccactctattataatctaaaatggttaactgagatgctgggaagcaaacagccatgaaatagttatattcttcatgacctgtatgattaggattggctttcgatttttcgacgccaaccaatgcagcagctgcagaacgatgatgaccgtcagcaatatacaaggctggcatcttcttaaattctgcagtaatcgtttcaatatccttcgcatcggagattacccagaattgatgtctgaaaccatcaataggagcaatgaaatcgtattcaggcttttcagaagcataacgctctatcaaagctgtaagcgtttgattgtcgggataagcaaagaaaacaggttctatgttggcatcgcatacccgtacgtgcttcattctgtcttcttctttatctcttcgagtcagttcgtgtttcttaataactccattgagataatcttgacaataagcacctactaccaatccaaactgtgtcttaccattcatggtttgggcatagatatagtagctttcgtgttcgtcttgcttgagccagcctttatcttgaaacttcttaaaattcttagctgcttgctcatagacacgtgggtcatattcagacgttcctggttcgaaatcgatttctggtttaataatgtgatacagactcttttcattatctccagcttcttttctcgcctcttcagaatccaagacatcgtatggacgtgattcaacctcttcgactaaatcttttggaggtcgaacgcctttgaatggtttaattgttgccatagtgtttacttgttaacttgaaatttcgtgcaaccatctttgaaataagcattgatttgctgtgcggcagcaattcctgcattagcgttagcttctgctgtctgtgcgcccatcttcttaggagtagtaaagtaacgaccctcgaactttgcgaattctgcatcagcgtctggcttgatgtctgtcacaaatttaagatcttcacgttcacccattaaacgcaacaattctggctcgttgataacttccttgcgagcagtatttaccaaaatgccacccttcttcatcaaattaacaagatcgtaaccaacactttgctttgtatgttcattggcaggaagatgtacactaacaatatcacactgcttgaagagctcttctttggtagccacaaactgaacaccatcttcttttttaggattctctgcatgcgaacggctgaagccatatacctccataccaaaaccattagcgatgcgagctacatgacgcccaatgttaccgaaagccaagatacctaatttcttacctttcagctcacaacctgattttcctgagaagcagctacggcacatataaatcaacaagccaaataccaattcagcaactgcattagagttctgaccaggagtattttctaccacaatacctttttctttggcataagcggtatcaatagaatcgtaaccagcacctgcacgaacaacaactttaagttttggagcagcatcaaggatttctttcgtaattttatcagaacgaacaatcatcgcctctgcatctttaacagcttctttgagttcatcggtagaagtatatttctctaacagttgaacgcaatgattctgactctccaactcttttttaatagcctcaactgcctttgcattaaaaggtttttctgtagcaataagtactttcatttgtttagaatattgaatgggttaattaagtacgtaaccacaataggaagtgattacgcataaattgattaacaaacaggctaaaataaggttgaatcaagcaaactggatcattacgctcacctaattttcttattttagcctatttgtaaatcatgattagtttgtagtttgtaatggattaatgtttgtcttcgaattctttcatgcaagcaatcagtgctttcacaccatcaacactcatagcgttgtagcaacttgcacggaaacctccaacagaacggtgtcccttgataccaaccataccacgttcggtagcgaactcgaagaatggtttttcaagatcttggtattcttcgttcatgacaaagcagatattcatcaatgagcgatcttctttagcaacagtacccttgaacagtttgtttctgtcgatttcagcatacaacaagtctgctctttcgtgagccaacttatccatagcctctacaccgccgttcttcttaatccaacgcaatgtttcgagagctgaatagataggaacaacaggaggagtgttaaacatagaacccttctcgatgtgtgtgcgataatccaacatcgtaggtatttctcgtccagtcttgcccagcatgtcttccttaacgataacgaatgtaacaccagccatagccaagttcttctgtgctccaccgtagatacatgcatatttagaaacatcaataggacgactaaatatatctgatgacatatctgcaataagtggcacatttacatccaagtcttcacgtatctctgtaccgtagatggtattgttggaagtaatgtgaaaataatcacaatcatcaggtacgctccatcctttaggaagataagaatagttcttgtctgcagaagaagctacttctactacttctccgaagaattttgcttctttcaaagctttcttagcccatgtacctgtgttcaggtaagcagctttctttacaaagaagttgttaggaatcatgtggaactgcaatgatgcaccaccacctaagaagataactgcatagccttctggtatctgcaacaattctttaatcaaagctacagcctcgtcgacaactggctgaaagtcttttgaacggtgactaatctccatcagagaaagtccgataccattaaagtcaagaatttgtttcgctgtgttttcaattacttcacgaggaaggattgatggacctgcattaaaattgtatttttccattgttttaaagttaaaattaaacaagtattagtaattggttgctaatttacaacaatagtttgaaagacaaaaataaaaactgtattattttgcactttccgcgttttttctattctgcagcctcaaaaatcgtttttaaacccttaattttttgtccttttgctctttttagcacttcttgcaacttatttctttggactgccacatatacgtaataattattcacatcaatacgtcctatctcatcaggagcaagttgacatttcttacacaagaacccaacaacgtccattttgcttattttatctttcttccccttacctatatatatagttgccattttgggtaatgcgggctgactgtccgtaacagggatgctatattcttgagtatgactgatagcgtatgcaggtatctcttctgtgggaccaatgagcaggaacgccctaccctctttttcccagcgagctgtcctccccgttctgtgtacataattttcttcttggtctggcaattgatagtgaacaatgttgtctacatctggaatatccaatccacgcgaagccaaatccgtactcaccaagatattcaccgacccattagaaaatttatagatcgaactttcacgttcttgctgatctaaaccaccatgaaagacagtagagtaaaaatgttgaaatgtcaaaaaatcatggatgcgttcggcactttctcgataattcgtgaacactatcgtactctgatttccaaatgacaacaacagttgtttgagtgtttgcagcttatccttgtccggactatgaaccgaaaacactcgaacctgatgagagacagttgctgatgtgagataatccaatcggtcgacattattcatattgacgaaatgaggaatttctacggcatctgttgccgaaagaaggatgcgctgtttgacggcagtaagcttctcgagtatcttgctcatctcctcttggaatcccatctctaaacacttatcaaattcatcaataacaacatattgaatcgtttcaatactgatgtttcgtttgtctaagtggtcattcaaccttcctggcgtagcaaaaacgatttgtggctgtacttgtcgcaactgtcggtgttcatccatggtgggacgtccaccgtaacacgcaaatcctttcattgccttggtgagtagttgcaagacttctgctgattgtatggcaagctctctattgggaactatcactacggcttgcacctcttttgaacttacatccagtttttgaagtatcggcaacaaataagccaaagtcttccccgacccagttggagaaagaaggataacatcacgttcaccttgtgcaatgctgtcagaagctttcaactgcatggcactcagctgttctatccctaatttggctaaatcgacggtgacattcatgacttattattgtttttgattgataatacgatcgatttcttcaaactccttacccatgttcaaattcaaatagatggtatacagcggagtaccccatttatctttcatctctggagccaaagccctataacgttctaaatagggcaaagccttatgatagtaaccaagaatttgctttctatttttctttgatagtttcgtatcattgtctaacagaacagcttgattgaaataagcaagacctgcattgagatagggttctggcatgctgtcattcttagcgatgaggtcatcacagatttgaatacacgcatcgtatctaccggtattcaaaagtacggtactcttggcaaattggtataactgattggtactgtccaccgctaacgctcggtcaataacacccaaagcattatcaaattgtttcgtcattacataataatcaaccaatcgagggaagaaaaatggaaagctgggatgagtggtaaatccctcgtccaaaacctttagatacatggttgtatcttttttctcttcatagatattggcaagatattgcagcatgtagggataatgcaccgaatccttcaatgcgagatgcgaatgttgcaaagttgcatcatagttctttaattggtaagcactaaatgcagcccagtacgaagcttcaggcattcgcctatctttctctacatactggtatttttcaaacaatggctcataagcactctgaatgtaagtattgtacatttgataggcttcagcatatttctttttattaaggaagaaagccccaccgttaaagagattcggtctgatttgatgcagatattgtgcatgttcgctacgataggctggagctactttacctcttttattaggtagtgcatcaatggaatcaaatgcctgtaaatcttcaaacatatttcttgccaaagaaaacaaccgtgtggtatcgtatttttgcttcaaatacaacttctcatttccttgctcatattgctttctaaccgcttcaaaaagggttaaccatatttttttattgcatctgttggttgagtcattgagcaagctgcgcatggatttttcagctttatccaaattgtttccacgtttcacccattgtcttgcttgtgaaatctctcttctctgtccttgggcagtcacagcaaagcttactataaagaaaatatataaaagtcttttcatcatctactatgtaaaactatattcaattactggaacaatgtccaaaaataatgataggtataaaatatgtcttaaaagctaatcccccatttgttatgcaaatatacggaattttccatatatcaaagagattattccgacaaaacttgcattattatcttcaccttatttatatatagggacaaaccagtacatcactatttaacaataagtatggcttaaatctaaaaaagaatgggctatccacgcaagtacacggcataacagaccatataaaatgattccctctttattatccctatgaactacagctctttcattgaagaatgatattttcaccacgatgcacacccacgaacctgtgcatgtaatcttgataatacgctgcatggaataaaaataaatgctgaattttctttacaaagtgtctctcataactcgcgtgtaaaccaccaacagcaaagttgatcgcaaatacgcgagttatgagcgaggttcataatcgcttgttattgaatatgttacgagcaaagcctctccttttactcccctttcccccatttttcttcgactaacccattgagataagctaacaatttgcatgctttaatggggttgaagcatgtgaataacgccgctaatgtatgtttccaagcccgttaaatcaatattccaacttgaaaagacagcttttttgtgaaaatcagcgtaattatgtctattgtctgcctattaattttttctattttgaagattttagatggccgttttttggtaaaataacaggacaaaaacaacaaattcctttaccaaaaataaatttgttgttgaaaaaagaaaaaagatagtttttcatcgtcaaccaaccttcatgtatgaaaaaactatgagatttcagtaaaaaaagccccctaaatgatacaacctgtcattaaattcattatatttgcaaacaatcttaataaaaactttaaacataacactatgaacattccatttattttttggcttgtgccagtggcctctgtggttgcactatccatggcatggtacttctttcaaagcatgatgaagtatgatgaaggcacacctcgtatgcgagaaattgcgcaacacgtgcgccatggcgccatggcgtacctcaaacaacagtacaccgtggtgctatatgtatttatcgcattagctatcctgtttgcttttatggcttacgtgctcaaagttcaaaatccatgggtaccgtttgcgttcctcactggaggtttctttagtggactctgtggtttctttggtatgaaaaccgccacttatgcatcgggtagaaccgccaatgcagctcgcaagagcttaaatcaaggtctgcagatagccttccggtcgggcgcagtcatgggactcgttgtggttggtttaggtctgctggacattgccatgtggtttatactcctcacctatctttatcatggcagcaacatggcactggttaccgtcacaacaacaatgctgaccttcggcatgggtgcctctacacaagcgctgtttgcacgtgttggaggaggtatctacaccaaagcagccgatgtaggtgctgacttggtgggcaaggtagaacaagatattcctgaagacgaccctcgaaatcccgctactattgccgacaatgtgggtgataacgtgggcgacgttgctggtatgggtgctgacctttatgaaagttattgcggaagtatcttgtctacggctgcattaggtgccacagcctttgtggcaagcggtgacatgcaactcaaagccgtggtagcacctatgattatagcagcagtaggtattttcttgagcttgattggtattttcttggtacgtaccaaagaagaagcgacgatgaaagacttgctgaagtctttgagccttggtactaatgttgctgcggtacttattgccatcgcaaccttcctcatcttgtatttcttgggcatcaccaactggttgggcgttagcttctcagtagttacgggtctggcagcaggtgtcatcatcggtcaagccaccgaatattacacctcacatagttacaaaccaaccaaagagattgcagcttcttcgcaaacgggtgcagctactgtcatcatcaaaggcattggcacgggaatgattagtacttgcattcctgtggtaaccatatcagttgccattatgttgagctacctctgtgccaacggctttgatatgagcatgaatgccgattcgattagtcgtggactttatggcattggcattgctgccgtgggtatgctttctacactgggtattaccctcgctaccgatgcttatggacctattgccgataacgctggtggtaacgctgagatgagtaacctcggcgaagaagtgagagaacgcaccgatgcgctcgatgccttgggcaataccaccgctgctacaggtaagggctttgccattggttcggctgcattaaccgccttagcacttttggcatcctatatagaagaggtaaaaatagccatggttagaatggtagaagatggtcatcagtttgtcaatgcggcaggaaacgtattcaatcctatgaatgccaccatgtctgacttcatggacttcttccaagtgaacgtaatgaatccacgcgttttggtaggtgcctttatcggtgccatggctgcttacttgttctgtggtctcaccatgggtgcagtaggtagagcagctggcgcaatggtggatgaagtaagacgtcaattcagagaaatcaaaggcatattggaaggcaaagccacacccgattatggacgatgtgtagagattagtaccaaatcggcacaacgcgaaatgattttaccttcactcttagccattgccattcctattgtagtgggaatcattttaggtgttgcaggcgtccttggattactcgtaggtggcttggcagcaggatttaccctcgccatctttatggcaaatgctggtggtgcatgggacaatgccaagaagatggtggaagaaggcaacttcggtggtaaaggttcggcatgtcataaggctactgtcgttggcgacaccgtaggcgatccttttaaagacaccagcggaccaagtctgaacatccttattaagctcatgtccatggtgagcattgtcatggcaggactaactgctgcgctcatctaacacgaacttagaacactgatagaggaaattacctcaacctccaaatctgcatacacaatgaaagaaaaatgcagttggaggttgaggtaattttcattttaggctggttctataaattagctttgttagattttgagcttatttttgaggtcaaaatgcaagagagtgaaggagtgtagcgagctacacgactgaacgaacttacattttgaaccaaaaagaagccaaaagataacaaaacgtatttcataaacatttaatgactatgttcggtggtaatytatagaascwktytyctwtmattgtstatgmasmywtggaggttgaggtaatttcctctatcagtgttctaagttcgtgttagatgagcgcagcagttagtcctgccatgacaatgctcaccatggacatgagcttaataaggatgttcaaacttggtccgcctgtctcttataaacat

SEQ ID NO: 103 - DNA, 59707 bp, Prevotella timonensis
  source 1..59707: mol_type = genomic DNA
cttctatacggtgattgacacctttaagaaccattatgataccatactcaatttctttgtcaacagagccacaaatgccaatgctgaatccttcaacgcaaaagtcaaagccttcagggcacagttcaggggagtaacggatattcctttcttcctttacaggcttatgaaattatgtgcatgagaggaggggtgcaactgggttttacgactgacccctaataagcgtagcttttcattcaaactttattcgtgataggaacatataaaaagtgtatctttcgtcagactgtggagttgtggtagcaacgccatacgtcattaacgaaagatacacttcgtttcttcattttactctaatgttatctgctttttaggcagcaatcgtcttttatttcaaccacatctaaaagcagaaatatcgaaagtgatagggcaaaactatcaccctgtgtgccctgaagatttactctttcgtattttcaggtgcttcatcaatcaagtccatgaactgatcaagcttcggtgtgatgataatttgagtacgacgattacgctgtctacccaactctgtattattggatgtcaatggattgtactctccacgtcctccagcggtcatacgtttaggatccacaccatagttcttttgcaagtattgtaccacacttgatgcacggagcgtagacaagtcccagttgttacgaatattcttcatcaacggactgtttggatttacagggacattatcggtattgccctccaccaaaacatcatactctttataatccatgatgattttagcaatcttactcagagtttctgctgctcggtcgttaatctcataagaagctgtcttatagagcatgttatcagccaagctgatataaaccacgcccttcaacacctgaacatccacctctttcagctcttcacgactcaaggagcgggtcaaattattggttaaaaccatgttcagtgaatcagatttagatttcacctctaccaagtgtcgaatatattggttcgactcattaatttgatccaccaatttagagatattaatgctgttagaatttgtatttaacaaactcttatccaacgacttctgcaaagcggcgtaatcacgtttttgctgagataattgttcttccaaagccgtaacccgcgcctgtgatgctgccaactgctcttttgctgtctgataattagaagtcaactcgcgattttcagactgacagttttccaaatctttcttacttgcacaactcgaaaccaataaagcaacagcaagtaaagggaatattaatccatgtttcttcatcataatcaattcgtttttagttaaatatttttctttcatgcgtcaatgtcctttcctatcatttattttagtgagtaggcatctctacacgatacgatttgtgtacaaatatataaataagatatcaaaatgtgtgagatatcaaaacaaattataaaaatttaaccgcttcaatcgcaatttattgcgcattaacacgatagatgtgagttcacttgccgttggctaacgctcttgttagacttcatatagagaatcatggcacgtctctcatccaacctcactattcaatcgaactcattttagcccttatcttatgcctctgatataaaggaaaacagcctatccttattagatagactgttggattgataataattctaatattttactcatccaaacgtagaggataagatatcattgagtaaaggttctaagctatttacgaatatcttaagattcgtccaggcttaatcttatcagacttacttatatggctcaatcgacatatttgctctactgttacgccacgtttacgcgcaatcgagttcaacgtttcgccagcttgtaccttgtggtactgtacctgtacggtattgaacgcttccacgtcctcacgtctgctcgctacaccgcctcgaacttggtctggtgtataacctccattgccaattttaccacgtaaacgatttgcttctgccgactctctttgataagaattgtttctaaaggtgtaatagtctcctgtcacatcctgtgcacggaagtcaaataacaaggcgggattcaatgctacaccgcacaatcttgtttcaaaatgcaggtgggagcctgtacttctaccggtatttccgcccagtccaatcacatctccagcacgcacttcttggttctcacttaccaattgtttagacaagtgtccataaatcgtctctaatccattgccatgacgaatgacaatataatttccatagcctcgggcttcatagcgtactatacgcaccttgccactaaacgcagcacgaatggtgtcgccaatatatacctttatatccaagcccttatgctggcgtccccaacgagtaccaaaattactagtaattacacggctcggtgtgggcatgcagaaatgcctaaggtcaatcctaaagctatcggggagtgctgtctgtcgatgggcataacgattgtcccattcttcatacaactgagctgctggagattccagattttctttttcgataatattgtgaagtaagagtgtgtccactgctttcatcttcctatctacgggtgcttgtcttgccaataagtcttgcgcaatacttggctgtgcaaatgctgcaagcaaggtaataaaagcaaatgtcttgatcttattcagtagtctcatatacaaatttggtttaggttccctatggaggttaataaaaaaccttttaaagatcttcaaggtaaatcaatcaaatcttcatgattcttaaaaaaccattgcaaaaatagtcaatttattgcaatattgttacagtgttaacagattttatagacgctttaaccaaagtgtatcaattacaaatgccataaaaatacgtatatacacctctgtctttttcttatttttggatatccttccctgttatatgggctttattgttatatttaagcaatatttatgcatatattctactattcttttcttgcagcgttttatgagcatttttgttaaaaagtgtatctttattgttgcttttttccacaaattcactgcaaataatgtcgctaagaaatagcagcccagtttacattgcttttccgtagctcgcttaatcgattccacagcatgctgtattggctcttctcacaatcaggatcatcattgataatcttctgtgcctcatcacgtgccaactgtatcagctgtccatcacgggcaatgtcggcaatctttaagtcaaacgcaattccgctttgctgcgtcccctccaaatctccaggacccctaagttttaggtctgcttcggctatctgaaagccatcgttggtctgacacatgatgtcaatgcgctttcttgtttcctgtgtgagcttgtgattcgtcaccaagatgcaataactctgatctgcgccgcgccccacacgtccacgcaactgatgcaactgcgacaaaccaaaccgctgtgcatccagaataaccattacagaagcattgggaacgtccacccccacttcgatcacagtggtggcgaccaatatttgggtctctcccttactaaatttctgcatctcaaggtctttctctttcggcttcatcttaccatgtaccttgctcaatttcatatcaggaaagatactacacagtgactcatatcccgcttcaagattcttcaggtctattttttcgctttccgtaatgagaggaaacacgatatagacctgcctaccctgccgaatttgttgccttatgccttggtacagactggtgagttggttgtcgtacttatgaatggtctgtattggtttccgcccagacggcaattcgtcgatgacactcacatccaaatcgccataaatcgtcattgccaatgtgcgaggaatgggtgttgctgtcatcacgagtatatgaggaggctgttgacttttaccccacaatttggcacgttgcgccacaccgaagcgatgttgctcatcgaccaccgccaaccctaaacgtgaaaactgaacattgtcctcaatgacagcatgcgtacccaccaatatttgcacctcacccgtgagcaaaccagttaatatttcctcacgctttttgcctttcactatccccgtgagcagctctatgcgcaccggcatctgtcttaaaaacttacgaatggtggcaaaatgttgttcggctaaaatctccgtgggagccatcatacacgcctgaaaaccattcccaatagcgatgagcatagacatgagtgccaccaatgttttgcccgaccccacgtctccttgcaccaagcgattcatttgctgacccgtagccatgtcgttgcgtatctcgtgcatcactcgcttctgtgcattggtgagttcgaaaggcaagttgttgtgatagaaaaaatggaataacgaacctacttgtgtaaaaacatagcctcgatatttgcggcgttggtcgtgtgcatatcgcaaaatattcagctgtacatagaacaactcttcaaactttaacctgacttgggctcgttgcacgtcctcgagacttttcggataatgaatcttatgcaatgcctccgtgcgagaaatcaagtgtaagggtcctattatataaggtggcaatgtttctgaaatggtttgctcggagagtttctccaccaaagtcttggtaagtttttcaagagagcgagaggttagccccatctttttcatgcgttcggtggtcatataataaggttgcatgcccatttctgaaagctgtacatctgtcaccttatctatatctggatgtgcaaactggtaacgaccgccatatatgcttggtcgtccgaagacaatatattcttcgttgaccttataagtcttatagacatattgcgcaccacgaaaccaaaccaagtctaccacaccagtcccgtcgctgaaatgtgccaccactcgcttacgatgagcgcccatagcaaactcttcaaagctcagtatcttgcctttcaattgcacaaatggcaagtcgccgcgtaattcaccaatacgataaatcctacttcggtctacatacttgtaaggataatactctaacaggtcaccccacgtagaaatttggagttctttctccaaaatttccttacgctttggtccaacgcctgtaaggtatttgatgtcctgactgagtatgctggtcatgtttgcggtatcaatagttctgccaatttgatatcaaacggtgtggtaatcttgatgttttctcggttgccttctaccatttcaaccgtttgtcccatggcttccaccaccgaagcatcatcggtaaacgcctcctgctcgggctgtgcaaacgccttttttagcaatgcaatgtcgaacacttgtggcgtttgcacgatgcggtaatcactgcgaagcacgttcttgctgttgccgtttgcgctgatatggcgtaacgtatcggtcacaggaagtacagggatggctgcgccacatttttgagcagtaagataacaacggttaatcacttctattgacacaaaaggacgaactccatcgtggatacccaccgtgccacagacctcttctggaatgactgacaagccatttttcgccgactcaaagcgcgatgcgccaccattcactacggtatgccccacatgaaagttatattcatagcacaattgcctccaatacgcttgttgcgaatgaggtagcaccacaataattcccatttcagcatcatactgatgaaaccgctcaatggtatgcatgaggataggcttccctcccacaattctaaactgcttggggatgtcacctcccatccgaagtcccttgccacctgctacaatgatgataaatcgcatcttgttggtggacgaggtgacaaggtgacaagtggacgaggtgtcgcatggatgtgtattcgagtacatgagtggacgagtgaatgataagaaaaaggcaagttactttgtttccatcaagtgagtaaaccgcatttgcttttgtaactctttggtttctgcctcgcctacaaatcctttcaagatttcgaaagcgtatgggaaagtagcagcaggaccttctcctgtgatgatgttgccatcgacggtgaacaattctgccgtataatcggcaccttccatatacttttcaaagcctgggtaacaggttgccttacgtcccttcaatagtcctaaacttcctaagaccataggaccagcgcagatagcaccaatccgcttgcctttggcatgatgtgcaagcaaggcttcccttactcctgcatgctcatttaggttggttgcaccaggcattccacccggaagtaagagcatgtctacatcatcaaagtgacgaatgtcttcaaatttcaaatcggcttgaatggtaacaccatgcgaagacgtcacccatgtgtcgcctgtaacgctcacggtcttgatttctacacctgctctacgcaaaatatctactgggagtaaggcttctacttcttcaaagcctgttgctaaaaattcatatacctttgccatagttttttgttttgtgggtctaacgacccgttggttgatcgaaatataaataggttctttctgcaaatatactattttttttacgataaaatacatctctcggttatcaattcagaatgattgacgctgattaacgttgtttaccagattcattcctccatgcgaaaaaagttgacaaaactcaggtttgagagagcttatttttcgttatttcccatgaaagtcctgaatttgccgaaaatttaagcaaaatataaactgcttattatcaacggtttacatttttatagaaaactgcaacaatactaacccattgagttaagtggcttatctccatgctttaaccctgttaaagacacgttacaaggcatctatgagcatggaatagaacgcataactcattgagataagttcgacaaaggcaaaaaacagtgcagaaatttgttagcaatacgatttttagagctaaaagatagaaaactcatccctttttaagggccttaaaattgtcaaataaaatgctgtttttcgcagtcccttcactcaaaaaagttaccacttttttttgttggtttcatgatattttctccatcttcatacgcttttcatgggtggttttatccaattatcaataataatatgtacatttgcaagtaattgcccgatacgttctcgccattgtttatcatggctttgggaacttcacaaagaagacaacttaacgatagattatccatatatgtctgaaccaaaactaagatttgccctttttggcaacgaataccagcctgagaaaacagctttcttcctgcgaatcatcgaggagttgcaggcacacgatgctcatgtgagcatcgatagcacgttttacgacttcttatgtcaagatgttcatttcaaatcggagaccgtacagcggtttgaaggacaagacttcgatgccgattttgtgatttccgtgggtggagacggtacttttctcaaggctgcccgacgtgtgggcatcaaacaaattccgctgataggcgtgaataccggcaggctcggttttcttgccaacatccttccgagtgagttaaaagaagccgttgctgacatttacgcccaccattacgagttagagaggcattcggtcattcaattagaaaccaacggagagcccttagacatcaacccctacgccctcaacgacattgctatcctgaagcgtgacaatgctgcaatgattacgattcgtgcctgcgtgaacgatgactacttggttacctaccaagccgacggtttagtgattgcgacacctacgggtagtacggcatacaacttgtcaaatggcggcccaatcatggtgccatcgaccaacaatttgtgtctcacacctgtggctccgcatagtttgaacatccgtcctatcgtgattaacgacaacaatgtcattaccctcacggtagaatcacgctcgcacaacttccttgctgccattgacggtcgctccacaaagttaggtgagcatacgcaactgactattcgaaaagctccttttgcaaccctatttgtcaaacggtttggtcaacgttacttctcaaccctgcgtgaaaagatgatgtggggtgctgacacaaggggataacacatagacacggcagcttatgaacatccgacaatggtttaagattcctactcccaaatattccgccaaggtcattttcaaatggctttggcgtgcttggcgtggcaatcagttgcaggctatcctcaatgccgccattggtttgctctccgtagtggtaagtttagcacaagtgtgggctgtacagcatgccattgacgtggcgtctggacacgcggaaggctctatctactggtctgtaggggtgatggcattgctcgttctttgcggcttcgccctgcgtatctgttccatttgggtgcgcaacatcttgggcatcaaagcgcaaaaccgtatgcagcaacgcatgctcgaccgtatattgcggtcggaatggacgggaaaagagtcgcatcactcaggcgatgtactcaacaggttggaacaggatgttggcacggtggtaagctttctaaccgaaactattcctaataccatttcggtagtggcaatgtttgtgggcgctttcctgtatcttttctccatggacaaagtacttgcctttgttatcgtaggcattattccggtgtttgtgctgttaagtaagctgtatattggacagatgcgaaggctcacccgacaggtacgcgactcggatagtaaggtgcaaagtgtgctgcaagagaccattcagcaccgtatgctcatcaagactttggagagcgacagcatcatggtggatcgattggaaagcacacagagcgaacttcggcatcgggtggtaaagcgaacggcatttagtgtggtatcaaactttatcctgaacgcaggattctctgtgggttatctcatcgctttcctatgggcagccttgcgaatggctgaccaaacgctgactttcggtggcatgacggcgttcttacaattagtaaatcgcattcaaggaccagcgcgcgacctcactcgcttagcacctgtgtttgtcggagtcttcacagcagccgagcgattgatggaacttgaggagaatcctttggaggaacaaggtgaccctatccctctaacagcgccgtgtggggtgcgcttggagcacattacctacgcatacgacgatggcgacagtaatgtgattgaacagttagactttgatttttaccccggttcgtgcacggctgtcttgggcgaaacgggtgcaggaaagaccacattgatacgactcattttggctttgttacatcccaatgaggggaaagtcatcctatacaatcaacaagagcaaagagaattgtcgcctctgatgcgctgcaactttgtgtatgtgccacagggaaacacgctgatgagtggcacgattcgcgacaacctgcgattgggcaagctcaacgctacagaagaggaaataaaaacagcgttggaaatgagctgcgcctcgtttgtcatggagcttcctgatggcttagacaccgtttgtacggaagcaggaggcggattgagcgagggacaggcacagcgtatcagtattgctcgagccttgttgcgcaaccgtccaatcatgctgttcgatgaagctaccagtgctttagaccccgagacggagcgacagctcttgcataacattctctttaatcacgacaaaaccgtgatattcattactcacagacctgccgtagtagactactgcgaccaaacgttacatctacaaaaacaataattaatcatgaaaagaattgtatttctcacattttgcctgttctgcacagttgcaacattgttggcacaagatgacgatgccaagtatgccacccagcttttagaggttggaacgacagcaccagccctcacactgcccaccatcaacggcgagaccttatcactaaacgacttccgaggaaagtatgtggtattggaattttgggcatcttggtgtcccgattgccgaaaaatcacaccgaaagtggaagagttgggggcgaaatatgccgaccatggcgtggctttcatacacgtttcgtttgacacccagaaagaggcatggactcaatacgtacagcaaaattggaaaaacaagcaagcatatcatgtttgtaactttgagaagatgaaagaatcgaaagtggcaaaggattttcaaatcaagtggattccctcgttctatcttatcaatccagaaggaaagattgtcatggggacggtgatggtggaaaaaatcgagaaaaaattagccgagctgatgcaactttcaaagtcctgctgtcgtctaaaagccaaatgatacatctcaaagacatcaacaagacctattttggcgcacagcccttgcacgttctcaagggcatcacgcttgacatagaggaaggcgaatttgtctctatcatgggcgcatcgggttcggggaagtctaccttattaaatatattaggcatcctcgacaattatgacagtggcgaatatgtgctgtcgggtacgctcatcaaggacctgagcgaaaggcgtgccgccgaataccgcaacaagatgattggcttcatctttcagtcgttcaacctcatcggcttcaagacagcggtagaaaacgtagaattgcccttgttctaccaaggggtaagtcgcaaaacacgccatcaacaagcccttgaatatcttgacagattgggattggcgcagtgggcagaccactatcctaacgagatgtcgggtggacagaaacaacgtgtcgccattgcccgtgcgctgattaccaaaccacagattatcttagccgatgaaccgacgggagctttggactcgaaaaccagtgtggaggtgatgcaactgctcaagtcgctcaaccaagacgagcacatgaccattgtcgtggtaacgcatgagagcggtgtcgccaatgagacaaacaagattatccatatcaaggacggactgataggacgcattgaggagaatctcgaccataactcaagcccattcgggacaggaggtatcatgaaataatgcttaaaacaagtcagacatgagagacatcttaacagaaatatgggcgactgcacgacgcaataaattgcgtactaccctcactgggtttgcggtagcgtggggcatcttcatgctcatattcctgttgggagcaggcaacggactaatcaacgccacgcaacagaactcaaataggtatctcaatacctccatggtgatatttggcggacaaacgtcaaaggcacacaaaggactgaaagaggggcgcaagatagagctgaacgaccgtgacatggaaatcacccaagagcgattcggcgacaacgtggaagaggtgggtgccgaactcgaccatggcaacaccaccatgagccatggaaaagagtacacagccgccaacatcagtggcgtatatcccaacgattacatcatcaacaagcgtgacatgatctatggaaggttcatcaataagatagatatcagagaccgcaggaagtcgattgtcatcagtgatgacatggcgaaggagctttcacccacgggaaatgtagaagatatgctgggacaaatcgtgagaatggaagacttggcgtttcacattgtgggtatttatcaagtagacaagagcatgatgggtaccgatgcgttcatccctttcactacctatcgcactatatataatgtgggtgacaagactggcaacatcgttttctcgttcaaaggcttggagacagaacaacaaaacgaagctttcgagcagcgataccgtgctaatctcaacggtaatcacggtgctgcacccgatgatgaggaggcggtttggatatggaaccgattcacacaagccatgcagatgagcacaggaatggggatgttacgcacggcattatggatagtgggcatctttaccctactcagtggcatcgtcggagtttccaacatcatgctcatcacggtgaaagaacgcacccacgagttcggtatccgcaaagctatcggcgccacaccatggtctatcctgcggctcatcatcattgagagcatcatcatcactacctttttcggatatatcggcatggtgttaggcattgcagccaatgaatacatgaatgccaccattggcaacatgaaggttgattcgggcatgtttaccaccaccatgtttgttaatcccaccgttggacttgacgtttgtatcaacgccacgctactaatggtggtggcaggcactatcgctggactcattcctgcacgcaaggcggcacacgtaagacccattgaagcattaagagcagaataagccatgaagtttgatatcgacacatacaaagagattatcgagacactctcacgcaacaagagtcgctctttcctcaccggcttcggtgtcttctggggcatcttcatgctcatgggactcatcggaggtggacaagggttcagagagttgctcaatcgagtgttcgaaggctttgctaccaactcctcagtcatcttcgctcaacccactaccaagccatacgacggctatcggaagggacgacaatggacattagaatataaagacgtggagcgtatcaaggcgaacgttcgcgacttagacatcgttacaccgggactatcgcaatggggtggaaacgctgtgttcggcgataagaagagcaactgcaacatcaaaggactgatggcggattacgccaaggtggaaacaccgcacatgtactacggcagatacctcaacgaaatggacatgcagcaacgcagaaaggtgtgcatattaggtaagaaagtgtacaagaacttgtttccaggcggtggagacccttgcggtcagctcattaggatagactccatctactacagtgtcgttggagtagactatagtgcaggtaacatgcaaatcaatgggtcggcagaagaaagtgtcgtcataccgctcccactgatgcaacaagcgtacaatttgggacaaaccgttcacgttatttgtgttactgggcgtcctggagtcaaaatgagcaaggtggcacaacccatgagagatgtcatcgcccgtgcacaccatattgatccgaccgacgaaaagggcatcacagtgttcaacaccgaagtgatgtacggcatggttgacagtctttttgccggtgtcaacttcttagtatggctcgtaggcatcggcactttgctggctggagctatcggtgtgtccaacatcatgatggtaacagtgcgcgaacgaaccacagaaattggcatcaggcgtgccattggcgccacgccacgcaccatcttgggacagattatcgcagagagcatcatcctgatagcggtagctggcatgagtggaatactctttgccgtcatcattctacagttggcagagatgagtaccaccaccgatggctttactgccgcgcacttccaagtaaacttctggactgccgtgggcgctgtcatcatgctgtctttccttggtgtcttggctggattggcacctgcactaagagccatgtctatcaaacctgtggatgccatgcgagacgaataatccaaataagaacactcattatagaatctattcatgatacacactgccgcccgcagaacgagttgcgcattgtgaaccatacattacaccattatgaaaaagaatatcaaatttatcgttgcaggcgttatcgccctcatcttcatcggaacatttgttttcctatggttcaagtcacgccctcaacccgaggtttacgacgagtttacccccaagatgtcgaacctgaagaaggtaactgtcatcactggcaagattgaacctcgcaacgaggtgaacgtgaagccgcagatttcgggtatcatcaccgagattatgaaagaagcgggcgagatggtgcaggctggagagattatcgcaaaggtaaaagtggtgcctgatatgaaccaattatcaaacgcccagtcacgcgttcgtttggcacaaatcaacgtgaagcaagcgaaagtgaactacgaccgtgagaagaaactctacgacaaaggattagtagcaggcgatgagtacgacaagatacggcaagcctaccagcaatcccaagaggaagtgaaggctgcacaggacaacttagaggtggttcgcgacggtgtgtcgaagaataatgccaacaccagcagcacacttattcgctccaccattagcggtttgattcttgatgtacccgtaaaagtgggtaacacggtcatcttgagcaacactttcaacgacggaaccaccattgccacggtagccaacatgggcgaccttatcttccgaggcaacatcgacgagacagaagtgggacaactgtctgtgggcatgcccatgaagattactatcggagccttgcaggacaacaccttacaagcgtctctcgaatatgtttcgcccaaagctgttgagcaaaacggcgccaaccaatttgagataaaagccgccattcgtaacatccagggaaagaaaatacgcagtggatacagtgccaatgccgagattgtactggcaagtgcgcaaaacgtgttgactgttcccgagagtgccattgagtttagtggaaaacaaacctatgtgtacatcgtcaagggagataaggacaataagacttacgagcgtcgaaaggtagaaacaggtatgagcgacggtctgaacatcgaaataaaaagcggcttgaacaagaacgaaaaggtgcgcggacccaagaaagtgaaagaagactaaaccgctaagtatcgctaacgttcgcatcctacacgtctctataccctcctttttgccctcacgaaaagcgaacacgctttttattcgcatccctataaaaggcagattcacacagtagcgcaataataatcagagcttctatgatgatacttcttttataaaataaactgttttatatggaaaaataggctgttttacccaccaaaacagcctattttgcttccttataaaatccctataaggcaaatatcaatcattttattttgtgctgtccacagtttgcagtatctttgcagaagataggcttcgcctcaacaaagaaagtaaactttctctgtcttcggcttgcactatctttgcaacggataatcaaaaaacttatatctgattgagtatcagattggaatgaaggagttacggatttatggtaacgatttagcgaaagtgcaagtgcactgatattctgtgatttacttcgcctcacaactctgtatgcaaaggtacactttttattcgggtaccccaaggaattgctcatttttctgtgttttgagcgtgatttcttgacctgtttgttactgttcttccgtaaaagtgaattttcctgtaggaaaggcgttggctgaaacgagttcagacaacctctttcctactatggcatatccgaaaggaatgtccgcttttgaagcctaaactctcgtttagacaatcggcaagcggacaaccctttcatggctatgcgagagaggtacttttacgggggcttgccgtttctttttttgttgttcctcttgtcgcaaatgaaaccgtgctgatgattcacccttacatggtaagggtcggtcatcggcactggcggcatggctgaaagaaagtccgtatatccgcatcaaaccgaaggtttgacgatggatgtgcggattatctttcttacggcacaaccgcctttaccacttgcgccttttgtttcttgttgaaagcggaacagggataggtacagccaaccacttgccactcacgagtgagccacaaaaggttgtccgtaccgccgaagcctgagaagaatgtccgtatgtgtctgtccgagcaagtcggataggcatatacggacacacttcttttgtggggcttcagtttgttcacgctttcatactctatcctctctatatttctttttgttgaaagcggaacagggataggtacagccaaccacttgccgctcacgggtgagccacaaaaggttgtctacaccgccgaagccggagaagaatgtccgtatgtgtctgtccgaacaagtcggataggcatatacgggcatacttctttgtggggcttcggcttgttcacgctttcaagcaattctccaagttagagtacgttttcttttctcatgcagttccgcattttgaagatgttccattcaatctgcctcttgttacgcttacctccattttgcgacttccagacgacgcatcaggtggtcattctcgttcggctgcaaaggtaactccgggatttgccggaaaagcaaggtcaagcctcctgttttgcgagaaaaatctccagccctacgggtagtatttttcccgaaaaaccttgcatttccgaatccctaccttgatggggcaaccgaaacgaaaacgaccgatgcgacaggaagacgcataaaaaaaatgtcggataaccgagaggcagataagaagttttgaaactcaactccctcagctcttggatccgcatataaaaattaaaaacagaacggatatgacaacaacaatggcaaccaaattcgtcgaatgggaagttccagaactggacaccctgcaagacagcaaggtttacagactccgcaacaaactcaacaacggaggaaagatgaaccgagaggagaaggattggctcacgcacaatgtgaacttcaacacctacttcacgaccgcagtccccctcatggggtggaatttcgacttctccgatgtgctccgcccctaccttgtgtgccaatacggaaggtggagcgagtatcaggctgcggacaagacggcactgagaaacgtgatttacggcaggatagacaacatcgtggaacttcaaaacggcaacagacaatgacagcagcaatggacatcagacagacggcacactacatggcggtagcaatatgcaccctcatcgtacaggcgttcctatggctcataggcatcctttggagcgtcatcagagagattgtgaacggagtgttccgagtagtggtaagcgtgatagtgctcatgctctccctcatcaccttcttcgggcttctcctttggttactcaccctttaacaccctacggcaatggcaaagagaacaagcaagacggcagcgcagcagtgcaggtactacgaggtggacaacatcttcgagtatatggtggaaacctacatcaacggcaaccacagcacgttcagcgaattgtaccacgaactgaacaaggaggcacggcaggacttcgtggagttcctattcaacgaggtcaatccgcagtaccacagagagattatcaagcgaatgttataacccctataaacagacagcgatatgaacagaacaacagagaagatacccacatggagtttgtgctacctcatcaatggcgatgcaacagcgctgacagacgaggaaatccgaatggtggacgagtgggtcagccaatggcaggtggaaatcgtttcgcccctcatggacgaggacggcaatacgcacccctatttcagccactaccccctcttcggactgcccaccgaggtggaggactgcgagatactttacaagaacaataacctataaaacagcaagcgacatgaaaggaacagaccatttcaagaaaacgatacagatgtacttggagcagcgtgcagcggaggacgaactcttcgccaagaactaccgcaaccctgccaagaacatcgacgactgcgtgacctacattctgaactatgtgcagaagagcggctgcaacggcttttcggacggagagatttacggacaagccgtacactactatgacgagaacgagatagaggtaggcaagcccctgcaatgtcagatagcggtgaaccacgtagtggaacttaccgcagaggaaaaagcggaagcacgtcaaaaggcaatccgccaataccaagacgaggaactgcgcaagatgcagaaccgacagagagcaagggcagccaagccaaagactaccgaagtacaaccctccttattcgattttgaagtatgagaccgagaaacaagtttgagaaagcggtgcttgccgagagcaggcacctgcaccccatcagcaagcgacaactgaaatgggcgttccgtgagtgcgtggaccactatgcctaccggcaacccaaaggacgcaccacctgcatggactgtggacacacatggcagacagacggcacagcacgcacctgcacctgcccccactgcaaggcacgtctgcaggtgaagaacaccttggagcgcaagttgcagcagaagcagtatttcaccctactcaccacctgcggagagtatcaagtgctgcgcatgtacctcctcatcgtggaaatggagaaaggctgcaaggctactcccaccgcccttgaaataggcggctattggtggaacaggcagggcaagcgcaccatcgtagccatacagcgcacgttaggcaggtacatagacaccttcacctttgcctcccccatggcaatccgtggcgacaaccttgcctaccagcatatcgcccacatgcccatctgccccgaatacaaggcggtggacaagctgcgcaggaacggcttccgtggcgacttccacgacatcgtacccacgaaacttattcctgcactcttgtccgacagccgtgcggaaacgctgataaaggcagggcaacaccccatgctgcgccactacctcaactcctcctgcaacatggaggactattgggcatccgtgaaaatctgcatccgcaacggctacaccattcccgacggctctctatggtgcgacacgatagacctcctgcgccacttcggcaaggacatacgtcagccgaaatacgtctgcccgaccgacctcaaagtcctccacgacaagttggcagcgaaaaggcaggagcaattgcagcgagagcggacagcagaggagcgagcgcaggctatcaaggacgagaagaagttcctcaaagagaaaggcatgttcttcggacttgtgtttgccgatgaactcatctccgtcaaggtgatagagagcgtagaggaaatgatattggagggcaaggcaatgcaccactgcgtaggcacgtactacaagcgagccgactccctcatactttcagccaccattgacggcaagcgcatcgagacgatagaggtgtcgctgaagaccctccaagtggttcagagccgaggcgtgtgcaatgccaacaccgagtatcacgaccgcatcatcaatcttgtaaacagcaacatcaaccttatccgtctgcggatgaaggctgcgtaatagaaacgattatgactacacaaatgaccatcaacggactcagtacctgcacagcggcaggtactgagaagtacgagagatttcaatcgggtatcggcagacgcaagcgtacccttgtgcaatacgactaccgccacacggacggagaacttttctcctgcgtgaagcccacgttggacgagtgcctacagaagcgtaacgagtggctgaaaaggaaggaggacagactatgagcgagacctatcaaacactgattgtcaggttctgcgagccaatcactacattggacggaatgtttgacgatgccgaagcatggggagtgtccaccttgaaagagtggatagacaactacgagagcagccgttttaccgccattgaccgccatacggcagtcatcacgagcgagtacaacatggaatgtctgaaagagtggttggagaagtacacatctatcactgagaaattagagtattgagaaattcacttgcgtttaggcggtgtccgcaccgcctaaacctaaaaccaaaaggcaatgaatacgatagcacggactatattggagcagataggcggcaagcgttttgccgtcatgacaggcagcagggattttgtggatatgggcaacagactgcgcatgagccttgcgaggaacaagaccagtgccaaccgccttgacatcatctatgatgcagggactgacctctacaacatgcgttttttccgcaagacgttcagcaagaagaccttcgagagcaaggcaatggacgtagaagtacatgaaggcatcttcttcgatatgttggaagaggtctttacgcaagtgacgggactctatacgcacttttgatatgtgggcggcgcaagccgcctactttctttcatgagcagggcaagcggaaaagaaagtagcaaagaaacctttgtgccaatctacgatcgtattcacaaaaacaaattttaatcatggaaacaatcagacagaacgaaaaaatcatcttgcacagcaatgacggaataagcataaagatgattttcagaaacctcacgggcagaaattttcaagatcaggaatatgtggaatatatccggcatatcgcaatcagggacatgggattctctcccggcattatcgagcattgcaaggatgatgaggtaatcggtaaaggaacaatcccgaatgtatgaaaactaaaactccgatgaagccgtaacttcatcggagttttagttttattcaattattacacattctctacaaaaggcatcctcgttgattaatagttgcaaaactcttcgaaaattattcatctcattctcttcggcaagttcttgttcgattttcttccctatatgtcctacacggaaatacatgtcgattgccttgtctatacccgttaaaatagttggcatatcatagatttctaaagaatcgtcaccatcttttgtcgcaaaatgaatagggtaacttctttgttttgtgtcaatcttagtctcttttaaccccaatttcttgtaatacaacatcgcactctttttaatatctgcatcaagagagttcggcatcacaatttttaagatacccttgtcgtatttgatgccgtcaatctccaatccaggcgtgttttctgtaagccattctgctgcaagttttacaaatccttcaaaataagaaattgctaaaacggttgatggcaagagtcctaaatgcccaagattaatattttcgtcaatttgtttttttaatttagccaaacctatttccagtgaatctgtagctactttatttccctctgcatcaaatttcacttcataccgtgtgttagttatacctaacaaatcggtaggtatttttgcttcttgttgagctattacaaatgctcgatccaatcctacacgaccaaggaaaagaccatattcaaataagacattatcacgggctgattcaaaatgtgtatctctgacaataagttcgtcatcagcagaaaataccataaaaccgaaatcaaatagactggcagatttaaccaatgtttctaaaaaagattcattgttcttaaagatattgtcagtccaaagataacaatcgtaattctccttaaaaaagtctttaactcgtttagctacgtcaagaccttcgcttgacgaaccgataaatattcttggtttcatatattacctaaatccttatttattttataaacttcgtcttccaatacttttaatgccgcaagtttttctggcttatctttaaaaacatattcgtttccaaccactgacttcaggtcatcttgcttgccgtcattccataaatggaacatcgtatgccacaagatataaaccaaatccttgtattctttttgtacgtaatcttgtactggtattgagtagcagatagcattgatttcaaaacttgtaagtgggatatctttctcagaatctgtacgaacattttttagaaacctgatcattcttttcaaacgtccatttgtatctgcacttctttggtttattcttgatatgcttagaaacggataatccggtccttcagaaagtccagtgcttttattatatatttttatgccacgttcattctctggcattccatccaatacataatccaatgattgaaaccatgatgatgttacaatatctacatctcgatgaagattttgattagtaattttcacagcctttggctttgatgtgtcacatatagtatatgtacgtgacattatcttttcaatctgtgtccgcaaggatgccatatcctgagaactatttccctcatattgagaaaatgagttatcgaactgacacaatctgccaatttgacagtcattatatttccatgttttcgctaattcttgtcttaccttaaaaatgtctgttccgacaaatttctcacatagtacaagcaagtctatatcactagctccccttatgtgtgtatctgtcataacagagccttggtattcatacgatacattcgttagagattctctcagatgctgtttaacgacctcccctgcggctttggtacgttttgtgtattcatcatcaaccgccttcattgcacgcattacataccttgccacatctttatcatatgcagactctccactgaacatcctttgctctacgagcactgaagaatctggattgtatcgattatttatttgtctcagtttttgggaataatccatatttttacgcttttattacaaaaagtgcaaaaagcgtgccaaatgacaaaatggcacgcctaactattatttatcagttcttttaaggctcgtacagtagcgcaaactccgccttcctgcgtttgagcagcatcttgtgccgtttccccttgtagttgcagaaagcgatgtactcctgatagatgttgcggtcgccagcctctaacttccttatcagcgtgcttttgggtatcttgttgcttcccaagagccgatatggtccgacattgtaggcaagtgtggcaagcaaaagagaatctttcccaaacttgcggaacatggcacagaacttccgcaaatccttccgcagcaacgcctcgccctgcttgcgtgtcatagttcttgcggaatacctttcgcccggttggagttggtgaccatacccgacgtacggatagtgcctttctgtatgccatccctcgaagaacttgatgcagcgcactgccctctcaaaacggggcaggcgatatatccttgccgtttctgtgcggtcgccctgtgcagacagagggcagaccgtcaggaacgaacaaaagatagccatgaatatccgcatcatcacgataaaggcttgaagttactgatggggacaacagacagcgtatcgtccttcgcgttctggttgttgaagtcaaactccaactcgtaggcattcccgaaattatcctccaccaccacgatgaagttctgtgcctcgctgcatcccgatgtgtaatacaggcggaacttctcattttcgagcagatagcggtcgttgggcaggaacgtaatgccattgtccattttcagcgtgccctcaccttcaaactggaaatagcggatggtgtagagcgcattggcatagttgccctccttcttcatctcgcagcggatttctactgtctgccccttcgtcaccttgttgggcacgggcatcgtctccaccgtgaacggataggactgctgtatgtccagctcgtcgtcgcaggaggcgaggaaacaccccatcagccccatgaacaggacggttgccatactcataaatcttactctcagattcttgttgttcttgatattcattgtcattctttgttttgatggttactgattttctgtttggccacaaggtactcgttcaagtccttgtagcccgaatagagtccggaatgatctgtcatacgctccccaaaatgcttccacaagacttccaccgccctgcgtccggcatcgtcatggtcgaggtgacagactatctcttggtagttctccaaggcagggattgccttgtccacattggctacggagttcagcacaaggctgtcctcctcattcccgatgcccagagtcagcgcagaaagccaatccataaagccctcgtagaggtggcagcgactgcttccctgtctaaatgaagaaaagtcctttggcggtatgcagcccttgaagaagcggttgcgtagctcaaatcctccgcaacgatttccgtaaccgatggcaaagtaccgctttccgtagagccggaaatggacttccttgcaatgccgttgggcaatcgccggagcaattccacgctcctccaaatacgagagtaatgcccgatgacttaacggccttatctccatctcctcaaatacaggcttcttttccacggtcttatgaggacgaggttctatctgcggaagcggaacgatgcccgcttccgtgatgaatcttgcctgctccatgaagtcgttgctgtggacaaactcgcctgccagcgtgaagatgtcaccacccttacccaaaccgaagtcataccagagttgcttgtccacgttcacacgaaacgagggagtgcgttccgtgcggtaaggtgcggcataccaccattcatttccccttcttcggataggttcatgccctaaacgtgtgaggaagtccgccagcggtatctgcctcaatgcgtcaatctccatacacaatatcagttaatgatgaacttcacgcccaagccgaactgcgtatggaaatgtctcgtggagttgccccatagacaccgttcacggagattggcgagcagggcaacacggtcggccacataaaactccacatcgagtgtcagcgcaccgccatagatgaaggaatctttatcgtggagcatcgccccgtcatgcagcaccttgtcgccccagttcaccgtctcatagcctgcgagagccgaagctccggtatagacaaacactgttttacgggcatcggaaagtatcttgaaataataaccaccctccgccgtaaactgcgccacgggtatcttcttctccttgtagggctggttcttcagcaggtattcgccaccgaacacccacttgttgccccctttggtataggtggaaagaattgcaccaagactgtacccgccatcgttaccaccaagtttgaagccgtccgccatgttcgccttcacctcgatgccctgcattttcgggaggcatcgctgggcgtgcgcctgccccgtgaacagggcaagcgacgcgataatcataaaaagacatttcttcatagagtcagcgcacttgaagttcgttgatagtattggcacgcaccaaatcctcgttctcaatcacgaacgactggtgacggccaccgttcttctcattcagttccaccacgaggcacttgtcgtcaggtatggtgaacttcgccattgtgaacacggtgcgctcgctcttcttgcccggcacgcaagtggcgtagttctgcgcacggagcggcaggataacctgctcctgcacggcggtgcgcttcaccacctttttgtccacaatcttccatgtcacatagtccacatcaaacggcacgttgctctggttcttgatttccgtgtggaaatacagcagtccgttgtgcgtatagattcctttcagcaggtactgtatgccgaaacgcttgcagccgatgtgcttcacctcacgcttgttctgcttgtggatggacttcatgataagtcgcaccagcatcggactctcgctgcccagttccttcaggtaaatctcctgagcattgttcggacggttcaccgcctcgccgtcgtggatgaagtcgcacatctccacgttgagcagcagcggctccttggcatacttcacattgaaggtgtagaagctgccgtcctccgtgatgacgctcatgttcgtctcgttcttgaagttcttcacggttgccttcacacggatcacgttctccgcaccgtccgccttgcccgctatcaggttgggcgagcccaaatccacatagcgcacctctgccgggaagatgatgtgtacggtcttgtcgtacgtcacctccaacccgtggggcggaatcatgcggtcgaaggtcagcttcttcgtcagcccgtgatacaggtcgccgtccgcctccttctgcggatagacctccttggtcagggtcggctgtccgtcactcacgttactttccttcacggtcttgttctcctgcgcattggcagttacgatgcccatcgcgagggcaaaaatcatgattgcttttctcatttcactttggattttagtggtgaataaaaattggattgttgttactttatcttttatatttctcagtctctgtcctgatacagcatcaccttgtagcccgccttcagatgcaccttcacggtacgcatcttcttggcgatatactgacttgtgccctgtatcagccccttgccgaggtcggaggccaactgtgcccccgcattggtagagatgttgatgctgctgccaagcgaaccacccatgttggcggcaacctcccgcaccgcatccatctccatcgagccggggatgaagatgccctgctgcccgtccgtgtcatagaccgaaagctccacaggcacgatggttccctcatgctctatcgaggtgatttcgatgtcgaggcgttcgctctgtacacgtgccgcacctaccaccacggcatttcggggaataatccgttccgccacggccatcggctccagcaggcgcagcttcactgcctgcccgtccgtcacgctctgcgctccattgacgcacgccgatatggtgttcttgtccgtcaccccgaccttgcccacagcagtgttgaaaccatagttccgttcctgcgcatgggcggcgatgaactcctcgttgctcattggctgtccgagagaggacactacctgcttcgttacctgtttcacaggagtgacggtgttcttcccggctttgctcacagtggcaggcattgcctcctgcttgggctgtccgccattctgaccgcccatgtactttgccgccagttcataggacttttccatgagtgccacttggtcgtccatatcggaagccttgccttttccgctttcaagttccgattccagcgaggcaatgcgctccagcagctcctccatctccgcattttcctcctttggctgctcatagaaactgccaagcgtggtgttcaagtcacggtaggcagtggcagacgaacggatgctttgcggcgccaggggcttgctcttttccgtgctgtcattatcggtcagactgaaatccgcagaggattcgtttccagccacttcacggtcgaacatatcccccagctccatcatcgagcggttgcggttctccttacgttcctccatcgctccctgctcataggccttcgccttgtcgccgataatctgcctgtcggccttgtcggcatccggcatctccatgttgtagccgtccatgcccggctctttcgtcccctcagacgatgggccaaaaatcagccacatcgcaccgaggaacaccagcaccatgacaggcagcacaatcatcttctgccgtctcagtcgttccgcctccgtcagcggtgtgcgctcctgcttgggcttttccttgcctttctccttgtcgggagtcttgtccttgtcttgtacttcaatcttcgtctgttccatacgcatttacgtttaatggtttgatatgtcctgtttctattgtgggactttcgtcccttccgatgtcatagacggctttgccgaaagtgtagagggcaagcaccgcaaagacggcgagcattcccaatacgatgcgtctcttcgtccgatgtggcagactctccagccggtctttcgccgacttcgtcatctgctttcttttgtcgcggagactccagaagagcctccacgccgtttttctgattctgttttctttcatacccgtcatcgtttgattgtctgtaaatccttgttctcaatgatggtgaatccctcgatggtgaatccgttgggattgtcgtccgaacgtgatgcgttcagcaggcggcacgtcgtcacgaggctacgctccgtaatgttgctctgccggataatctgctgccgtgcgtaggtggtggcacggtacggatagccgttgaagtcgcacaccacactgtccaccttcagcacctggttgatgttgcctgcgatgatgcggttgtagtaacccttctccgcaaagtccgagtagtagttgtacacgctgcggtcggccaacagcagtgcccgcttcacgttgtgctcaatcgcgctcttctcaggcgagagcgtgaagaacagctcatggaagcggcgcacatgctcccttgcctccgccggacggttctgcgacaggtcctgcgagagggccagcatcagcgacttcccgttgtccagcacataaatcttctcccgctgtttctccgcaaagcggtaggaactccacacgctccacaccgtcaccacggcacacaaggcgaggaacaccatgctgaacaggcgaatctgcctgaacgatgtctcgatgttctttaatgacttgaattccattttcttgttttctccatgttttgatgttacacatactttctttatctcagcagtttcccgacacgtccggccacattgccagcagtagcacccgccacgctacctgcgaatccgccagccttgccagccgtctggttcacgttgcgcccgtagttgcccatgcctccggcctggataatccagcccgacacggtggggatggtgaagtagccgatgatgccgatgatcatgaacacgatatacaccccgtcgcttgaatccagcgagaagttcgggtcggcctgcatccgctcgatgtcgctcagtagcatcagcacctgtatcttggccagtatggtgctgaacatgtccgacacgggcagccacagatacacctgcacatagcggcatatccactgcgtcagcgtgctctggaaaccgtcccacaccgagatggcgaaggctatcggccccagtatcgacagcaccacgaggaagaacgtcctcagcgtgtctatcacgagggcagcggcctgaaacagcagttccagcaactcgcggaagaaatcgcgcacgccctttttcatttggtacatgctccgctcgatgtacatccccgtcatggtgacaaggtcttcgggcgaccaacccagttcctccagctgcttgtcgaactcctcgttcgacactaagtaggccgtctcggggttgcgcttcatcgcctcgtattccagcttgtccttctgctcccggtactcgttcatgtccagtgtctccgcctccagcatctgggccgtgccctgcacaatcggcgagagcactccgctgagcgtgcccagcaccaccgtggggaagaacatgatgcacagccctatggcaaacggacggagcatcgggaacacatctatcggttcggcacgcgccagcgactgccatacccggtaggccacgtagaagagtgcgcccagtccggcgatgcctttcgccacgcccgccatgtcctcgcacagcggcatcatctcgtcgtagagcgaccgcagtatctggtgaaggttctcgaagtccataggctaccagtatctttcgttggcactgccgtagagccccatcacacggtcgaggtcgtttttcttcttcgcccgcaggtagctcacgctgatgttcttgttggtgtagtagctcacgaggttgcggtaccgcttcatcttctggtagcagccctccaccacgtccatgcggtccttgtccgtcatggagagcgtggtgatgttcaccacgttcttcagctccgtcagcacgtcgttgctctcttccagcagtttggtgtagccgaaggcgatggctgagagttcctccaccgtgaagttctcgtcgtgcatcatcttttggaaactgtttacgtagatgtccgtgatgtcgcccaccatcaggatggtctgctgcaccttgcgggcatccttgacgaggttgttcaccgacttcagggcatcgtaatacttcttgccctgctcgtagattttcaccgtctcctgaaaatttttgaccatgtgggtcgccgttgtggatgtgtgcgccacattcttggaggtgttcacgatgctttgcgcgatgttggacgggtcgatgaccgtccactgtgcgcttgccttgcccgccgtcagcaggcacaggcagataaggattgtcattcttgctttcattgctcgctattgtttggtcggttcctgtcttactcttacatagtccccattgggcgagaaagtcagcacgtccgtctcctcgttgtaggccacgtcgatgcggaatcccgtattcatgaagaggttgccgttctcaatctgcaggagataggtctgcggtttcaactcgcgacccagccccttgcgcttgaacaccgtcaccttgtatgcctttccttctttatagatgagcacgtcgggcttaccctccacgctctcccagttgccgcagagggcgggacggtcgtccctcgccgcctcactgcatgactgcatggccatacccgccattcccagcacgatgccgcaaaggagcagcatctgcctacttgttgtcttcaatcttcttcccatgttctgaatcattgttgaatgtgataaaattggttgtgataaacgttatgtcttgcttgtccttcttttctctgccagttgccggatggcggcttcgatgtcgccggccagttgctctgtcagccgatagacctccaccttctccgtttcctcggtggtgtaggcaaggtattcctccgcgctcacctcggtggcatagaccgccgactgcgtgccgcccagcccgatccacacctccttgtagagccgtgacgggtggttggccatgttgatggagagaatctgcgacttctccttctcagtcagtccgagcaatgcctgtatctggtcgaacttgttcatgtacttccgttggtcgagcagtatcttgcagtcggagttgttgatgatgctctccttcaccacgggtgaggagatgatgtcgtccacctcctgtgtcaccacgatagcctcgccgtaatacttgcgcacggtcttgtacatgtatctcaggtattccgccatgttcgccgaagagagagccttccatgcctcctccacaatcagttgcttgcgcacgcccttcaatcggcgcatcttgttgatgaaggcttccatgatgatgatggtcaccacggggaacaactcacggttctccttgatgctgtcaatctcgaagacgatgaaccgcttgccgagcaggtcgatgttctccgtggagttgagcaggaagtcgtagcgaccgccccggtaatactgccgcatggtggtgagcatgttgtcgatgttgaagtcggacttctccacctttatctcccgctccgccagctcgcggcggtagtcgtcgcgcatgtactcgtagaaggtgttgaacgagggagtgatgctccggtctgccctgatgcgctcgatgtaggcgttcaccgcactgcccagctcgccgctctccgtcttcgtcaccttgtcgtcctccgacttccagagcgtcagcagcagcgtcttgatgctgtccttcttctccacgtcgaacacataatcatctgtatagaacgggttgaacgagataggcttctcctccgtgtaggtgaaatatacgccatcctcaccatgggtcttgcgccggatcatctcgcacagcccctgataggaatttcccgtatccaccagcaccacgtgcgtgccctgctcgtagtactggcgcacgaggtggttcatgaagaacgacttgccgctgcccgacggacccagcacgaacttgttgcggttggtggtgacgccccgcttcatgggcaggtcgctgatgtcgaggtgcaggggcttgcccgtgagcctgtccaccatcttgatgccgaagggcgagagcgagctgcggtagttggtctcctccgtgaagaggcacacggcctgttcggtgaaggtgtagaacgactcctccgcagggaagtccgccgcattgccgggcatcgccgcccagtagagcgtggggcagtcgatggtgttgtgacgcggcatgcactccatgcttgccagctgactgcccacgtcgttcttgatgtggcgcagctcttccgcatcgtcgctccatgccatgacgttgaaatgcgccctcaccgaggtcagtccgtaggagtgcgcctcgttcaggtattgctctatccactcacggttgatgctgttgcttctactgtatcgggagagcgactgcatgttacgggcggacttctcgaacttctgcaggttctcctcgctattgtcgagaatcacatactggttgtagatgtggttgcagggcagcagcagtcccacgggactggcaaaggagagacggcagtcagagcggtcggtggagagtttctcgtacctgacatcggtggataccttgccgggcaggtcttccgcatcggagagggtgtgcaggcacaggcggttgtcgccgatgcgcatctcccttgccgagaggtcgatgtcctgcaaggtgcggtcgccttcgggcatgagggagaaataacgctctatgagtccggccttgtcctccgtaccgacaatctcatcggttgtgagacggcgcagcctgatgaagccgctgtcgttcatgatgcgggcgaactgttccgtagcctccatgaatttctccgctgtctccctgtccagttccttggggatgatatgcccacggcacagcgtgctgaagttgctctgtatacggttgcgctccttcgtggtcttcgtaaggaagaggtagcaggtgtgcttcaggtagggacgctcgttgaagtgacgctcaaacgagcggctcaggaaactcatgtcgtccttgtgaagttccggctgatagcgttccttgatgaaccagtcctgcttgtggacgatggaatagtcgggcagcaccttgatggccttgcaccagcagccgtgtatggcctcgtattccgcacccgtcacagtgtagagttccggcagctccacctcgtaggcgaccgtgaggtcggcatcctttgagacgatacagccgtgctccaccgccagcaggggaaacttgttttccagtgttgtcattttggatatgttcctcattcttgttccgttttctgtttgttcttgaataatcgggttatccgccgtcggttgataaggtatcgggggtggctgcgtgccgctcccagcttcatcagtccgtgctcgccgtaccgggcgttcagtgcgaaggtctgccatacgaggatggacgacgacaccgcaccgaagccgatacatatccactggccgatgccgaccatgtagaggatgacgaagaggatgaagagagccagcaacccacctgcgaagatgaacaggtattgagccttcagacctttgaactcaaccggacggccgatgcccttgttgatggggtattcagccatacattattatattataggaagaacgagcgcagaatggtggctgccacgatgaggaagatgcacgctccaaaccagcttgcggcggtcttggaggtgtcggggtcgcccgacgagaacttgccatagaccttcacgccgccgatgagtccgaccactgcgccgatggcgtagatgagtttcgtgcctgggtcgaaatacgaggtgaccatggaggtggcttcgttgatgcctgccagtccgttgccctgtgcgaatgctgttgcgcttgcagcgatgaggagtgctgccgagaggattgttctgatactgttgttcttgttcatattgatgttctattttgtgccctcaaagggtggatagtccttgtcgggcgggttgataatgatttactttattcggatatagtggtgtcgcccttttgtttccacggacttaggctgtccgtttgcggtctggatgtaccttgtaccgctctgccgctttgttgttgcattactttctattcattctttttttcgttgcaatggttatacgttatacatagtcccggatgttgaagtcctccagtttgtcggggatgacgaaatctttcttcggcttcttcaggcgaatttccatcagtcccttgatgcggatacttacttccgtacttccggccattagtttctcatagagttccgtgtcctccagttctgcgaagacctccctcgctttctgctgttccttgcccgacgggttcttcttggtggctatgtggacagcctcacgaatctcgtcaaagctgaaaccagaggctcgcggacgttcgctttcttcttccggctcatcatccgaataacccagctcgtccggtgaaaggctcttgaaagccttgtcgagtttctcgtccgggatgcgagcggagtccgtttcttgctcgctgtctttgttttcgctttcaaaagtaatgtcgttttccgacatctccacacctttttcggaagtggaatcctttggcacaggggtggcagcggttggcctcggagactgcattctgaacttgcttttcccgataatctcattgtcggaaactggagattgggacatcgttggcctttcctccgccgtttcatgaagcgacttccatacatcggcaatgcctctcaggagtcttgccgccttggtgtcggctatgcggtctgcaagaagcagcaggataaaccagacattgcagacaatggacacggaaagcaggatataggtgatgctcataatcttgccttcaatgcttcgttcaatacttcgttgaaggttgtcccgtgcatgcggaagtggtcttccagcacattgtggagataatccgctatggtaatctcacctcgacagccgagattagccatcagacttattttctgatgaaattcctcgcagatgtaaacttgcttgccgtctcttgctttgatgccagccttcttaatgaacttgttgaaaatgcttctgagattcttcttcattgtcttgtaaatttagatgtgaataatttgattgccccgattttatgctttagatgcgatacactgcacatcattgatctcgcagagtttgctctgcaatacgtttttcacgtaatcgtccacggtacatttgccgtctcccatgacttggatgatattctctatcacggcataagttgtcggactgataggaataggacgggtattcgcctcgcggagctggtacttcaatatgctttccacaaaggcgtccacagtgcagccgtctgtctccataccatgaatcagaccctctatcatgtcataggtcgctgcgctgatagatatagaccgggattccttaccactgagaccatgcttcagcacgttctccacaaaatcgtccacggtacagctgccgtctcccatgacttggatgatttgctctatcttggcataagtcttcggactgatggccactggcatggcattcttcttgttgatgccattgctcttcaaaaacacgctacggtaattgctcacttgattcttcttcattgtcttgaaatttttgatgttaatactgttgttaaatcaaattgtctctttgtttcttgtacagttcgttgatgcggtccttgtgctgttgcaggtggaaccgcaggacggtgtcgatgtatccgcccactgtcgtgtcctccggggcgatgctgttgactatcttcaggatgacgctgtggacatccctgctgatatacacgcactgccgggtcttgatttcgttgcgaccgagatatagcccgatatagtcatcgtcctgctgtttctttttgccgcccgcatcgcgcctcgttggagcgtaggacttttctttctgtccttgcacggactgttcttgtacgggaagaggcatctgttcctcgcttcttttctttccgatggaggcaatcaacagttcctcgtcaatgccttccgtattcacttttctgcttgccataattacgggttgtttatgatgttactgatttcctctgcaaattccttgatgccgctccccttcagcagggcggagtccatcgggaagatggtggaacggaacacgcccttccgttcttccgaaaggtcacggcggtatttcttgctgtcgggcagtcgtgtggataagactgaaagccccatctccgccatcacgtcctcatagacctcatacagcccgttcttctccctgccgtcaaccatcgtccagaacaggtggaaggcttttgtcttcgccctgcctgtcgtcatcaggttgtccttgaacatggtggcgaactggagcgtgctctccaccacgaaacggtctgcactgactggggcgaagatgtagtccatctgcgagagcgtcttgaccacgccattcgccttcagcgtgccgggcatgtcgaagaacaccacatcgggcttcacctcctcgtttgccagcagtttctccgcatcgtccaaggcgttcaccgcatcgctctccactatcggataggcatgcttcttgattttgcggaaatggtcgcaggccagtgccttgaagtagaggctttcctctatcagtttcaactcgcgctcacgcaaaccgtgaatgctgtgctgcggggcatcgcagtccaccaccgccacattcagccccatcacattgtgaaggtaacttgcggcaagggcagtgacggtggatttgccgatgcctcccttctgtgtcgcaaaggcgacgaagatttctttactcatgtcttctcgttttttgaatgattacttactcgttttattgtctctctatgggattgcatcccggtgtcttcatttatgcggatgattggcttgtcgcttcaacggctttccccttatccggttcttcgcctgtttgaatccccactgaatgacggcatgaagtcattgcatcattacgtatgcgcttcatcgtatctgtggattgccggacctttgaaaatccgcttttctacttatccgtcaaaccggttacgcatggatttgaacagtcggttttctgagtccgcaaatcatccgtgaactgaatcacgatgcaaaagtataggcattttttcatatccgtatcactttcagaatgagtggcagcgagtggcacaggatggtagcggttggcaccgcaaaaacgctgattcagaggcggaaatagcagtaattttgcacccaagcgacagggcttgcccttggaacactgccaccagggttatcaggcaacacaccaatccgtccgaaggcggatttttattggcattagccaatagcaagatgtcttttcagttactcaaaaggatttgagttacccgaaaagctcttgccccactggcgggggacgggctcttcctccgaagtcgggaagcctgatgaaaaccgatgcttggagttgggaaaggggtcttgacgtgaaaccactaaatccaatcaatgatgcagaaagagaaaagaaggacggggcgatgccccaagttggacacgaagacgcactgcgtgatggtgcgtttcgacgacggcgagtggaacaggttcctcgccatgtacgagagatcgggtgtctatgccaaggcggtgttcctgaaggagcagttcttcggcaggacattcagggtcgttacggtggacaagggcttggtggactactacaccaagctgtcggatttccatgcgcagttccgtgccatcggcacgaactacaaccaagtcgtgaaggaactgcggtcgcatttctccgagaagaaggctatggcgttgctctacaaattggagaaatgcacggaggaactggcggcgttgagccacaggattgtggaactctcaaaagaaatggaggcgaaatggtcaccaaaatcagtttaggaaagtcgctctacggtgcgctcgcctacaacggtgagaagatcaacaaggagcagggacggctgttggccaccaaccgcatcttcaacgacgggagcggcacggtggatattgccaaggcgatggagggctttctcgccttcatgcccgccacggtgcgcacggagaagcctgtgctgcacatctccatcaatccgcatcccgacgatgtgctgacggacacggaactgcaggagatagcacgggaatacctcgaccgtctgggctacggcaaccagccttatatggtctataagcatgaggacatcgaccgccaccacctgcacatcgtcaccatcaacgtggacgagagcggaaggcggctcaaccaggacttccttttccgcaggagcgagcgcatacgcaaggatttggaacggaagtatgggcttcattcagcagaacggcgaggcgagcgcatagagcgtccgctgtgcaaggtggacgttgcggcaggcgacattaagaagcaggtggggaacatcgtgaaggcggtgaacaggcagtaccgcttccagtcgctgggcgaataccgtgcgctgctgtcgctgtacaatgtgacggtggaggaagcgcggggcatcgtgcgtggacgggaataccacgggctggtgttctccgcaacggatgatgcgggcaacaagacgggcaatccgttcaagtcctcgctcttcggcaagtccgccggatatgatgcgctgcaaaacaagtttgcacgctccaagaaagagataaaggacaggaaactcgctgaaatgacaaagcgcaccgtattggcggctttggaggcaacgcaccaccaagaccgcttcatagccctgctcagggaaagaggcatcgacacggtgctgcgccatacggaggacgggcgcatctacggtgccaccttcatcgaccaccgcacgggctgtgtgctcaacggctcacgcatgggcagggaactttcagccaatgccttgcaggaacacttcacgctgccatacgccaacgaggagccaataacgatgactgtacctgcggaagagagtgtgcctactgaagatagaaatgcagtcaggccaaaggcagaagaatacaccgacgacttccacatctcaggtgcagggcttttctcgcccgacggctcgaccatcgatcccgaagaagaggcgtttatccgtgccatgcagcggaagaagaaaaagaagaagcgtaagggactgggaatgtaacatcgtattttttattcacttcaaaacaaaggaacaatgtcacaagaagacgatttgagggcactggcgaaaatcatggattttctgcgtgccgtgagtattatactggtagtgatgaacgtgtattggtactgctacagtgccatacggctgtggggagtggacatcggtgtggtggacaggattctgatgaacttcaaccgcacggcggggctgttccattccatcctctacacaaagctgttcgccgtactcctgcttgccctttcctgcctcggcacaaagggcgtgaagggcgagaaaatcacttggagcaggatttggacggcactggccataggcagtgtgctgttcttcctcaactggtggatattggcactgacactgcccacggaggcggtggctggactgtatatcgccaccatcggcacgggctacgtctgcctgctgatgagcgggctgtggatgagccgtctgctgaaacacaatctgatggaggatgtgttcaacaccgagaacgagagtttcatgcaggagacaaggctgctggagaacgactattccgtgaacctgcccacacgcttctactaccgcaagcggtggaacagaggctggatcaacgtggtcaatcccttccgtgcctccatcgtactgggcacgccgggcagcggcaagtcgtatgccgtggtgaacaacttcatcaagcagcagatagagaaggggtattcgatgtatgtgtacgacttcaagtttcccgacctctccatgattgcctacaaccatcttttgaaccacccggagggttacaaagtaaaaccgcagttctacgtcatcaacttcgacgaccctcgccgcagccaccgctgcaaccccatccatccggacttcatgaccgatatttcggatgcctacgagagtgcctacaccatcatgctcaacctcaaccgcacgtgggtgcagaagcagggcgacttcttcgtggaatcgcccatcatcctcttcgctgccatcatctggttcctgcgcatctacgagggcggcaggtattgcacttttccccatgccatcgaactgctcaaccgccgctacgaggatgtgtttcccattctgacgagctatcccgaactggagaactacctttcccccttcatggacgcttggcagggaggagcgatggaacagttgcagggacagattgccagtgcgaagattccgctctctcgcatgatttcgccacagctctactgggtgatgtcggacagcgagtttacgctcgacatcaacaaccccgaagagccgaagattctctgcgtgggcaacaaccccgaccgccagaacatctacggggcggccctcggcctctacaactcccgcatcgtgaaactcatcaacaagaaggggatgctgaaatcgtcggtcatcatcgacgagctgcccaccatctatttcaagggactggacaacctcatcgccacggcacgaagcaacaaggtggcggtgtgtctgggatttcaggacttctcgcagctggtgcgcgactatggcgacaaggaggcgaaggtggtgatgaacaccgtaggcaacatcttctccgggcaggtggtgggcgagacggccaagacgctttcggagcgtttcggtaaggtgttgcagaagcggcagtccatctccatcaaccgtcaggacgtttccacctccatcaacacgcagatggattcactcatcccgcccagcaagatttccggcctcacgcagggcatgttcgtgggtgctgtctccgacaacttcgacgagcgcatcgagcagaagattttccatgcggagattgtggtggacaatgcgaaggtcgccgccgagacgaaagcctacaagcccattcccgtcatcacggacttcacggacgagcacggcaacgactgcatgaaggagaaggtgcaggaaaactacaaccgcatcaaggacgaggtgaagcagattgtgaaggacgaactggagcgcattgccagcgatgaaagcctgaagcatctgctgcagaacaagtaagaaaaaggcggtagtggacaatgattccgctaccgcctaaaatgaagaacgccctccaagtatgctgccttgcggctcgcctggagggcttattatatcgtgctaattgaaaagctctatcttttctatcagagttgaatgtgcggtaaatggaattaccttcttgtgctgcaatcttccgacaatgattgcgggatgtacattgaacttttctgcataatatcgaatcgtatcagcagaaaaatctccctgcctgattatctcgttttcctctgcctgagacagtaaggtgcgtgaagagaaagcatcggcctcttcctccttttccttctgtttgtccgcatattcaatgtcttccaagaatatgtctttcttgccatgtagcaggatgtgtcccaattcgtggaagaatgtgaaccagaatatgtcgtttctcttatgtcttcccgtcatctgaatgcagggcgcatcattgatccatcttgtggagccgttgatgggagccttgggcagacaaggtgtataaaccagcttgacgcccaccttggcacacagttcctgcaatgccacggcaaaatcagcaggatgctcagcacagaggcttttcatggcagggatagcttcacgcagtgccttctcggaaaactcgcagacttccgtttctgctgcctgcacttctccctgacgcagccatgcggatatggcgtgcggctctttggtgttattgagggatatacggaatgccactttcaactgttggttcaggtagtagtcttcccatgccctttccgtgctgacctgaaagaacgagagcaatgccttgactttctcctcaaccgtctttaccatgggaatccagcccagttccatcatttttgccaaggggaacgaacatgcccattcgtatgccagggccagttgctcttctcttttctgtcgagcaacatactcatcatacccgcgctgtatgttcagccagaaatgtgcgggaatctttgtgacactctcgaacgccacagccatatcagaggtcacactactcttgccgccaatgacggcaaagatggtcttctccggttttgaagtgcgcacagcaaactcctttacgctcatccccatctctttcagtttgtctgaaagggtgataccgggatgaaactccaccggcggaacgaatttctttaaagttgccataatactatactatttaccgtgataattcactatttctacaatttctactccttttatctctatccagacatacttgccgttttcgtcggtcggaatagggtcttcatgaggctcaaatatcagccgatacggctggtcgaggtcacaagcccattgtcctttcctgttttcgctcagttcatgatagcgtcctggcaggtaacgcacatcttccaaggtgtcggctcgatagagatctcgaagacgcttctggaacaattcagctcttgtctgaccaagttcctttaagcattttcgtgggtcagatgctatcttctccagtttcttgctctgaaagaatatatccattggctgtctatatttgacttacatattctattatacttttctgctgcaaagttacaactttattttcaaataacagatagtgttattcaaaaataggtgataatttatgcttttttggctaaatcacatccttttaccgcctcatccgctccaattcctcatcccgtcgaatcttctcattgagtttcttctgcatcttgtcgatgaaataggtgcggctgggattcttgcgcagtttgatggcggagtagtagcggtaacactccttggtgtcgagtccgaagaactcgtagagggcaggggcgagcaccttcaagggagtctcgccgttgtctatacagcccatctcgctcagcccgtaaaccagctccacaaggtcgagggtgttgcccgtccattgcagggacttctgtgttttgctttttgctgtggggataacggtgggatggatgttggatgtgagtggtggcacttggggagctgcaaggaacttctgcatcttgcgcacaaaggcaagggctttgcgtacatataagtcggtcatgctttttccggcagctgtatacagcgtgttatgatactgcaattcgttctcggtatatgccagtgtaatggcagcttggttgcggtcagcacattcatggcataacgatatgactgagcttatgaaaccaccgtatgcggtcttcagacagccgctgtcggcttcgttaatcatggcgaaaaattctgtttccgccaatatgaggtagttcatgttctttttccatttgagggtttatagttgcttgtcgttgtgcgcacactgatatacaatgcaaaatgcgctccctcaaataggaaatcgtgaagctagatatgttttacactgatttatagcgacataaacagcgaaaatatttttagactgatttttctgaaggacaaaatgtgttcacaatctgaacacgtgtacattttctgaacacggttattgttcagaaaatgtacacacataaggcttgttcattcttttgcgtcgtcaattccgtattcttcgattttgttgtacagcgttgtcctgccaatgcccaatagtatcgccgccagctttttgttcccgtcagtttgtttcagagcccgcagtatgcggtctttctcttcttcatcactctttagcgtaaaaccgatggatgaagctgtttgttcattgtcaagttccagactattctccgttatgatatcgccttctgtgtgcagtacggctgacagaatcttctgtttcagctcacgtacattgcccggccacggataggcgagcaaggttttacaggcggatgtgctgaagccttgtatgttccgttccagttcctgattggctatttcgcggaaaaactcagccaacgggattatgtcctccggacaatcgcgcagaggaggtactgttatcacatattcctgcaaacgatatagcaaatccggtctgaagcgtttctcggcaacggctttatgcaagtcctcgttggttgcagcaactatacgcacgttggctgccttgtcctctttggcccctatcggtcggtaacgtcgttcctgtatggcacggagcaacatctgctgcatctccggcgtcaggttaccgacttcgtcaaggaataacgttccgacttcggcttcttggaaatacccggttttattggtatcagctccggtaaatgaccccttgagatgcccgaagaaagcggattgcgccaatgacggagataacgccccgcaatccaccgcaacgaaaggtttgtcagacagtttgctttgggcatggatgtgttgcgcgatatgctctttccctgtcccgttttctccaagtatcagcacactcatacgtgtggcagcgacaaggcgtacccgcttctttatattctgatatgctgcgccttgtcgaataaatatcggcacttggcgttgcgccagtctgtcccgttcttcctgtatggaacggattagcggtagcagtttgtcttccagcagaggtttctgtatataatcttttgacccgagtttcatactctctactgccgaaccgacttcaccgtagtttgtcattacgatgaacggatgacgcatttcatttttgcgcatccatcttaacagttctatactgtcaccctcgggtaaacgcaggtcggcaagcacgatgtcatcatccccaatcttggtcaacaacttcttggctgtattgagatggtatgcctgctcggtcttgaagccgccttttttcagaaggttgcagacatattcgttatagacggtattgtcctcaatcacatagattttcattgagcttcctcctttcgtttttggcgacattgatgatcatattacctttctccaatatggatgataccgcacgttgcaactccgcttccgaacattcattttcccgatgcaacaattcgtatagttcccacagcggtttatcagcatgaattacagcccaagagctgcgcaggcggtgtatccattcgcccaaagccatgcggtcgcctcttgctccggcattccttacgtcctgcacgtccttctcagtttcggttatcaggcggtcaagcattgccgccttgtcaccgtaagcaagaagggaggccagatcaggtatttcctctttgctggtgttggctgaaaggcatttttccgatgcctcaatcagttctgacagtgagaatggtttgaacaggcaggctgtaaaaccttgcgctgtcagttcctcagcttcgcaactgccggatgcagttgccacaatgacgggtatctcttttgagttgccgacgcttgatgaacgcatcagttccaatacctcaaagccgttcatctccggcatcttcaaatccacgattgctaaatcataatgccgtgtgcgcaacgcctccatcatatcaccgacattgctgaaggtgtcgcaatgcactccgacactggcatacatctcttttaccatgcccagcactatctcgttgtcatcaagtgcgacaaccgaatacgtcttttcaaggcgttgttctgaccgtaattccggcttttcggcaatggcatccgcaaccaacataggtattcgtactgtaaaacggctacctttccctttctcgctttcaacccgtattgttccgccaagcatatcaacaatccgtttcacgatacttaaacccagaccgaatccgtcttgtgtggctgcattggacaggcgttcaaatggatcgaatatccgttgttgctcttctttgttcatcccgctgccggtgtcttccacgcttaacacaaggtagccttctgtatggcaaagacggaatgatacgcttccggattgtgtaaacttgacagcattggacaacaggttgttgccgatatgaatgacacgttctttatcacctgccaaaataacgtccgaatcacattcgattgtcagtttaaggtctttcttctctgcttgtggaaggaattccgcattaagcatctcggacacgctttgcaggcgaaacggagatacttttggttgctccttcccgttttccagcctgaaaaattcaagcaacgagttcagcatggttgtcatatgccgggatgcctgtaacatattcactgaataacgaccggcacattctgcatcgttttcatgtataagctctgcgtagccgtttatcgctgtcaatggtgtgcgcagctcatgggtaatggtatgcacggctttcttacgggaagctatcagttcctcatttgcacggacagactgttgcaatcgccctatcagttcttccgtttccttttcataacggttgattcttctgttattgcggtgtattatgatgtaggatatgagcagcaataccaaggcaatggcggtcatgctcccgacaagcatatacgagttctcccgcatggtcattatctcggcctcacgattttgcaggtcttgatatacttttgtgtccatatgggagataagttcttgtaaccggtaattcaattctccgttgcgggcggcaaggctgtcggcgtgttccgacaggcggcggctttgtgtacgctgttgtgctattgcatcgcggtggagcgtatagagcatagtcgtggctgttgtctgcttcggcttttcttttttgccgaaaatgccaagaaatcccttgcgttttggcttgacaggctgctcctgcgcactcttttttgcaatgaccggaacctgtccggcaatcttcttgttaatggaatcttgcttttcaagaacttgcacgattttccgcatctgcacttctttatcttccagtagaaagcgcagactgtctatccgttcagacgggtaggtcttcttaaaaccgcacaatatgctgtccatcaccatacgttgggagtggtagttctccaaatcattggcatcccattccaatatggtttccccaagcagagaaaactctatcatttgaatattgatattgtttatttcttttcggagctcgtctatttttttattgccaagttctaatgcttctatctcctgccattcatagaggctattatatgccatacatccgataagaatggagataagtatatatcccaaccgtattgccttatagaaatttcctgaccgctccattattttaatgacattgatttttggaacatgaataaaagtttatctttttcgttcatgcggatattatcagaataaccgtcttttgttatttgatacccacatggcttaaccataaaaatgcctaagcccttagtgtacgaacttacttctgaggcatagtctttacttgtatttaatggaactttccctttaatatgacaccactcattattacaactgatgtcttcaatctcagacatcagtttttgcaaatctgtaatagctttggaactcgctacttggggtatctgcaactcaaaacagagcatcggttcgagaatgtccacacctgactgttgcaaagccagcctgaagacataaggggtcagctgtctgaaatcagcaggtgtacttaccgggctataatactcggcttgagtaaaagttactttcagatctgtcacttcccatccatgtaaaccagattggcaagacatacgaatcccttcaaaaacggcattttgaaaagaatggttcagataaccataggagatgtcactttcgatttgcaaccctgcccctaacggtaagggttcaagagtcagccctattgtggcccagtaagggttgggtggtacttcgatctgaataatcttattgaccttttttataggtcgttctttgtagatagtcttgatctcatcaaaatggacctttacggaaaatcgttcttccagcaatgtctgtatgatttccttttgggtcaaaccatataacgagatttccaattcatcactatatgagtttatggaaaaggacaaagacgggtcttcaatccacaatgtattcagagcggatatcaccttgcttctctcttcgggcttatttggccggacggaggatttgagagcgggatgctgatgagataatccttgaatcaaacaaggtttagcacctaaataatctccgattcgaaaatcttctatatcttctacaatcgcgatatcattggcacccacttcatcaacatttatctctctgccctgataaatagtctttagatttttaatcttgatgaatttttccgaatcgttgattcttacaacgtctcgaagtctcagacttccgtcaattattttaagaaaacttcttttatgccctttggggtcatgctctatcttatagagataagctgaaagtctgtttgagactgatgccggaggaagtataaaagaagaaatggcgtccaacaactcattgataccgatattgaacattgctgatccatgtagcaccggatagactttggcttttgccacaagagcgattatcgtattccaataatcagccggtgaaatttcgctatccgccaaatatcgttctaatatatcgtcgtcatggttgcatacaaattctttgtattcttcctttatatatgtttgggagcaaaccggataaaccgatccatcgacaacagtttgcataaacaggacatcttgcgacagatttgtttttatatccatatacaaacgctccaaattcacaccggcacggtcaatcttattgataaatataattgtcgggatttgcagcttttgtaaagtactgaacagcaactttgtctgcgcttgtatgccttcctttgcggataagatgaggactgctccatcaagcattttgaatgtccgctccacttccgcaataaaatccatgtgtcccggagtgtcaatgatattgcatttcactccattccagataatagatgtcgtagaagcccggacagtaattcctctacgtttctctatatccatagagtccgttatggtgtcaccattatccacacggccgcacttttccgttgctccactggcaaacagcagattctcggttacggaagtttttcctgcatcaatgtgagcaagaattcctaaatttataatattcatttggattaagcaataatatactacagtagatgcattgtcgaaacgcaccttttaatacctcctcgtagcatatgagaactacaggattactaactcgtattaatatgtatattattactgccgcataacgattacaaaattacacaaaaaaatatatctaacaaaagtgggaggattttttaactttttaccatagacattttattagggaagcgtaggttcaactggcaagtacaaataagtagaaatgtttgaacaacaccgttttaggaagttgaaaaatcaagtttctctctcggtatagcgtttattttggccaatatcttctttagtttagcatttgtgtatttcccattcgtgttctatttagctccttattatgagtatgtagcaagttacttatcaaattcagcctctttgagggtcaaatatggttttgcaaatggtgactgacaagacataaacaaggtcagcaggaattttttacataaatggacatgaatgtatataacctaaaataagaataaattttaataagggctgcccaaaaagaaaaaaatgcagttgccatcctatagatacttgcagaaaggataaaatttacttttagaccttttgggatagcccttattaatacttcagataaaattccttaggttatattttcaatcctttggaccgggtttcctccttggcatacagtcccggacgcccgattatgacatggttggcaacgatactatccgccggactgcgtatctgcggcggtgcattttcgggatattgcgcctgcctgttcctcacatcttccgcttccggcttgagctgttgcccttcattctccttttctgcgacttcgggcgtgggtggcgcaagctccagctgaatttttcggtcaagggcggcaagttcggacttcaactgcttcagctcgtcctccttcttccacaccttacccgctatctcctgtaactgcggtatctccatctccagcacctcgttcttcgccttgtactggtcgatgatggagggtatcctctccatcgcgttgaggaagttgcgggcggcggccaacgggtcagccatcgccagatgcccgttgttgtaggtgtacttgtagttcccctcgaccacgaagcggttgtcggtgaactccaatccctctttgagtatcctttcgctcaccacctttatcggaaaaccgtaaagttcaccgacctgcgtgtacaaccctccggtcgtggcattcttggctatctcctgcaaacgctttccgatgaccttctcatcggcggaatccactccgtccacctttattatattaaaaacaaacgtcttttacacaaatttatgcttatttcaataaaatcagctacttttgttgcgcagccgcatacacaaacgggaaaccgtttggaaaacaggtcaaatttgatagcaattcgcttgtctaaatattgtctcttggaggtctttccgagccgaaaagttgtcgatgaatcaaaatgcaaatagttaaagaaacaaaatggagaaaaccgttacaattattatgacaattgattatcaaccatttacaaatatcatttctaaatataatgttaaagaataatggcaaagttcagagtagtcattcttcctgccaagaagctaattgacggaaagcataaaatacgcattgccgtgtcacataatggtggcacaaggtatattccaactcagtacatcgtggatagtgagaagaacctgaaagatggtcaggtcgttggaatgggcaatgctggatatgtcaacaaccaactgcgcaggctgctaatacactatcaggaagcctatgacaaaatagacgacccggatctctatagctgtgcgcagctcataaaagttctaaaagtaagaaatagcaataagcacaagacgcttgatgaagtttacacggaatatacgacaagacatgacctggaagggaaattgaagaccaaagccacctaccgggctgcgaaagaacgctacgaaacttttgctaagacagatgaggttctgcttgaaatcatacagcccatggatattatgaagttttctaattatctatataaggacgggttgagcgatgctacggtaaagctctatatgtctctgataaaagtattgattgatttcgcgaagcgaatgaaatatgtcagttacgaggttgacccgtttgaattctacaagatgcctacatacgaaccgcgcgacctcgctattagcatagacgatgtgagaagccttatcagatttaaccatgcagactttaagctgatggtaataagggatgtatggttgctatctttctatcttggagggatgaatctcattgacattctgaaaatcaacttcaacaatacaaattttgtaaaatttgagagatcaaagtcagcgaacagaaagaaagattataaatacacagtattcgatatacagcctgaaactaaggctattatagagaaatataaaaagaaaaatggaaagcttgggtttgggaaatatgcaacaaaaaaccaaatattcgatctcttcagtaatcataaggatgaagttgctaagttgtgtggtatcacaagaagatttatttttcttagtgcccggaaaacttttttccagataggatttgagattggcgagaatccggatatcctcgactattgctctgggcatgccgtaagcaagcgtatggccatgaattatattgtcatcagaccagagatggcatctgcgtgtatgagaagaatttttgacaaggttgccgaagataaaaaggagccgtcggaataatactggcgactcctcaggagagtgtgaaacgcctaaataagcgcatagatgttgtctacctcctttttgatcatcctctcttctcctatgggagaacctacgctgaactctgcatctttcaggagggctctgaggataatctttggcaggacatagttatcatctgcgctatcaatatcgattgcgccggaatccaaaactttcttgactttaagtttcatcgtcgcagatgtgtagtctatgagttccagcactcttgattcgagatcttctctatccatactaattgatttattaagttatacgatgtgtctatattttcaattcttccagtttttcgattatccttttgatacagtcaccattttccagagcaatccactccttggcgacattccatgaaatgctcttggctggatggaaattgtctgcctttatactatggtgtgataatcgaccttcagtcggcttgagtcctttttcatgaagctcacaaagtccgtcgtggaaaaatgtgcaccattcctctccggctttggcttgaaccatgtaaatgggtttcttgcagattcccataattattccagcagcccatatcgtgggtgcaagtcttgctgcatacccagcatcaataaggcgctctatatcctgcggcgttccgagacacggagtatgacattgctccctgcatttccgacacttgcagtatgtcaccttacgtcctgttttttccatgactctatagaaagaaacaggaacaatttttttaccatctcctatcatatagccggattatagttttccaacacgtacctgacaagtttctctctgttaacagaatcgagattactataaaagaggttggagtcacatctacacttttcccattttttcatgatatggtcgcacaacccacagtctccccatatagcttttatccacacctcaggcgagctgtagttatagcaccagtatatccatttgttcactgcttcaatggattctgcgaacactctgtgtcttttaggcatcttcccgtcaataatgccagcaatatccgttatccattgcttccacccttcatagtccactacgctttgccggaccgtgaaattcctgcaataagaactggaggggtcctgccgcatgatacagatttcttcatcaacatcaaatccttcggcgtagtccttgaagttctgtttccagtcatcaagatcgatggtgataatcatatctactccgcctttagtatagtcctccagttcaatggcgctgtctttctcaacataaccgattttgcatgtccctaagaaacttatgccaaaaacctcgaagaaatcctcgtaattgttctttttcagagcttctcttgctttctgaaacatttcctttgtaatctcttccatattatgtacaattaaaaatgatagtccaatattccgcctatgtagaatttatcgccacgcgagaatcgtgcaatacaatcgaagagaaaatccgtacttttgactggatagcacccattgtaatctttgtcgacaaacaaggcgcttgttcccaatacattttccagaattttctcaattcgatacagatatagtgtggtcccctgccttccctctgccagatcttccggctgtacatgttcaatctgcttgtggagtttgacttgccaatcctgaatgaattgcttatcccctccaagaaaagtaatttcccttttgttacatgagaacattgtcgcaggaagttcttttggcagactgtttattgcagacaccatttctcttgcgctcacctctgagcaatagtcaaacaagtccccttcttctaactccgaagactctatataatcgtcttttgcgactggaacatctgatatttggtaaataaatccgtgcataattgtatttgtttataaattttataatctcatggtctttcttgtttagtataattacatgaagtaccgattgtaaccaaagatttaggcatgtctattgcgatagccttcgctttttcatcgaaacttattgcgaggcttccgttatgccgtgcaaccgcaaaatctttcaatgtaatcttggggcactctccttcgtgcaattccgtgtcctcacataaaatatccacataatccatcgcttcaacctcacatgctccagtcacactaacacgggagagattccttgctatcacttttgttttccctctggcagaaaggatactgtaatctgcacattcaaccatacattctccatcagcaatacctctggaggtatctttcagggttacatgggcagttcctgctgcaatacatgtagagttcccccaacagtaagcgttcgcattgtcgtatgcgtacaccattactcccgacatgaaagctcttgcgttcccacatagaattacatggtttttcggaggtctcgttatatctacatgtccgcaggtatatatatgctgcctgttcaattcttcttcgctatacatttctttcagcaagtccaggcctattacttctggatatagcaagtaaaaattctggtgaatagtcatgagaagctgggctcggcccttgcaatctttgatgggttcagtatcaaacccagctacttttgcccgatcacaaatctcgtcgattataattctaaatttcctcatatcaaacagcttttgttcattttctttttcagcttttcaaaattcacttttgcagagttcggtgtaatattggcatagcagtatttacacccatgcgcacaggtgtcgtaaacaccaatgtcccttgctttcgtacaaagacaggaacctctctgcccgggatcttttcctgctacagcggttctctcagaaaagcctttgtctcttgagagcttggagataagctccgcatcgatacaggcgttgtgccctattccataagcgctcagatcaacatcttccgagcatgtcgcaattttcaaatgggagagacctttgttatctatcagcaaacgcagtttttctgcgaactgtttctgttccggaatagatagttctgtcgcaccagtcccccttaaattcactatgaccttacgatatctgtctatatcggcaaagctgataacgagcttattggtcaagccctctattgcatctaagatacttgcaattttaatcaagtgaacatcaactccaagattttggctgacatagaatatggggtcatatctccagattaccctatctgccccatatttatctgatatttccttaaatgtctgtatcctttcttcaagaggtggtaggttaggttcaaacatcataggataggcgttcaatgtgaattgcaaataccagtctattccgagcccatcgagcatgtcgagatattttaccatgggcttcgggttcttagaccagaacacgatgaactttgtatttctgaaagatatatgttgcagattctgattgaatggatttactgtatcaacatagccatttctcccttttgacagtcggttaaaaaaccaatcagaataaaaagcaggaatatccgtcctcctgctgacgctcagtatctccggcgatgcggcttccgcaatgctaccgttatcaagccgtacctttgtttggtcaaatgatcccatacttgtattaagtaacatggagagggcagcatgccccctccgtggttttacctacttgcttttaggtgtgtctttcttattttccacaggctctttctgtccttttccctctgctttagcgggctttgtattctccatatgcttttcccctgctttcggagcttccttgcccttgctgggagttgctttcttgaagttggcaatcttctctttaatggaagccttcatattcttgtacttctcatcgagtttcttatcaacctcagagaggattgagccgtagcgttcctgcattattccctcaagcatgccctgcaggtccttggaaaagtttacagacttgtcggataaggccacgcgaatgaactccctcttgatggagttcctgttcttatccattacctctttgttctctttccaagactcctttccaatagtccattcgagaccgagcttctgcttgaactcatacggtagatgcttgaaaagaagtgcaattagaatatcattctccactacggacatagccatattgagactgctatattcagaccgggacatttcttggcgcaacccctctactttttcatcttcttttttctcatcgagggacaggagtttctctttgtacttcatgattagctcctgctgcttctgtttctctatatcaccgttgccctctccttccttgaggttgtaagcatacttgcgttcgccagacatgtgtccggaatatcctatctcatagacagggactatgttcccttctttcagaccgatgtcgaacaaggctttttggtgtttccacgtattgtgcctcttctgatagaattcctgttctgtgaaatcctcttttcgcggttccgctggagataccacatactttctgatacccattggggaaacaggcactccgaattcgccggctttcttgataagcgcatcattctcagacgaggttccttgatagacgatttccacacccacaggctgcattttcgcttcacgaaatattctctgggtagtcttgtcgatgaaacatttcctgttcatacatcttggatccaagactccgccctcgctgttcgggctgttctttgtgttcaacgggcagttctcacaggcggtgtgtccctcgaacgtttcgtcaacaagcgagaatgttgccttgctgagctgcatcaggacattcgtctctatcatttccttcagttgggggatgttggggaacttgtacttccacctggcaatactctctggggtaaaacaacactcgtagagagtcttctgttgctctgctggcagtttgcatatttcaagcaaatgagtgagcacaagtggaccgttgtgcataaggtcgacaaattcctgaattgttccattgagtcgaagtcttgaacgcacgaaagtctcgctcttgcctatcatcttggcaacttgaggaatgtccgttgcaaacgaattcaccagcttatctattgctgcggcttcctccatcgggtctacatccttacgctgaagattctccagaaccattgccgcaaatgcggatttgtcatcaagttccttaacaatacagtctatttcttctgcgccggtgagctgtgtggctctgtatctgcgctcaccgcatacaatctcaaactttgcaaaacttgattctaaagggcgtaccgtaatcggctggagaagtccgttttcctttatggattctgcgagttcgttaagctcttccggattaaacacttttcgtggattatccttgcttggcacaatctccttgataggaattctccttacttgccctgtaatctgtgattttacagtatctttactcttgttcatttcattctatttttattgttgattactactttacccagtctaagtctcctttgctgtcaggcttcctccagctattgaaagcatagtcattgagaagattctcgtacgacataactatactctccccctcttgggtttccttgtctatgacgttctcatcgtgcaacgacggcataataatggccgtgataagcttgctttccacgacagaagctctgtcgttggaggatttgtagattttggcattactcaactcgccagatgcggagaacacagcaagtaattttaccaaagaacgaatcatgaatgtcttgtgcatgatggagactcgatcatcagacgttgcctcgggcttccttgaatgatatacgcaggctgcatataactccttgaggtcaatcctgtgtggatattcctcacgctcctttggcacaacagagtctacattgggatatttcccatcaatagtttctccgttctgcgcaacgattttaccagcgagctctttgctcccttgcttgtagatgaccagcaaatgcccgtcacttccgtaacaacgcccttcctcgaagtacattccgttcatgacgggacgcagttcatcctttgctactatgttcgcatagatagccttcagaatctttttgtccatttacttttattttaagattaatacaattagataacggctccgttacagagccgttatcattattccacgcttaaagtaatttgtgagccaagtggtcaaaaggctgtagtcagcctcttcagccgtaacgattgctttcgtctttgcaatccgtgtgaaacgggctgtaggaaagctctcgacaacgttcttcaggctttcccggcctacttccgcatcggcttcgatgtctccgtccaccagtgaaatatcctttgacagaatcagctgtcctgtcttgtacgttggggatgaatacttcggtagagctatcgtttcctccgcattggcaagctcttgcggaacttgcttttgctcttcactcgttacttccggctgctcaacagttgcttgctgtacttcttcagcctttacttcgctttttgtttgcttgttctttttcatttccttttctgttttgattggtttgctaatcttatttgcatatacaaagataatcaaatataatcatatctgcaaatatttacaggtattattttaatcatatctgttaataaatcataatcaaataagcggacacgaaacgagaaacctacataaaaagctgattacattttgtaaccaactctatatacttcgctgttatcgttgttattaccttcatggttctgtcactgcttcttgttgcaagctgcacatgcttctctatagattttctttaaagctttctcgtcctcgcatcggttcttttccagaattgaaatgaatgtgtctctaccaagttttttgtagaaattgataaaatcgttccgcaagaggtctgcaggttctcctggcattatagccttgtcctttccagctttctccgcttcaaaagaacactctaataaggtatgtcctcttttatcaacaatagaatactctataccttttatatttacgccaccatggtggcgggcgatggaaagtagactactcatccacgcttcctcagtcattaaaattgtcatatctttattccttttctaattctaatattacctcggacttgtatatcattccgagattctcccgttcgccacacataaacttttcaagttcttcctgctgccggtttatagattcccatgtagcctatttggattcttgtgggttaagagataaagtcatggttgcaataaaaccttggcaaagtccgtatagcctattgtagaaatccgtagtgttacagcctttgcctaacccataaacactcccttgtgagccatcaggcagctctccaaccagtttccaccctccgtccgctcggtcatatacgctacgcagatcatttctccctgtaacatctcgaactatatccgtttgcttttctaccattgcagttgttgctctcataatattataacccgttggcggaattaaaataatagataaatttatatgaaagaaaagttgtacatacaagaatttatttgtaacttagtgttgctcaatacattaagttataaaatcagtatgcacaacttatatacaaatttcgtaaaaatccttgatatatgcaagctattctcaaaagatttagtaaatgagcaaggtaatattccacrcc

SEQ ID NO: 104 - DNA, 39270 bp, Prevotella timonensis
  source 1..39270: mol_type = genomic DNA
gtgccggccttgcggtctgctttttccataaagttacgctcatccaaccagaagtctatctgggaaatgttctcttggatatctatcacatcaaaataatctgcgagtatctctggaaagatacaacgcaacaattgctcggtcttcatgatgcaaagataacaaatacttatgaaattatgtgcatgaagagaggagggatgcaactgggttttacgactgacccaagatatcacaactttcgagagtacaagacaaaaaaattccctgcaatctcgaaagattacaaggaaacaccccttgtgggcgttgacggattcgaaccgccgaccctctgcttgtaaggcagatgctctaaaccagctgagctaaacgcccttactatttgtaagcggatgcaaaggtatgccatttttacataactaccaaacttttggagagattttttgttgtacaccctatttttctgtacctttgtagcacaataacataaaatataaaagagaatgaaagaaaaagtagttagcggaatacgtcctacaggatttttgcacttaggtaattatttcggcgcagtaaaaagtttcatagagatgcaaaacagttatgactgtatgttctttattgcagactggcactcattaaccactcgcccaaagcctgaggatatacagaaaagtgcacgcgtaattctcgctgaatacttagcttgtggtatcgaccctgacaaagcacctatctatatacagagtgacgtaaaagaaactttggagttgtacttataccttaacatgaacacctatattggcgaactgggacgtgtgacaacttttaaggagaaagccagaaagcaacccgacaacgtgaatgctggtttgtttacttaccccactctgatggcagcagacattctacagcatcgcgcaaaaaaagtgcccgtgggcaaagatcaagaacaaaacatggaaatggctcgaaaatgtgctgcacgtttcaaccgcatttatggtgttgagttcttcccagagccagagaatttctattttaacgcacaggcgttaaaagtaccgggactggacggaagtggaaaaatgggaaaaagcgagggcaattgtatctacttgcatgatgatgacaagacgataaccaagaaggtgatgaaagccgttaccgacaatggaccacagtctgccaacagcgaaaagccagaagtgatagagaatttgtttacattcttgaaaattgcttccacacaagacacctatgattattttaacgagaagtggaacgactgttccatacgttatggcgacttaaaaaagcaaattgcgacagacctctgtgctgtagtagcgcctatccgtgaaaaaattcaggaatatatggggaatgcagaactgctcgataaaattgcaagagaaggagctgacagagccagagagagtgcaagtgcaaccttacaagaagtgagaagtattatcggtttcagaaaataagaaatagcacacaagcgttagcaacagcttcgctgcaacaataaacctataacgcgagaggggggattcatggttggcatgagtccctatttttgtttgacagtatcagtgaactgccaaaataatcaacagcaaatgctacgaacactggatgcccaaatgacatcaacattgtaccactcgaaggctctcaatacgtgcaaaacacaacgcatgcgtaggcattgagatgactgccaaatcgagagttagaagtaagaaagtatcctgtttgtaaaaaacaaactataaagaccattattatacgaaggtcacgctaccaccttacgattagtctctatattaaataagggtgtgcctttacagcacacccttatttattgtttgattaaaaaaatctttgttaattacgcttattcggtaatcttcacagtagcacgacggttgaacgagattggagaaagctcatcaacaccaccattaccctttgtagagatgttgtcacggcttacacccatcttaacgagttcgttagcaacggtcttagcacgctcttcagacaaccactggttgtgtgctggcttacctgttgcgctatcagcataaccattaacttccaacttgcagttgttctccttagcatacttagcaacagcctgtacgtttacgagatccttctgagaagcgatgtttgtcttgttgatgttgaagaatacagatactggagtagtaacaaattctttcacagcaggagtttctactggcttttggttagccaacatttccttcaaacgagcattttcagcattagcgtcattgagctgtgcattcaaagcatcaatttgtgactgagacaaagccttgatagcgtcaacatcaggagtcttatcccaagatgccttacccaagttgaatgtcaagccaagttctgcataaagattgttatcgtgtgaatcccaaccacgtgtagcaatagtagtttcattaccaccatcgatatcagtttccaaacgattccaaccagcctctaaatgaagagagacatgctgacccaaacggaaagtattcaagatacctgcgcttaagtccatagcatacaagtcgtgtgtcattgtgcgaccaaagcctgcacctgcaaatgggatgaagttccaaacacgatttggattataaccacaaagcatattgctcaagttgaacaatgcatgctcgttcaaaacccaatatttgttgtcgtctccaacaggtttacctgccttgtcagcatacacggtcttaccccatacaccttgaatctttgtacgaagaccaagtcctggtgtaaaccatttacctactgcaagagcaacacctggttttgcacggaaatcttttaatggacttctatccaaaccatatccgtgctcttcacttgaataccaagcattccaatttccaccaacctgaataaaccaattgctccagaatgaattggttgctacactgtacttcagtacaggatctgcgtcttgtgccattgaacacattgagacaccggcaaatgccaatacaatcaataattttctcataacctttatttattaaacaattaaaatttgactttatactattggcaccaagtgccttgtcgggaacaaagataataataaaaattaaatgttatcactttttcctcataaattagtaattttaatgaaaaaaatcaacgaatttagcgtttatcgttgtatttttaacgttacgagtctaataatagctctattttctcctgtttgaggatgtgtaaaatagatttaccatcgggtgtataatttacattttgacaaccaaacaagctattgatgagattttccatttcctcattattcaacacttgtcccgttggaatagctgcgtgtttagctaaactcaacgccaatgcttgatgaatttcatggacagcattagaatctttttctaaagcagaggaaagcatgtcgtgaacgagttgcaccatgttcaatccttcaattccagcaggaacagactgaatggcataatcactatttcccattgaggtgaattcaaaacccatggcggtaaaatcgggcatcatctttgggaagatgatttgctctgctgggcttagctggattaactctgggaacagtactttctgggcgtactcttttccctctttcatctgttgcaagtatcgttcgtataaaatcctgacatgcgctcgatgctggtcaataatcattaagccagatttgacagcggtcattaaatattgccccttatactgataatgtacgggagatttatcttctatcaaaggattttgaacgttttgctgtaacccatctgaattgaacaaagcaatattttcaggagtttgttcaagtccttcatacagtttctcccaatctgacgacgcatgaggagatggcatcggagtctgttggaaaggattgtaatttggatttgtctgaacgtgaggggcaacagtggcatcacgttgaccactataaacaggtatgtcgggctgtccttcattattaaattcgatcgaaggtacttctttgaacaaaccgacagcctctcttactgcagcaaaaacaatttgaaaaatagcttgttcattctcaaatttgatttctgttttggtaggatgaatgttgacatctatctcttgagggttgagttcaaaatagataaaataagaaacttgatcgccttgaggtatcaaacgctcaaaggcattaagaaccgctttatgaaaataggggtgtcgcatataccgcccattcacaaagaaatactgctgtactcctttcttcttggaagattctggcttccctacaaaaccagaaattttacacatggtagtgtcaaccgaaacaggtagcaaatcttggttgatacgcttaccaaaaatatcaacaattcgttgtcttaaaacgcagggacgtaaattcagcagctcggtaccattactgtgtaaggtgaaagctatctgcggatacactaaagcgatacgctggaaagcagtaacgatgtgcttgagttctgtcgtatttgactttagaaagcgacgacgtgctggaacattataaaataaattttgaactaagaagttgctacctgtgggacaagcacacggttcctgtcctttgactttagagccagcaatcgtcaaagaagttcccaagtcgtcatcttcacgacgtgtctttaactcaatttgagcgacagcagcaatagaggctaaggcttcaccacgaaatcccatcgtctggagagcaaacaaatcctcggcttgacgaatcttggaagtagcatggcgttcaaacgccaaacgtgcatctgtgccagacatccctttcccattatcaatcacttgaatagaggtgcgaccagcttcaacgaccagtacatcaatagctgaagcaccagcatccaccgcattctctacaagttccttgatgacacttgcaggacgttgtatcacttcacctgctgctatttgattagcaacgacatcgggtaaaagttgtatgatatctttcattcgtgtaattgaaattagaagttagcaggggttaccaaaactgttgtcacgaacaacagcaaggctataagtatcaccaaacagaacaaacccaccaaaaggaatgtgaaatgtgaggattgtttttgtctcgatgacttccgaaacaagccttttatcgaagagggagaactatacgatgagttaagctcactcttcttatctgccgtcatggcacgctgttggatttcttttagccgttcttttctttcatccacatacaggtagtgatgctgaaagcctcgaggctttggcgattgaaacatgctcatggcttttcccccttcacttgacgtaacttctgtaaaggtgcttccacgcgtggtctatatttgagttctgttccttggccctttcctttccaaacaaagacatcatctttgctcttcggacggatgtcatcgtgccatgcgaaaacaggcaatttgagttttgctgatggaatttgcgacatcggatacgtggtgccaaccgctttgggtgtccatatcctttctaattgtcgttgacctgcaaaatacattttcatggtatctgtctccaaataattcatcatcaccaaagaactatctttgtcgtccatgggatagaaaatagacatcacattactaattgccaatgcgcgcctaatctgaccgtctgtaaaatatgcgtgcatctccttagcagatagctgattataatgttcttccgcatctgctttctctactgataaagcttgaccaaacacatgcgcctccctgacggtgctgtcattcataaataactgaatgtactctcccaacaactgtctattattattccacacaatgggattttgatacatatttaagcacgagtcccttgtacaaaagaccaacgaatcgcacacggcttgcaagtcattccgatagacgctgactttgtgataagcatgcacttgacgatacatggagtctgtatcaagatgaaagctaaacaacttgagcgtatctccatgaagatataaagtatctttccgtgaaaaatctgtgactaatgctttgttcgtcgcatatccatagcctgtcttttcgttgtattcaagataattgccccgcaaagagtttttgtttttacgatcaacaaaaatgacatcaccatatccattactctgtccagacttactatcataatataaggtgtcgcccgtaattgtcttgtctccatcaacaatcgttgatcgtccatagagttgcgccttatctgttttggtatgaaagattgcatcttttgtctcagtgacactcgacttcgtggttatcttcgagggtcccaacacatgggctatcgatttttgcgtgtcatagtgaagcgtgtctgtggtcaccaacctgttctcacttctcaattttacgtgatagtagaacacagcctgacgagtttcagtgttatactctccccaatctgccaccaaacggtctttcccgtctatcaaggttccgccttcatagaaataggcagtctgataaagtcggtcgtaatccaaactgtctgtcagcaaagtctgtcgccgatgttttaacactacgttttttctggcacgcatcatctgttcttgtccatcgtaatcagctcgttctgctgttaacgacaaagtatcgccttggacaaatcgaacatgaccaaaagctttcatagaattgtcagcctcataaaagtatgcactgtcacaagttaatcgcgctccctgatggcgaaaggaaactttaccttttaagatttgtgcttctggatttggtccatacatatcgtaactcaattcgtccgcatgcaagagttcgacgcgattggatttcttcgctttctttttttgatgacgctgtgctggtagcgattgtaccatacaaagtccaaacaggcatagagtcatgatgaacgtgaatctatgcccgcttttcaaaaatgatataatcatttgatgtgtcattttacccaaccctcatattcatactcaccatttttatagcggtctttcatacgaacataggtttgcttgattttattgaccacccagttgtgtatgaacttctgtctctccttagcgagtacaatattcttcatcacctgataatcttctgttatcgttgctcggtgaccttcaacgcgattgcgcaaccttacaatggcacaaaccgttttgccgcgtttatcaatcatcctaaaagctggtgagacatctcctactttcatcccctcgatttgtcttgccacttctgttggcaaatccttcatctgaaagcgtgaacttaaattcccagtttgcatatctacaaaggacatcagtcccctattgttacgcgtatccttatcatcggaaatataggtggcagcctcaccaaaggacaaagacggggcatgctggtcggaagacagcctaaacgtgtcggcacgcaactccgtagcaacagagtcaagacgcaccaaaaccttctggacttcctcgtctgatacccttggctttaacaagatatggcgtacctttattttatcgccacgcttgtctatcaactgaatgatatgatagccaaactctgtctccacaatcttagaaatcttctttggatccgtcaaattaaaagctacatttgcgaagtcaggatctaacattcctcgtcccatataatccatctcgccaccttgtcgtgcagagcctgggtcctcagaatataagcgagccaacgtagcaaaagaggtttctcccgaagtgacacgattggtaaaattacgcaattcatttttcacacggttaatctcctctggcagaatctttggctttctggtaataatctctacttctacttcagtaggaacaaatggaatactgtcagctggcaggtccttaaagtacgcacgaacatctgaaggtgttacttttacatcctgtaccagtttttcctgcatattctgtactaacaagttatttcggaaatcatcacgtaattgtgaacgcatttgcgaaatagtctgtcctcgataagcttccaagcgttctgccgaaccaccagccatttctatccagcgattaatctgtctttcgatgcttgcagttacttgtgcctcaggaatctccacagaatcgagttcagcttgatgcaagaaaagcttttgcactgcaatatgctctggaatcgagtaatctggattccctttgaacttgataccctctgcctccgattgtaaacgtgtcatctctacatctgacttcatgatcggttcatctccgaccacccatatcacttcatcaatcacactgttttcgggcatttgcgaagtattcgcctttatagaatccgtctggggcttcgctgattggcggttgcgaggacgggcactcatactcacaactatcaacagtgcgataagtccacaaactattttaatttctttcttcattcttcctttacgtatagataatcaaaaccattaaccatattatgggtgcttattcaccgttgcaagtatgtcacgacgaacagatataggatatttcctacgcaatcgttgaacccattgtttctctaattcttcttggtaatctgctacaacctgcgcctccacatcttgatagctttggggctttttcagctttttaccataagttgccgcatagggaaagtctgtaagcggcttaacttgaccttttttcttaaacacttgacaatccaccaatggatgatctccgctcttaaagatatttttatctacagagacgcgaatggtactgtcttggttgaaagtttgctgtatcaccttcgtccactcctcaaatggaacatgtcttacggctttcctcaccgcttttatatctttcttattttttgtataataagcaatgcctttgaatctcggttgttcccacttgtatttctttctattttgacgaaagtactcattcaatgcctgtgcattgttttgtgcttttgaaaaaatttcgcgtgtcatcacttcaaatagcaacaaaccatcatgatattcttttatgagatacttgagttgtggattcttagctaccagctctttacgcttttgagcaagaatatcatcctccgtcacaccagaacctgcatgctcaattgctgtctgtatcttctttgaaatgagttggtcacggatgccacgctgttcaataaactgaagtatctctgtcttcagagaatcgtaaggaaaaaacgaacgtttgtccttcaataaaataatatggtaacctgcgggcgtttgtattggcttacttaactctccttttttcattgaaaagatggctttatcaaattcttccaaagtttgtcctcgttctaaccaaggtaattctccaccgcgagatgcagaagcacggtcatcagatattcgtttggccaattcgccaaagtttgcccctttacataaggcacgatataccgaatcggcacgttgttcagcaatacgcctatcagcttctcctgccgtttgcttgagaacaataaggatatgtgagaccttcaccaatccccctgaagcgttgacacgattggctgtttgttgataaatctcgtgcgctttctgctccacatcagcatccgtaatcattgtcggtttgatttgtgcgtcacgatacatcgcaaactcctttttgaagctgctaagcgtgtctaatcttgcttcttcggctgcaataacctttagctgataattgataaataagtcgacatattcgcccacactttttttatcaataactccttctgcattgttcttgttatacgaatactcgaactcagagcgatggatattctttccattgatagtcatcaatatggggtcatcttgctgagccaacacaaggctacagcaagcaagcatcaccgctaaaaggatatttttcattttcatcattcgttcgagctaagtagggaaaacacactcacacgggagtaatctttcttataattcgtgaggactatagttaggagcctcactggtaatcgtaatatcatgcggatgactttctaacacaccagcattcgtaatgcggacaaacttggcatcatgaaggtcttggattgttttagcaccgcagtatcccattcctgaccgaagtcctcccatcagttgatacacaatctcttgtaccgttcctttatatggaacacgtcctgcaatgccttctggtaccaatttctttgcatcagtcgtatcgctctggaaataacggtctcttgaaccattcttttgttccattgcctctaagctacccattcctcgatagctcttgaacttacgtccattaaaaataatggtttcaccaggactctcttctgttcctgcaaccaatgaaccaaccatgacagagctacctcctgctgccaatgctttgacaatgtcgccagaatagcgcaagcctccgtcagcaatcaatggcacccctgtgtcttttaaggcggcatagacatcgtaaacggcagacagttgtggcacacctactcccgctacgacacgtgttgtacaaatagaaccgggaccgataccaaccttcacggcatcagcgccattatccaccaacatttttgcagcctcgccagtggctacatttcctacaacgatatcaacatgagggaaagaggactttgcttctcgcaatttttcaacaactcccttggaatgaccatgagccgtatcaatcaccaccgcatctgctcctgcttgaaccaaggcatttaagcgctccatggtatcaattgtcacgccaacacctgctgcaactcgaagacgccccttctcatctttacaagccatcggtttgtctttcgctttcgtgatatctttataagtaatcagtcccactaacttattttgattgtctaccacagggagcttctctattttatgctcttgcaatatttgtgcagcatcacttaaattagtcttcacgtgcgtggttaccagattctcactggtcatcacttcatcaatcgtcttatccaaacgacgctcaaaacgcaaatcgcgattggtaacaattcctaccaaatgattatcgtcgtctacaacgggaatacctccaatatggtaatctcgcatcatgttcagtgcgtcttgcaccgtactcccacgtcgtatcgttacagggtcataaatcattccgttctctgcacgctttacaattgccacttggtgagcttgttcatcaatagacatattcttatgaatcacaccaataccaccttcacgtgcaattgcaatcgccatcgccgattcggtaacggtgtccatagcagctgttacgtaaggtacattcaaatcgatgtgacgtgagaacttggtttttaactcaacctctttgggtaaaacttcagaataagcagggattaacaggacgtcatcgaaagtgagaccgtccatcacaattttatctgcaacaaataatgacatattgggtaccttttataaaatttattgcgtgcaaatttaacaataaaaaatcatatcagtcgtcatttttccgtttttctcaagcatttaattgtatttaactcgtttgcccgacgaaccctatgattcgtcggagagataaatagaaaagtcacaactcgcgtacaagcgttctaattggctaactcagaaataaatttaatacgtacaagtcgcaactcgtcctcactgtactggtcgcccagctcttccatggcaactttcaaaccatctgtctcgctctccataaagtaatcgtagagatcgtccacatggtcttcgtccatgacatcttccaagaaataatcgatgttgagctttgtgccactatagacaattgcttccaattcgtctaacaattcatcaaagtctaagcccaaagcattcgcaatatcatctaacgccacctgacgatcgatactctgaatgattttcaccttgagcatactcttctttgctacggtgcggacacgcatctcttcggggcgttcaatctcattttcatcgcaatgggattttatcaattctacgaattttttaccatagcgttttgctttaccagctcctacaccttgaatttgctgtagctcctccaacgtcacgggatatacggtcgccatttgctccaatgatacatcttggaaaatgacatattgtggaatgttcattttcttggacatctctttccgcagactctttagcatcttgaagagtcgtgggtccaacacgccactccctccttcttggagttcgtcttcatcgtacgcactaaattcattgtccaaggctatcataaacgacacgggcttcttcatgaatttcttacccgcagccgttaccttcaagacgccataattctcaacttctttttctatatatcctgcaatgataccttgccgaattaccggattccagacttttgaatcttcatcttcacccgcaccaaattcttccagttcatcatgcttgtgcgaaacaatatcttctgtgggatttcctgtaataaaatcaacgagataatcttgtctgaagttttctttgagcaccaaaatagctttcaatgctatcagtaaagcttgtttcgcctctcgacgctctttgggatgcaggcaattatcacaactatgacaattctcttgtaaatattcctccccaaaatagtgcagcaacatcttacgacgacaaaccgaagactctgcataagctgctgtttcttgcagcaactgtctacctatatcctgctcggctacaggttttccctccataaacttctccagtttcttcaggtctttttgcgcatagaaggcaatgcaaattccctcgccgccatcacgtcctgcacgacccgtttcttggtagtagccttccaaacttttcggaatgtcataatgtatcacgaaacgcacatctggtttgtcaattcccattccaaaagcaatggttgccacaatcacatcaattcgctccatcaagaaatcgtcttgcgtctgtgagcgtgtgacactgtccaaacctgcatgataaggagctgccttgatattattcgctttcaagacttcagacaattcttctactttcttacgagacaagcagtagatgataccactctttccctcatgctgacggataaacatgataatctgtttatcaatatccgatgatttttgccgtatctcataatagaggttggggcgattaaaagagctcttaaactctcgtgcatccgcaattcccaagctgcgcttgatatctgtacgaactttatccgtagccgtagccgtcaaagcaatcacaggtgcatcgcctatcttgttgatagtgggacggatatttcgatactctggcctaaagtcatgcccccattcagaaatgcaatgcgcctcatcaatggcataaaaagatattttaaccgtcttgaagaactcgatgttttcttccttatttaaggactctggagctacgtataacaacttggttcgccctgcacgaacgtcatccataacttgctgtatggcagctttgttcaaagacgagtttaagaaatgtgctactccctcctcttcactaattccattgatgacatccacttgatttttcatcaaggcaatcagtggagacacaacaatggctgtaccctccatgagcaaggatggcaattgatagcataggctctttcctccacctgtgggcatcaatacaaacgcactattacctgctaaaaggtgattgatgatagcctcctgttcgcctttgaaagaatcaaagccaaagtagagttttaacttttctgtaagattaacttttttcgccatagtgtctcattagattcatgatagttattataacgtcaagaggtaggatttttcgtacagctcttacttcatcggtcatccctattgtaactcggacaaagagtccctttccccgagttcaacgaggttattcacccaacttattcaagttggctttattcaattgtttttgcgcatagtcgagtgttacctcaaaagacttagtgcgctttgatggtatttcaaacatggcatccatcatcatcgattccacaatagagcggagaccacgcgcacctaacttatattctaccgccttatcgacaataaaatcgagtgcttcgtttgcaaaagtaagttggattccatccatctcaaagagcttgatatactgctttacgattgagttcttgggttccactaaaatcttccgcaaggcttctttatccaatggattcagataggtcagcacgggtaagcgaccaataatctcaggaatcagtccaaaagatttcaaatcttgtggcaagatgtacttcatcaaatctcccttatcaatattgcgaacatgttgtaccgaattatatcccacgacatgcgtattcagtcgttgtgctatttttcgctcaatgccatcgaaagcaccaccgcagataaacagtatattcttggtgtctacatgaatatagtcctggtcaggatgcttgcgtcctccctttggcggcacattcaccatggtgccttcgagcagctttagaagtccttgctgcacaccttcaccactgacatcacgtgtgatagagggattatcgcttttgcgtgcaatcttgtcaatttcgtcaatgaacactattccgcgctccgcagcagccacatcatagttggctacctgcaacaggcgcgacaagatgctttccacatcctctccaacatagccagcttctgtaaacacggtggcatctacaatggtgaaaggcacatcgagtaggtgtgctatcgttttggcaagcagcgtcttacccgtacccgtagaacctaccatgatgatattactcttttctatctcaacgccatcttcattttttggttgttgcaaccgtttgtaatggttgtacaccgacaccgagagatagcgtttggcgtcatcctgccctatgatatagtcatccagatatttctttatctctttaggcttaggaacttttttcagctgaaaaggttcgtctgcagcatgcttttcttttgcctcgcccgaaagtccagccgactctacgatagaataagccgcttggacacaagcgtcacagataaatccactctgtcctgtaatcaataaatctacttggtcttcacttcttccacagaagctacatttctttttggtcgttgccatctgtctctttttacttcttccttaccaacaccgtgtcaatcataccatattcttttgcttgctcagcatccatccaataattacggtcggagtcacgatacaccttttcataaggcgtatgcgaatggttagcaatgatggtaaaaagttccttcttgaacttaatgatttccttcgcctcaatttcaatatccgaagcttgaccttgcacgccacctaaaggttggtgtatcatcaccctactatgtgtcaatgcactgcgcttgccttcttgtcctgctaccagcaacacagccgccatagatgctgccatacccgtacagatggtggctacatccgaggtaataaattgcatcgtatcataaatgcccaaccccgctgtgacactgccaccaggactgttgatataaatcgaaatatccttgcctccgtctacgctatccaaatagagcaactgtgcctgcaaggtattggcagtatagtcgtcaatctctgtacccaagaagataatgcgatccatcatcagacgagagaacacatccatctgtgtcacattcaattggcgctcttccaagatatatggattgaggtatcttgcctgactcttgatgacatcatcgagagtcatgccattcattcccaagtgttgggtggcgtattttctaaaatcgttcattttatttttaccttatttttattataatataaaagaggttatcgacacttctaaaaacctcgattatacaaagttaataaaaaaaagtcgataacctcttattacaagaagtttttttcgtgaaaaaaaacgttatttctcttcaaacattttattaaagtcatccagtgaaatttctttctcattcaatttcactgactttttcaaggcttgcgtcagcttcgagtcgatggcacggtctacgaaagcatctacactctcttgctttttcaacaaatcgttgacataattctcgatatactcatcgggaaagatacattattctcccgaaatatatgttttcaaagtcatgaaataccaacttgttgcctgctgcaaagttactttctcttgttcccaaagccactaagagagacgaaacaacaacaatccaaattaacgccacaagtatctatttagatttcggttgggagacatcccccgtcaagcagttgcttaaaggcagaaacacctgccaacttcttcaactccaagtatctgctcatgaccttttgagctgacaaccaaagatatgagatcaaaaatagggtaccagatccatttacacttacgcaagtgtacaatgggagaaatatcgaagatcgtacgcaagtataaaatcagtcatgtttcccaatacttgggcaagtagaattatttcactatcagttaaagttctgtttctcttacggttttttcttgccgtttgacgagtaggcgaaaagaagtacttgaataagttttcaaaccttacataaaatcttcaaaaacgtacgtgtcagttttcataaatcttacatcattttttcgagtatttttcgattttaaaataaattgagtatatttgcattatccagaaaaagcaatattttccgtaagcggaatcctccaacttcggaagaggaaacaaaggaggaaatggtattgaactaagcccaacaaacctttgcaattccttcttatagaacgttaaaatgaattttgacgcaaaacatatttaaaagcctgtggctcaattcatcggggaagcattttacgcttatcaacgtgacctacgagcagacagagtcaaaaccaaaaaaggcaaaacaaaaccaacgttcaaacctaatgagtgaaatagctaaaatggtgacgatggactttaatcaaatttttggaacgatggtttttatcggcggtcacttcgtaccaaatgttacatgaagattataaactctaataaaaaacaagaattatgaaacaattaattaaccccattggacaggaaatcaatactttaggtaaggtaattaacaacaaggaactcatgcttgtacacatgcatctgaaaagtggagaacaaataccttcacacgaccatataggacgggaagtattcttcaccatagtgaaaggaactgtggaggttactcttaacgatacggaggtacatcgtatcagcacaggcactgttctacatttccccggcgaagctcatataagcgtaaaagccatagaagagagtgattttttcgtttacctcatcaatagacaataatgctatggatatgaaaaaatatttgccgagtgtagaccttgagaaactcagcaaaatactcgagatcaaagaagcataccaacgaggagatatttcattagaagagggcagagcccgaataagaaagcaagttgggaaaatccgtccttatgaaatagcattggcagaacaggaactcaaaaccattgaagagaatgagtgtcaaaaggaggatattcaaaagatgattgagctgtttgatgaagtgatggacaccagtcgaccaaatcttcctcttgatcacccaattatgtgttactacagggagaacgatgaaatgcttcgccttatgctctccatagaagatcttgtacaatatccgatcatcaagaatcagtggatcgaattgtacgacaaaatagcggcttttcgcactcacctttcacgtaagcagaaccagctctattccatactcgaacagaaaggatttgatcgccccacgactacgatgtggctactcgatgactttgtgcgagacgaaatacgtgatgctaaaaaacttattgaagaagataaagaagaagaatttttggcaatgcagcctaccattgtggcagatgtgcgggatcttttacagaaagaagaatctgtactctacccaactgctttggcaatgattactcccgaagaattcgaacagatgcgttcgggagattacgaaattggctttgcatggattgatgtagaaggattccaaaatgcggataaaacagcaacccagccaataacagctcctgacggttttgtctcagaactatctgcgcttcttgctaaatatgagcttggaggaaacgatacagaccgagttttcgacgtcacgacaggcaaactttctctcgaacaaatcaacctcatatacaagcatcttcctgtagatatatcctatgtagacgaaaacgaacttgttcgtttttattcagataccaaccaccgcatcttcccacgcagcaagaatgttatcggacgtgatgtgaagaactgtcatccgcgcaccagcgtccaccttgttgaggaaattatagccaaattccgttcgggtgagcaggatagtgtagatttttggattaacaaaccaggtgtgttcatctatatatattatgtagccgtgcgtgatgcagaaggaagattcagaggtgtactcgaaatgatgcaagattgtagtcgcattcgtgagcttcaaggttcacgaacactgctgacctggtcgaatgacacacaagtagtaaaatcaaaggaggcgcaaaactgtactccaaatgatacgtctgttacaaaagaaggctcgacaatagaactctctgccgacactcgcttacaggatttgttaaaaatttacccacagctacggaaagatttgccaagtatgaactctgctttcaaaatgctcaattctcctcttgcacgcatcatcattcctaaagcaactattgccatgatgagcaaacgcagtggggtttctcttgatgacatactttctacattaaaagaactcatcgctaaatataagagggagaaataaattccttatctttgaataaccaaaaaacgagagactgcagactacaaactgcaccctctcgttttttttatttcatagccatctcaactcaatgtcagaggtaacgaggtgtttttattcagatttcattgatccttcctttgtctacttgaagctcacgaaacaaagcagaggtcaacaaatcattatctactgcatttcataacttatatttagatatataattgcttttcattgatttattcctatgggtaaatgtctattcaaaacacttttttattttttaaagtcaattccattattttcagatacaaatcgttacctcgtaaatcagtggcaataatcctgtgttctttatccaataggaaatttgttgggatggattccactttaaattgcttttctaatttataacggttcggttgatctttccaggttacatgtgtgaaggcaccgcttttgtcaaaatccaccgcatctttccaattcttatcgttttcgtctaaggtaatagagtagattgtaaaccactctttgtacttattgtaatctttcagcatatagttacgtatctcgcttcggcagggaccacaccaacttgcccagaaatcgatcagtacatagtcggtcttgatgtcgtagagtgaaatcatcttcccgtttctgtccggcagttgaatgtcagcaacaatgtcgcctattttatatttttcggctttgatggtatctaaatttacttgtgcgggtcttggtgcaggacgaagcggaatatgaactttctcacttaaaatcgtcaaccaacgcttttgattagctttactttcatcggtcattgggggatattttttgtatgaaggaaataattgaattttttcgtaatctggaaatttctgcttggctgcaatcaaaacactatcagcttgattctttggtaatagatagtaaatttgatacaactctagccaatagtttttgggatatttaattgtcttgagaagttcaaatgataatccaagcttcaaatagtgggtcatagcgttgatgctgtcatttaatcgattccgtttcatatcatcataggcaggattcaaactttcttcttttaatgactgtaatttatttcggacttcagtatatttaccattaatggaaaagagttcttgcatttgttttgaaccttcggtatatggattcaatgaagtgtttctatcaatatataccgttacatcatcaccattgcttaaatatataacaggctgtattggccctgatttagaaaaagccagccaacaatatgcatatggttctttacagtttgcgcgcattctgaactctcgttgcccctttgctaaaagaacggaatcttctatcgaaaatacatttccgactccttcaaataaatacacccactggtcttcagtgttgtaatcgttacttactattacccttatttttgcttcattttgtgcagaaaaactcagcaattggataaaactaaagaagataatcaataatgtttttttcatctttttttacttgaaagcgaagtgcatataatatgcacttcgacgttctgtttagtacgctcggcatgagcattatctaacgggtggaagtcccgagtaagccctaatagcgggaattacatagccaagagcaagggtgttcatcgtgagatgaaatctgaaggaagctggcggcaaacatagtaacttattagactattaaatgccaatagtttgaatctaaacaatagatttttagtgaaaaaatacgttatttctcttcaaacaatttattaaagtcgtccagtgaaatttctttctcattcaatttcaccgactttttcaaggcttgcgtcagcttcgagtcgatagcacggtctacgaaagcatctacactctcttgctttttcaacaaatcgttgacataattctcgatatactcatcgggaacattgctcataccgtattgtgcaaactgcgcacgagcggcagcacgagctacttctttgatatcttggtcttctaccttaatatcatgtgctttcaccaactgctctttaatcagatgccaagtgagctgcttgatgctctcttcgtaattcttttctacaaatgcctcatccttatcgggattgtttttacgcatgatgcgcttcaacagttcgtcaggatattccagttttccaaccttcttctcagcataagcacgagtatccaacaagaatttgtaatcgctttcgccctcgagttgtgctttcagtccctcggctatcttctcacggaattgcttttcatctttcacagcgtccttgccatacacgttgtcaaacaattcttggttaacagcatggttctgataacgactaatttcggtaatctgatagctaaagttgccttcatgctctttcacctgttctttatcaattttcaggaaagaagccagttctacatcactggcataagccttacgaggattgaaggtgatgatgtcacccaacttcgcaccatcgaatttctttttctcgtcctcttccttgatatagctgggcattaaaacggcagcctcaacagtgatgccaccctctttggtgtttccattctcgtccaattcacgcaaatcacccttcagcatatcattgccctcaaaggtttctaccttctcataggtacccatgcgagaggcaaacatttctacttgctggtcaatcaacttgtcgtctacctgaatgttatagtagtctatcttatttttgccattcaactctatcttaaagtcgggtgccacagcaatatcaaaagtgaaggtgtaaggtgcttctttctcgagatctaccgtttcttgcttgtcagatgccaaaggctcgcccagcattggaatattattttcccgaatgtactcatagagtttctgacccaccaatttgttgattgtatccatttttacggatggttcaaactgacgtttaatcatgcccataggaacttgtccgggacggaaaccgggtacatttgcttttttacgatagtctttcaatgtcttctcgacatcctctttgtaatcagcttcttcgacagtaacagttaataaaccgttaatcttgtcgggattttcaaatgaaatattcatctttaacgttttgatttatgattatttttgttgttttcaaatgaatggcaaaattacgcatttttaccctaatctcctaacttcgctataaattatttgtttttttaacgcaattacagcaaaataatcatctataaatcagacagttattaacccatggagataagcacgcaaactcattactttaaccgccttatcccattatattaagggacttaaagacatgcttcaagaaacccacttcttagtctttatatgattgcaccaaatgagactgccaataagcctatcgcaacagccgcaaatacgttacatctgcttttttgcgcacaaataacttttacgtgattttttcttgcttaaaagtttgtattatccaatgattattcgtaccttcgtagcaacagaatccgccacgcttcccatttgaacagcgaaccagggcgggtcttttgctttttatgagtacattaagattatacactaagcaggctctttctatttcagaacaaatagaactactaaaaagtagaggcttaaatattgatgattcatccaaggctgcaaaatttcttggagaggttagttattttcgttttgttcaatatctccgtccaatggaggcagacaaaaccacacaccaatttaagcctaatagtagatttgaggatgctgtagctctctacaactttgatatagaattgagagatttgatgttcaaggcagtccaacgattagagattgctctgcgcacaacttattctaaatttccatttggctgagaacgcagagctgcaacgaggaatgctgtttgcccttactcgttttcagcttgcttcactttcttgaacaaatcggaggcgaacaccaaatcattcaactttttgttgtctgaattcacaacatcagctttattccccatccattccacttttcctttgtagatgaaagtgatgtgatcgccaatttccatgacagaattcatgtcgtgcgtattgataattgtggtgatattaaactctgttgtaatactcgatagcaactcatcaataaccaacgaggtcttaggatcgagcccagaattaggttcgtcacaaaaaagatacttaggattcaacacgatagcacgggcaattgccactcgcttctgcataccacccgacaactcgccaggcgacttcgcttgcgcatccaaaaggttgacacgctctaaacactcttgggcacgcttcacacgctcacgataattcttcgttgaaaacatatccaaggggaacatcacattttcaaggacggacaaggaatcgaaaagggcagaattctgaaacaccattcccatttctcgcctcatcaccacttgttcgcgcctactcatggagacaaaatcacgaccgtcgtaaagtacttgtcctcggtctggtgcaagtaaacctacaatattttttaccaaaacagttttgcccgaaccgctttgtcctatgataagatttatcttgccgttctcaaatttggtattgatattcttcaagacttctttctcaccaaatgatttatataagttttttacttctatcataaactcaacaactcagaaactttaaaaactcaactcagcaaaggagtgaggaatacatctgcaaacaacaccaatacggagctactcacaacagcattggtcgacgcctcgccgacagcaactgcgcctccctccacagaaaaaccgtaataggaggagacactggcaatgataaaggcaaacacaatactcttaatgatactcatccaaataaaccacaccttaaaggaatattgtagtcccgtggttaagtctgctggcgaaagcaccccactataggcagtggcataagcccctatcattcctgccacagaactaaagaccaccaaaaaaggcataatggtgattaaccccataatcttaggcaggatgagatagcatgcaggatttacgcccataatatctaatgcgtcgatttgttgagtaacgcgcattgttcctaattcagaggcaatattcgaccctatctttccagcaagtatcaaacacataaaggcacttgaaaactccaataagagaatctcacgagtgacatatcccgttgtccaacgaggcatccacggactctgcacattgattttcatctgaatgcaaataacggctccaatgaaaaaagaaatgagcaatacaagcggaatggagtcgacacctaacttcgacatctcttttatatattgcttaaaaaacatgcgcatacgctcgggacgactgaacgtgcgccccatcaacaacaggtacttcccgaacgttattagatatgtgatgattaattttattaccaaaattctactcgcttttaatctgttctgttatcgttaaatcatagcttggtacaaaagtaacgaaattccccatattatccacgagaattgtcactgtttttcttcgcaaatgccaaactgtatcattttacaacatttgatatcagcatttcctcacgttcttaaacgggcagccatgatgttacgaacagaataaagcgaacttcatcctttcttttttgattatttttcatacctttgcaaaacaacctcatcgattcggaatggaacaatataccgacacatacacctctcccttaggaatcatcaccatgagcagcaatggcaagcaacttacaggactgtggtttgagggacaaaagtacttcggccatgcactaagtgaccaaccttcacatccatcgctccccatttttgacgaaacccgcacatggctcgatgtttattttcagggcaaataccctacattcatgcccccgattctgctgaacgacacgccatttcgtcagactgtatggcagctattgttaaccattccgtatggagaaaccaccacctacaaacacattgccttggaatgggccaggcaacacggtgtgaaaagcatgtcgagccaagcggtgggtggtgccgttgaacgaaatcccatctccatcatcattccctgtcaccgggttatcggcaccaacggaagcctcacgggctatgcgggaggcttagacagaaagcggtggctgctgcaattggagcaagcaaacaccgacaggttcttgccggatcagtagaggtttcctcgtaagttcaatgaagaaatacaattttttgaaataaattcccgccaaagtaactaaaactgccgttttttttccccactggcttatatatcgcgatttttatgtaaatttgcaaaagagtaaaaatcaagatacagcattcatgaatgatcaaatagaaacggaagtgccacaacaagaaagcgaaagcttggtgctgcgtactgaaggactggtaaaacgatatggcaagcgcaccgttgctgacaaagtgagctacgatgtacaccaaggggaaattgtaggactattgggtcccaatggagcaggaaagacgacttcgttttacatgacgacaggactggtcattccaaatgagggacatgtctttctaaacgagcaagagattaccgactatcccgtctataaacgtgcgcaggctggcattggctacttgccacaagaagccagtgtgtttaggaaaatgagtgtggaagataacatcctttctgttttggaaatgacgaaactctctaagaaagagcaaatggagagattggaaagcttgattacagaatttagactgaacaaggtacgcaagaacaagggcgaccaactctctggaggtgagcgtcgacgtacagagatagctcgctgtttggcaatcaatcctaagttcatcatgttggatgaaccctttgcaggtgtagaccccattgccgtagaagatattcaacacatagtctggcgactcaaataccataatatcggtattcttattaccgaccataatgtgcaagagactttaaccattacagatcgcgcctatctactgttcgagggaaaaatccttttccacggcactccagaagagttagctaacaacaaaatcgttcgagaaaaatacttaggtagcaacttcatccttcgcaaaaaagatttccagctcattgacgaggaacgaagagcaagagaggaataaacaacaatcctctttcttcagaaagaagaggattgattggtttatcacgaacgagctaactacccctctctttcacagagagacaaggggtgagaccgttttcttacgcatccgcatcataccctttcccctcaccgctataatcttcgcccgtttcatatcctttcaacatatctttcaggattgcaatcatctcgtttctcaaagattgaggttctaaaacaatcagagccctgctattcttcagcaattcttgcttaaaatcgaaagtaggttgaacatacagctcgtattctctatattcgccatcacccgaatcttttaccatgcgctgagaatgatgcaagggtgtttcttccaaaaagacatattgtggccaaaaggctcgcaagcgaatatgctctgcctttttacgaggatctttcatgatgccgaagcagtcggcaaagaattcatcgggcgtcagtgtcttctccttacgcactttcacatccaacttttcaaattccaacaaacgattgaccgccaagattctgatatctccattctttttatcacgcccaataagataccaccgctgcctgaaaagtcgaacaaagagaggagccaagataaatgtactctcaacaccgtaagcatttttgtacgacacccttacatatctattttcatcaatacaatctaagagttggttcatgtataacgtatcttgcggaggattttccaacataatcttatcatgctgcctcactctttgtgccatttccgaaatgcgaaacgaactcagcagccagtccacgacatttgcgttatcgtaaatcgactccttgatataatacacattccccgctttcttgttacactcgatatacacccccaactctgtagcaatattctctcgataacgatgaaacgtgcggtcagtcaactcaccatgatccacattatatgaagatgcagaccacctttgcttaatctccgccaacatcattcgcttttggcgcagtatgtcaatcagccataaataggcacgcagtcgtccatccatgtgtgtatgtgtgaaggattacaacgaaaccactgcagaacattactattgaactgatgcaatggtcgtcgctttgcgttatttctgatagatattattgagttcgtcttgagtaaaggccttgaagcgtgcctgccaataaaggaatttctctttgtcgaattggtctctgtaaattttagattcacgagacgtatgcaatatggggttattcccatcgcccatgtgttcattccatgtgagttcggcaaaaggcgagtcttgctcctgaccgatatggtgcaactcatacgggtcaccattggcatcacgaggtgggaacccctctcctatcaagtcggcattgttatattcagcccatttatcccagtctgccaaatattctttcagccatgtgttacgcctaatgctgtagtcgctccagttaatatcctctcgtataagagccacccgtccaccaatattccgttccaccagtcctgctttcatataaatggcagcctcctccatagaacgaatatggctgattactttatcactccaccctgtttgatgagaaatatcctgttgcagttctaagcttaagggcgtgttctttctcataattatgcttattttttattgaacgataatatacattataaattaatcagttttgccaacaaatcattaaaactgtcgcttgcttttgtgagcatatccatcatcatttggtgtttttgtatgctctgcgcagaagtaggatccatactattgccaagcatttggtctgtaatcttgtctatcctgtcagacactttgtttaattgacgatccaatataggcaatgctcccttaaatttagtgagtgagctatcgctttgtatgataaatttatcaaggtcactgttcattctcgcaatttctgcctcaaccatttttgaagccactacacattcttttacagatgaagatacactattaagaacctttaaagagttatcgaccaccatgagtgtcctttcgccaaagttatctagatcgaattcaatgttgtcagcatccacatatacaacatctgtagagcttaactcgtcagaatattcttcttcaggacactctttttcagagaaaacttcttcatagtcttcataagactctttttcttttttcttaagccaattgaacatagtcgtaaaaattaaattatccaaatatattttttaatatcccatcaactcctgctgtaagcaaattctttttttcaagatcaggttcatgtacttctacataccccattaaatcaagttgctcgcaagctgcttcttcgcaatttttcttttgatcttccttatcataagaagttcccaccacacaaagaattgcaagttcaacaccaacaaccaatatgtatgttagccacctaaagaatgcccaccaagaacctatccagccaaagcagaaataatcaaagacaatacttagaactaaaataagagcaaccattattttagtaccatttttcaactcattagcttttgacaaacgctctttataattaatataagcggtgttctcacagagtaaaacttctgctatgccattaggttgaaaatctaaatcactaataacttcactattttcagcaaaaggtaacaaataacatgatgtgatagaagggtctgccaagaataacaactccgcaccagaaatttctccatttgcttcatttcttgtgattgtggtacacaaattgtaccgttttttattattaagttcaaaaatgtcaacatatagttcattatttacatgagccatgatgggacgaggcaagtcggacttttgctgaaaattcagccatgcattgtattctgcaataagataatcaaccattgtaaggctatatcgagatgttttgtaaagctcgcaaacacgagctatttcacctactataacttctgtattctctggattatcaagcaaatcctgctcattatatttatgttcaaactcattaacaagcaatttttgtaaacgatgatacggacacaaagctgtttcacgaatcaactctatgccagcttttttttcttttgcaattttcactttctgtgtaagaagtctatccaactctttattatgctcataagcggccttaacctcattgtacgcacctaaagcacttgttaaagcgacaccagaaatggcaactaccgacccgaattttggatgtcccattttggctatttgatttgcagcgatactaatttgtgttcctaattctttcaactgcaaaaaaccttgatctacattttccgcaagaagagtcagatgctcatccaacacttgatctactgctttcatgtcattaagacaagaattcagttcatcatctattgttttctttgaaagattacttaccattgtcacttttctttttatttttataatattttgattaaaaaaataaacattattttttcgcatcacaaagaaatcatacacttatttttgcgaaagaaaaaccattctgtaaaatctgagaacgacagaacaaaagtataaatgaaactattgtccccgctaaattatgttagcatggttccctgcatcactcaacacaaatggttgtatcataaacatgctcctactgatgacctatacaagtttttatgtgttgcaaaagttttgcagaaatctcattatttactgttatttttctttaccctatcttctccaccctcaagcatgagcaattgagtgcgcccattttatctaagtctacaccaaagttgttaatgaagagttggttcacttttttgcattcttggatgtttgtgacaggattgttaacaaacgaagctatttgcacgctcattcctggctcgataagcatacctgcggtattcttacggcgtgttacggtaattctgaataatgccatgtttttaggtttttattggttaatacactttgttgtttcttcatggcgcacacctaaaaagaaaggcatgaacgcctcggtatcacattctactaagagtaaggctctggtaaacccgaaattaagtaaaatacgaaagaggaatccatgcctatgttggcagtgaactcgctctgactctccgcattcataatttcaagtttaaatttaccagattttactccttgaacagaattgtcatggcgtgcgcacaattttatgtcgctcacatattgatagcaaagatataaaatatttttatacatctgcaaaacgtttgcaagaaaaaattggattcctctcattttttatattttatcttttaaccgcatcctacttgcatcaatctccacattcccccttgggatgtatctgtttatacaatgtcgcaccatattgatttaccatatgagttaattttgcacggaatttatgatttactaagcgcaaaattacaggggcgtgttgccatattgtgtcataaccagaaaaattattaagcttttgtgtgtttattctcacgatggagtaaaaatttatagattgatataaaaaaagcaagccttggcttgctgctatctttagaacgaaacaagacgcttcgcccttcttataattcaaatacccctcccgaggtgacaacttgataaacaaagcgagacaactcgtcccactttatagcacactcattgacaactataagcttattgaaaaaaaagctatccgtaataagggtgaaactttagtaagtgacgaatatcaagagcctttgtatgctaacgcccattaacgctaataaacgctaactcacccacattccttaaaatatgaattgtggatgatgaattatctgagataccaaacgcctttgttttctaccattggaaccactatctcttcgttcgtactatccccataggcaaagactaaaaagacattagctgcatgcttttctgtgtcggcttttacctgaacgatatgaacatccttaatgccacgatgttcaacggtctgctgattcatatacattttggcatttgcaatgagttgctccctatatgtgtcaggaatactgtcatggcgaaaatgcccatccacaaaggaggcataatcgccttgaagcaaatagtcgtaatattgcttagccgcacgtgccgccacctcgccttggtctggagtagaggaacaggcaagaaagaacagccccatgaggatatataagagtttttgcatttttacttgtttcatatagagtaacaaaaacacgcaaagagttaaatccctctttcctcctattttttacggataaagacatggataggcgaacccgtcaacgtccaattctcacgtatcttgttctctaagaaacgacgataattttccttgatgtattgaggcagattggcatagaacacaaacgaaggaatctgtgtattaggcagttgcgtgcaatattttatcttgatgtacttgcctttgatagagggtggaggtgtcgcttcaatgataggcagcatcacctcgttgagttttgaagttcctatgcgtaattttctgcttttataaacattcttcgctgtttcaagcaccttgaagatacgctgcttggtcaaagctgatgcaaatataatagggaaatcaacaaacggtgccatgcgctcacgaatggcattctcgaaggtcttgataaccttgtggtctttgtcctccaccaagtcccacttgttgactactaccaccagcgacttgttgttgcgctggatgagctgaaagatattcatgtcctgcgactcgatacctcgtgtggcatcaagcataagaatacatacgtcgctattctctatggaacgaatactgcgcatcacagagtaaaactcaagatcctctgttactttattttttctacggatgcccgccgtgtctaccaaatagaagtcaaaaccaaacttatcgtaacgggtataaatgctatcacgagtagtcccagctatctcggtgacaatgttacgatcttcaccgataaaggcattgatgatactacttttccctacattgggacgccctacgaccgcaaaacgtggtatatcctcttcaagttcttcgcgcttatccgaaggcaacttctcaagaagcaaatctaacaagtcgcccgttccgccacctgttgcagcactgatacattgtggttcaccgagtcctaaacgataaaactcagcagccgtataatactcggcactattatccactttattggcaaccaagatgactggcaactttgtttggcggagtatttgggctacatcagcatcccaatccgtgagaccgtttttaacatcaactacaaacagtaccaagtcggcttcttccgtagcaacaaccacttgcttgcgaatggcgtcctcgaagatgtcatccgaattcacgacccaaccaccagtatcaacgaccgaaaactcacgaccattccaggagcacttcccgtattgacggtcgcgtgtagtacctgccgtgtcacttactatcgctttgcgcgattgggttaaacgattaaataaagtggactttccaacattgggacgtcccactattgctacaagatttgccattttgcttatatctctcttcttaaaccgatgacggaaaaacctacatctgtatatttactactaaaaatgttttaacagcactatctttcaatggtgcttcaacaacacgacttactcgggattatacccaaaactgttgagctcgcgagtagagtttcgccagtttttgtccaccttgacaaaagtctccagataaatctttttaccgaaaaacttctctaatgccttacgcgcctcggtgcttaccttctttaatgccatgccttgatgcccaatgataatacctttttgcgagtcgcgctcaacatagataaccgcatgaatatgaatttgctgctctgtctctttgaaactatctaccttcacctcaaccgaataagggatttctttgtcataaaacagcagaatcttctcacggaagatttcactcacaaagaatttggcgggtttgtccgttaattggtctttaccgaaataaggaggactatcaggtaaaagctcttgaatacgattcaacaggacatctatcccaaatttgttcgacgcagatattgggagtatttcagcattcggaagaatgttgtgccatttctccaccagttgatctaacgtcttttgattactttgatcgattttattgatcagcaagataacgggtatagtcatcttgcgaaccttctccaagaaatcaatattcttctccggcgtctcaacaacatcggttacataaagcaaaatatcagcatcagccagtgcagattcagaaaaggcgagcatatactcctgcattttataatttggctgaaggacgccaggggtatccgaaaaaacaatttgcatgtcatcggtattcacaattcccatgattcggtgacgcgttgtctgcgacttgaacgtagcgatagagatacgctcacctaccaactgattcatgagcgtggacttcccgacattgggattacccacaatattaacaaaacctgccttgtgcataacgtgattctttatgaaagaacaaaaaagcgcactctttaccaagaaaggatgcgctttcattattcaatatatgaaatatttaattatttctttgtagcctctgtagcgccatcataagcccacttaaagaaagaagctccatgtacgaatcctgctccaaaagcagtaaagataacacgatctccttttttcagtttgctttcataatcccaaagagcgagtggaattgtagcagcacttgtattaccataatgctcgatattcacagcaactttgtccatagacaattctgcacgctttgtaacggcttcaataatacgcagattagcttcgtgaggtactacccagtcaacatcatctttgcttaaattgttccgtttcataatttccaaaacgtcatcgctcatatctgttaccgcatagcgaaagacatttcttccctcttggtatagatagtgcaaacgatgatctactgtgaaatgagatggtggacaaacactacctcctgctttcatgtgcaaaaagggcaagcccttgccatcggtgcggaaaaacatgtcctgcattccgtattcggtatcctcggaggcttctaccaatactgctcctgcgccatctccaaacagtacacaggtctggcggtcttgataatctacagttgaggacatcttatctgctccaatcacaataatctttttgcagcgaccgctttctatcatagtggatgctgtacttaatgcgtacataaagccacagcatgctgcttcaaagtcgaacgcaaaagcattcttaagtccaagtttgcccaatacgatagatgccgtagaggggaacttgtaatcaggtgtggttgtggcaacaatcagcgcatcaatggtatcaggatcaacgcccgttttctgtatcaattgcttagccgcttttcgcgccaagtaactggtcccaaggccttcatctttaagaattcgacgttccttgatacctacacgagtcataatccattcatcgctggtatcgaccatgcgcgaaagctcctcgttgtcaagaatataatcaggaacatacccgccaacgccagtaattattgcgttgattcgtcccattactcagcaacttccttttcaatcgcaacctttcctctgtaataaccacaagttggacaaacggtgtggtaaacatagtatgctccacagttagggcatacagccaatgtaggaactacagccttatcatgagttcttcttttaagtgtacgagtctttgactgtcttcttttaggatgtgccattttctttaatctttaattattgtttttaatttttctaattgagcccagcgcggatctatagggtcattttcagttgcttcattacttcgggtaaccaaacaattgttaagcgccctcatcatcacatgattacattttccaggtgcatgtacatgctggatgggaatgctaagatctataaattcatagataaaccaagacgtgtcgataattccttcatcttcaggcacggtcacttggtcatcttcgtctgagtattctgttccaagtctgactacaagacgttcgtcagtctctattggttggttgagttcatcgagacagcggtcacactgcacaacaacggtaccaacaatatgaaaactgagcataaagctacccgccatttttcgaagagtaagctcaacagagagattccctttgtgaatatctggggctttaatagcctcaaagtacccatcggtaagcgtaaactcgaagtgttcaacttcttgattcacagctcttaaatctatcttaaacggctctaagtcaaacatattcacactttgaggtgcaaagttacaaatattttctgagatgctaacgtataatgataaaaaaaaatcttattatcaattaaaatcgaagcgaaacaacacagaaataaagggttgtgatgaacttcctacttttgtcaattattcgaagccttcaactcaatgcggaaggtggttcctctatctttctctgaatctttgacgaatattttgccattatgatattcctcaatgattcgtttggcaagagacagtcctaacccccaaccgcgtcttttggtggtaaacccaggacgaaaaacgttctttatatctttcttcttaattccctttccggtatcagaaacttcaatcactattttcttcgattcacgaaaagcagaaattttaatttttcccacaactcctcccattgcatccactgcattcttacataagttctctatcacccattcaaaaagagaaggagaaatgagcacgagttgatcgtttccttcaaaagcgaattgagattcaatcgcaatctttttggaggttcttcggttcatatatgccacaacattctgaagaacttttgacaagctatataactctaattctggcgcagaacctatttttgagaatcggtcggcgatgagttgcaaccgcttcacatcttgatctatctctggaattaaagtgtcatctgggtaagtttctttaagtatggctaaccatgccattaaactcgaaataggtgtgcccaactggtgggcagtctctttagaaagtcctacccaaactttattttgttcggcttttttcgaactaaggagggcaaaaagtgcgacaatcacaaaaatgagtaccactcccaactgtatatagggataagtggaaagacgtttgagcatgaaagaatcatcataacaaacatcgatgtactccttttcttcaggctcattaaaaaagatgcggatatatttgccagaagctttgagcttacgacccaattgctgcacataagcaacactatctactttagacttgttgggaagtttgatattacggttactctgtattgttcctaggctatccatcacaatcacgggaatcgtatgattttcattaatcaccttcaacaccaaattcaaatccgtattttcatccgcctcattcagggttcgcatggcttctgcccaaatctccattttattttgctcctccttctccaaatcacggatgagacgatgtgacacaattaaggagatgactgctatcagcacagcaacaatcaccaatatcacttttacgtgtctaacccgatctgtccattgcataagctaaaaacgtcaatgaacaaaatttattgcccatatccactgcaaccttccatacctttgcatcctttcgtggctatctacgccgtgccaccctatatctctgtagcctataaaaacaaaaaaacctccagcatcggttgagacactggaggcgtgaagtaaaaaaggcagctacctactctcccacattgcattgtagtaccatcggcgcaagcaggcttaacttctctgttcggaatgggaagaggtggaaccctgccgctataaccacctgataaaggggttgacaaatcttcacaagcaaaacatggataaaataaaatgtacctttttgttgacgtgtctattttcatagcacgacaacacacgatacaactgaaagaatggctcacaaaagaaagtcttgggcaattagtagtgctcggctttgccatcgctggctttacacctgcaccctatcaacgtcgtcgtctacaacgacccttatatggagttctcatcttgcggatggcttcgcacttagatgctttcagcgcttatcctaaccagacttagatacccagcggtgcgcctggcggcacaactggtaaaccagaggtctgtccatcacggtcctctcgtactagtgacggcaccacgcaaaactcctgcgcccacgatagatagagaccgaactgtctcacgacgttctgaacccagctcgcgtgccactttaatgggcgaacagcccaacccttgggaccttctccagccccaggatgtgacgagccgacatcgaggtgccaaaccaccccgtcgatatgagctcttgggggggatcagcctgttatccccggagtaccttttatcctttgagcgatgcagtttccatacacatgcaccggatcactatgccccagtttcctgcctgctcggcatgtctgcctcccagtcaagcgcccttatgccattgcactctaaaaggtcggttaccaatcgacctgagggcacctttggaagcctccgttacgcttttggaggcgaccaccccagtcaaactacccaccaagcagtgtccgcactttaagcgcgttagacctcagacagccaaagggccgtatttcaacgatggctccaaaagcgctggcgcgcctccttctaagcctccggcctatcctacacatcggatgaccaaggtcaatgctaagctatagtaaaggttcacggggtcttttcgtcccatcgcgggtaatcggcatcttcaccgatactacaatttcactgagatcatgattgagacagtgtccagatcattacaccattcgtgcaggtcggaacttacccgacaaggaatttcgctaccttaggaccgttatagttacggccgccgtttactggggcttcaattcaaagcttctacttgcgtatgacctctcctcttaaccttccagcaccgggcaggtgtcagactgtatacttcatctttcgagttagcacagccctgtgtttttggtaaacagttgcctggacctattctctgcgcctcgtaaataacgaggaccccttttcccgaagttacggggttaatttgcctagttccttaaccatgaatctctcaacgcctgagtatattcaacccgactacgtgtgtccgtttgcggtacgggtgctgcatgactgaagcttagcggattttcttggaagcaggattacccacactattggctttccccgaagggaatgccatactttcaaaagtcagctctcatggcggatttgcctaccatgatcaaagcctaatttcttcaacgagctattccgtcagctcgcggtggtgtcacttctccgtctccacaatcgcatcatgcagcagtcacggaatattaaccgtgtctgccatcgccctcgcctgtcggctgagacttaggacccgactaaccccgggatgattggcattgcccgggaaaccttagtcttgcggcggaagggaatcttacccttcttatcgttacttatacctacatttgcttttctatacactccaggaaaagttaccttaaccattcaacgtatatagaatgctcccctaccgatacttttattattactatcccgcgccttcggtatctgtcttatacccgattattatccatgcccagaccctcgactagtgagctgttacgcactctttgaatgaatggctgcttccaagccaacatcctagctgtcacgggg

SEQ ID NO: 105 - DNA, 16574 bp, Prevotella timonensis
  source 1..16574: mol_type = genomic DNA
gggttgcagaccccaatccgaactgggagacactttgaagattagaccaaacttgcgttaagccaacactctgtatgccccattgtaacacgtgtgtagccccggacgtaagggccgtgctgatttgacgtcatccccaccttcctcacaccttacggtggcagtatccatagagtgcccagcattacctgatggcaactaaagaaaagggttgcgctcgttatggcacttaagccgacacctcacggcacgagctgacgacaaccatgcagcacctccaccagcgccccgaagggcctcaacatctctgtatcgttcgctggcagttcaagcccgggtaaggttcctcgcgtatcatcgaattaaaccacatgttcctccgcttgtgcgggcccccgtcaattcctttgagtttcaccgttgccggcgtactccccaggtgggatgcttaatgttttcacttggccactcatccaaaagggacgaatagcgagcatccatcgtttaccgtgcggactaccagggtatctaatcctgtttgatacccgcactttcgagcatcagcgtcagttatgctacagtaagctgcctgcgcaatcggagttcgtcatgatatctaagcatttcaccgctacaccatgaattccgcctacttcctgcatactcaagtcgaccagttcgcgctgcaagccaccggttgagccggtaaatttcacaacacgcttaatagacagcctacgctccctttaaacccaataaatccggataacgcccggaccttccgtattaccgcggctgctggcacggaattagccggtccttattcatgtggtacctgcaatgcatgacacgtcacgcactttatccccacataaaagcagtttacaacccatagggccgtcttcctgcacgctacttggctggttcaggctctcgcccattgaccaatattcctcactgctgcctcccgtaggagtttggaccgtgtctcagttccaatgtgggggaccttcctctcagaacccctactgatcgttgccttggtgggccgttaccccgccaacaagctaatcagacgcatccccatccataaccgctaaacctttaatcgttatttgatgtcagcaaacgatatcatacggtattaggccgtctttcaacgggttatcccgtagttatgggaaggttggatacgcgttactcacccgtgcgccagtcgtcatcaaggaaagcaagctttcctcatgttaccctgcgacttgcatgtgttaagcctgtagctagcgttcatcctgagccaggatcaaactctacattgtaaaatataattgaaacggaaaagataaaacatataaagcttacgcctcataccctatctcaaccaacttcgttttctctgttcagaacgaaactccagaatttaaaagtattctcaccttagttcttttctaacgaattgaacggttcgtaaaacttgttacctatgtatttacgcttcaagaaaactcgttaactcgttgcctcatcaacgcctttcctaaaaagccatacatgcttcttgtactacttctgtcttatgtaaatctttttcaaagaacgcttcttttatcgccccgaagaatgtttcattttcgtttcattctcgaaagcggatgcaaaagtacaaactttacgattaacctccaaatatttttcaagaaaagttttagaaatttgcagaaattgatttaggtcaagtgatttgtgcgcattcagcaattattgctcgcttatatctactttatgacaaaaggagactatccactgaacttgaaaatggactgaattacaataaaaacacaaattatgatttcacagttgggctaaatctggaacttcagtcagtaatatatcaatcatttcgttagctattttgcggtctacgattcgcataatattgctcgtttctgtattataatcaaagaagtttatatttccataccagacgatagccttgtcgatgattgcacattgtagagtttgctccttattatataatacatctattccagcttttgccaattccatctccttagcaccttcctctttgatacgtaatgccacatcaacaccattatggagaatgacggaaagtgtagacatcatggctgttctatatttgaactttactttgggaactgctattagaacagaatgtttagcatttgccaaatcgtttcggaatgcgttttcgtaattgtttcgctcatatatcagttcctgtggttgattgtctgctactttcattatggcatttttgccataacctgcagctgcatatccttttagacgcttgcggtacatcgagtcgcaaagtggaatgtggatatctacataatcataaattaccacctcacttttcccttcatattcccgatgcaaacgaccagcatattgttccacgttccctttccatgcaataggcatagtaaggaataatgcgtcaagacgaggataatcgaaaccttcgcccacatactttcctgtagctacaattgcaagtgaatctgttggagatattgtctgaagcttttgcaaagctaaacgtttctcctttgtggaatcggctccaatgagctgaacaacatggtcaacaaatggcataagcatttctgccaaaaaccttacatgggctgtgcgggtagttaaaactaacggagtatgtccttgttgaatggctatttttacatcttcgataataaattcatttctggtcacatcttcagacaaggtttttgtgatttggacataagacttattttctgatgtaatattgcgaaaggaggtaaatcttggattcaatatgcgtttgaaagtttggttggcaatctgagccttcgcatcggaagtaaatcttatttttccacactgcataaagataatcggttgacgtccatcttttctgataggtgttgcagttaagccataaacataagttgctatcacatgccgaagcacttgctcaaagctgacagaagagacatgatgacattcatcaacaacaaccatgccgtaatctctgacaaaaggttttacttcaccttcgcttaaacaagactgtatcaaagcaatatctattataccatgcaaagaattcttgccagaacataaacaaccgataatagacgatttattctttcgtccccgtcttttttctggttcttctattgtttcatttatttcaagaaatttatccaatcgctctttccattgttcaagcaaagctttgttatgcacaagtatcagagtgtttacctttctctttgcaatcattccaagagcaaatacggtcttaccaaatgctgttgtagcagacagtgtgccaatgttatgctctgcgaaagcctctattgctttttgctgttcttctcgaagctcacctttaaaagtcacattgattcttcgcccaggatttgttttgtcggaaatcgtaacattgacattatgttgactcaatatatcacaaacagcatcttcacatccacgtggaagtgcaaggtaatcatctgtcattacagaacaagaaatgatgcgtggaatattatatgtggagagacgcatattttgcttttcataaaattcgggatttcggaaagccgctatacgtttgaaggcattcacacatttagcagataaattagctaagggtatatagagcatgtttgctcttgttagaacaatttgctttggataaccatctgttataggagtatttattttaggagtttcccatggttttgtctcgcaggactttgatagttcacctaagttaggcatcatatgctgccgtaacaataaatcaacttcaacctcggtcaacttatgaatttgtgataaaagcgcccattgatctacatacgcattgaactcattatctacaaacacgctatttcctttacgacgagccattccttgtaacggtaaggctacaagatttccaagaccaccttctggtaatgtgtcttgattaggaaagaaacggtcatatgacttaaaagacaatcgtgcatcacgattcattgcttccgtaagaatggcatttcctaacttacgtgccatcaatgccattattggtttatcaaagaatatccatacatgcgcaccattaccagaacgagagcgctcaatataataaggcacattccaactcttgcagacatttacgaaagcaaggacatcattcttatagccatgttcgcaattcttgtcatcaaaatcagtacataaaaaataacaggtattatccttacaaattggataaagaccgatgacatcacgaccaaaggggtcttttcctgcaagatgattgaagaaatcattgtatgacaaatgtgcaaacaatctatttgggcaatctccacatttatattttcgtttgtcacaatactcgcggttccattctctttcacacactggctgatacccagctttttgagaagatggactataccatcgtttcgcaaatacgtcatctctaccttggaacaggctttgaaacactgctactttttcttgtagactaagccgaacggcatgattcgtagcaacatgaactggttgttcaatagtttctctttctacgggaagtgaataggaaatgccatgcttatcaagtatactcttcaacatcgcattctctcgttccaaatcttgcaattgtttgagtactaattcatcactacggttttcggctcgccccattttagttattatccaaatttatgatttctcaatagcctcccaatcccctaatcatcatacgttaccagcctaacaaaatttacaaataagtcactaatctatgtcaattaacatcataaattaatgcaaagcatttgataagtgtcataccgatttgaataacatcgcatttgcttgcatttttttctttaaccgtttcgcatttggcttaaacgttttataagttaaaaaaccagcaacaacaccaccgataacaggtactgccttactcaagcgttttgtcacagaaccttttacgaatttcgtcctaacccatttagacaccccttttactaatggataccacatagtttccgtcacgcccacctgcggcatacgcatagttgtgtgttcggcaaacgtttctgagagttgcttaaaagcctcgttagcagtacttgccccaagcatgacacccaaaaagatagtcagcacatcataagaagattctattaaatgccctttttggtcgcacaaatcaggataaccatataaataagctaacttttgagcaataattaaggtttgacaaaagtattgtaataaatcagcaggaatagcaaaaaagacagcgacaccgcctggcacacctgttacggtagaaaaaatggttgcttttttagtatgttcattgatacattcgttagccaattggttgattaattttagaggaataacatcaataggacgctgcaaggctgctttctttatttctgtttccgtacaatgaggtctcaaagcctccaccaaaaacgccaccctatcaaccttgattcccggtaagttcatgatagaatatattattttattccactttgtaacttcgttttccattataaaaatattttttgttttcaactggatttatgaaaaaagactcaattacccaaaaaacatattttttatcgagaatccctttcaaataactcatacaaatatatggatattttttctaaattcaaagattatcataaagaattgatttttggtaaaagtattcgttgctttttgtcctatcattttaccaaaaaacgaccatctaaaatcttcaaaatagaaaaaatcaataggcaaacgacatgcaaaaatacgctgatttgaacaaaataaacgtctttttaagttagaacgttgatttaacgcccttggaaacatacattagcggtgttattcacatgcttcaaacgcattaaagcatgcaaatagttggcttatctcaatgctttagtcgccaagaaacggtaaaaatggcaataaaaagagaagacttaaacgtaatgtgtttagcgacaaacggttatgaagttcgctcatttttcgcgtatttgcgaccagctttgacgttggttgtaaatacgcgagttatgagaggcactttgtaaagaaaattcagcattggtgagctttccatgaagcataccgataattttacattcgctgcattgttggtgcattttgttgtgaaaaatcatccttcaatgaaagcaccgtaaattacaaaagactttaatcgcaggaaatgaaagtgtgacactcttctttatcgtgcgtttgaatatttattggtgcgcttagaatacgctattccacaaagatgataggcgtatcttcgtttttcggcagtgaaggtttttgttgtttattcttggattgttttttcagcttaccttgctcgtcaaacatattataggtagtccgtagcacactaaattctgttctacgattcagttgattgcatatctcctgtttttctgcatccaatgttttgatgaactcttcagatagtacatcaccctctttcagccaagggtaacgctcagtgagtttcttgcgaatagtctttggcttttccttgccgtaccctactggtttcaagcggtcttttgcaatgcccttgtcaatgagatactgaactacagcttcggcacgtctttgcgctaatcgctggttatattctttcgaacccttataatcgcagtgtgcgcttagttcaatagtcacatgactgttttcattgagtagctttaccaaatcgtccaaggcttttttagactccaaacgcagcgtggctttgtcaaagtcgtagaagatgttatctatcagtactggtacagtaattgatgctaaaggaaattgtagggtatattctttcgattcctttacaggttctacctgcaattcttcggtgtgattaagaaaacctttacaggtggcgagcagcaaataatcaacttttggctgtatcacatagctaaacgagccgtcactgcttacgcttaacacctcgtttgttccgtcactccccacaatacgcacttgagcagaagggagttcatagccatctttctcgtacacccaacctttaatactctgtatgatttcaggattttcaaaccaataaatttgatcccatccacgtccattattccgattagacgagaagaaaccacgattgtgaggaccttcaaaggtcaatccaaaatcgtctccttctgaattgagaggatatcctgggtgaaccaagcgatagggcgcagttgcatccttatctttagttggcgcatggcgctgtaaactgtctttcagagcattgttagctgagcgttggtgattgggtatggcaataaatacatccaatcctccaaagccaggatgcccgtcacttgaaaagtaaaggtcgccgttaggtctgaatgtggggaacatttcattgccgggtgtgttaataggtgcaccaagattttcgacacctcccaaccctgcagccgttaagcgtactcgccaaatgtccatacctcccattcctcccggcatgtcagaggtaaaatataaccattgcccatcgggtgaaaccgctggatgcgcataactcgaaagagtgtcttgcgtgataggtaattcgttcgcctttccccaagccgcatcttgtctattcgatactacaatttttgcatagcgtgggtgtgtagcatcggttgtgcattgcgttaggtacatttctcgcccatcaggactaaaggcacaagccccttcttcagcatcagtgttcaagccaccttgcactacttcgggtttgctccaatttcctttgtcgtcctttacggatacaaatatgtctgcaggtttgcatcccgtgatgccactcagattgtttcctgtagcttcttttctggtcgaagtaaaatataattggttataatcatcgccccaaagcatgggcgaatagtctgcgtgtcgagagttaaacacgttcatcttcttcacggtgtatctactgccgccttctttccatgctggagcttgctgggcagagcgcaatccctcttgtgccaagacgtggttgggtatgctgtctaacaccaaggcaaattctttttcagcctctttataattgccattgcgcaagagttgttgagccaatgcaaaatgtgtttgcacattgtcttgctgatacctgataacattgcgataggcagctatggcttgtggggtcgcgtttaggcgatcgtagcacagtgccatacgactggctcgctgtcctcgcagggtgcgttccttgggaggggtttgcctgtaggctttcttgaactgtgcagcagcatcataatattcacctatcgtcaagaactgttcaccctttttcatacttcgttcggcaccacagctcactaataacagtccgatgagcacagtctgatataaatataaaaaatggtgtaatgcttgtttcttcatatccttttatcccagttgccgactgttgtcgcgaagtacgtcgtttactatttggttgatttgtattttcaattcgtttacaaactgtgcagcatcgtatttttggtgctctatgtcgcgcaatttcttttcccaaatgccggtgagttcacagcttgtaagcagtttctctttgataatatcgatgagttgtattcctaagggagttgctactatacgtttgcggttgcgttggatgtattttcgcttgaatagtgtttcaataatactggcacgtgatgaggggcgtccaatgccattttctttcaaggcagcacgtaactcttcatcgtttacaaactttcctgccgtttccatggcacgcaacaaggtggcttcggtgtagtgtttcggcggagtggtttgcttctcggtcagcgtagggatgtgttctccgctctcaccctttacgaacgtgggtagagtgcgttcttcatcggtagtcttctcatcagcgtcatcgtcttcgttctgatttttagcgtacacatctctccatcctggctccaatatctctttgccgcttaccttgaattctatctcttttactttccccaacacggtagtagtggcgaatttgcaatcatcatagaacactgcaataaagcgccgagcaatgaggtcgaacacgttttcttccatattcgacagtcccatgggtggtacgcctgtggggatgatggcatggtgatcggtgacttttgaggaatcgaatacttttttagatttcttcagagcctttccgcccaaaggttttatcagttcagcatagaccgtcttgctttgtatcttcgtttgatagagtccattcatggtttgcggacatttgggataaatgtcgtccgagagatattgggtgtctacacgtggataggtggtatattttttttcgtataaactttggataaggttgagtgtcatctcagccgaatagccaaacttcttgttgcaatctacttgcagcgaggtgagatcgtagagctttggcggtgcttctgtgccttttttcttttgcacatcggtaacagtaaatggttcaccttcgatagtcttgaaagcagcttcgccttcttcttttttgtcaaagcgacctttggtagcagtaaacgttgtgtcgcggtagatagttgccaaaacccagtatgtttctggtttaaagttgtctatttctttctgtctattaacgataagagccaaggtgggtgtttgtactcgtcctatgcttagcacctgtcggttcttgccatatttcagtgtgtacagtctggttgcgttcattcctaatatccagtcaccgatggcacgagacagaccagccaaatagagtggctcgtatgccgattgctctttcagtttgttgaatccctcacgaatagcctcatcggtcatagagcttatccacaaccgcttcacgggacatttggcttgagccttttgcatgacccatcgctgtatcagttctccctcttgtccagcatctccacagttaataatgctgtcggcgtgttgcatgagttgctcaatgatagcgaactggcgtttgatgccttcatcgtcaatgagcttgatgccaaagcgaggcggcaacatgggcagagctgccaagctccagtgcttccaattgtcacaatagtcgttaggctctttcaggcaacacagatgtccgaaagtccaagttacttggtaaccattgccctccatataaccgttttttgagctatgggcaccgatgatgcgtgcaatgtctttggctacgctgggtttttctgcaatacaaactatcatagatgtgcaaaggtagcagaaactaaagaaacccacaagcgttgaaccgaaaattacgtgtcatccacatggctctttcataaagaatgatgttttcacaaagaaaagcgcgaaagtaacaaaaatcttgtgaaaaggcttgataagaaaaacgtcaacattgtgacgaaacaaatggcaagtatctgatgagttgataagcaaataagtaaattaactgcttgctaataatttatcagctcgtctaataggaacttgttagctcagagcgtaaaaagctgtttcaatattgggagatagacttacagataccactgtttggcttccatataatgtttggcatattcttctgcctgtccaggcattgccttcttgatgcagcgtgcaggtatgccagcccaaatttcatgtgcgcctacatgagtgccctgtgtcaccaaagcattggcagcaataatggcaccagccccgatttctgctccatccagtatcgtagctcccattccaatcaatgcgccatgttttattacacatccgtgaacattagccaaatgccctaccgacacatcgtcttctatccagacgggagtgccatgcgactcatgtacgcatgctccatcttgaatgttcactctgttgcctatgtgtatggcatcgatatcggctctaagtacggctgaaaaccaaatggaacagtcgtcacccatgataatgttgcctactaaagttgcattttcggcgataaaacaattgttgccccagttgggacgtttatttcttacttttatgatagttgccataaagtttgcttcgtaaaacgtttctatccgaagagcgcacgtagagcttcctccactttgcggacaggatgtagttctaaatgatatttttgtggattgatacctttcaaattatactttggaagaatcatgtgtttgaatcctaacttttcggcttcggcaatgcgttgctctattctgttgatgggtcttacctctccactgagtcctacttcgccagccatacaccatccgttttcaatggcagtgtcaacattactggataacactgcagctatcacgctcaagtccattgccaaatcggttacgcgtaaaccacccgctatgttgagaaagacgtctttttgcatgagtttgaagcccactctcttctctaagacagccaataacatattgagtcggcgttggtcaaagcctgttgcagagcgctgtggcgttccgtatgcagcagaagataccaaggcttgtgtctctactaagaaaggacgtaccccctcaatggcagacgaaatagcgataccactcagtccatcatgatcttgtgtgagtagaagttccgacgggttgctcacagggcgcaatccgttttgctgcatttcatagattcctaattctgatgtgctgccaaatcgattcttgatggagcgtaagattctatacatataatgttggtctccttcaaattggataactgtatcaaccatatgttccaaaatcttaggaccagcaagtgtgccttctttattgatatgcccaatgaggagaataggaatcccacttgtctttgcgagacggagcaagagtgctgcgcattctcgcacttgagcgatacttcctggggagctttccacgtgattggtagcgattgtttgaatggagtcgataatcagtaggtctggttttacttcaagcacttgattgaagatgtgttctaaagatgtttcacacaaaatcactacattattattttgctctgtagagatacgatcagcacgcattttcaactgatgcgcactttcttcaccgctgacatatagcacctttttattgggaagatggagtatcgtttgaagggttagcgtactttttcctataccaggttctccacctaataaaacgatagaaccaggaacgagtcctcctcccaagactctattcagctcatcatcattcatattgatacgaggttcatcttgggcagaaatatcttgtaggtgtaagggcttgtttttcttttgctcaccatggagattgtgagccgttgatacggctattgaggaaggttgagagttattactaatcctaatctccttaaaagtattccactcaccacaattaggacattttccaatccacttgcttgactcttgtccacattgggagcaaacgtatgcaatcttatcttttgccatattgttgctataatatagggacaaaagtaagaattattttcagagaatcaaaatttatgattatttttgcaagatatgaagaagattctgtatatcaacattctctttatcctactgttgtcttcttgtgggcagaaaagtcaggaaatagaaaagaaaacgaaagccaataacgcccgtgaacaaaaggcgtatgcggaagcacttaggattgcagtcttgccaaccttagattgcatcccactttatgtagcgaaagaccgcaatctgtttgatagtgcacaggtagatgtaaaacttttgccattcgctgcacaaatggactgtgacactgctatcataggaggaagcgtccatggggtagtatcggatttggttcggacggagagactcaaacaaaaaggactgaaattagaatatcccattaccacaccgttgcagtggcagttgataagtaacaagacagctcgtctcaaacagttgaatcagttaggagacaaaatggtggcgatgacaagatattcgggaacagattatctgaccgatcaagctcttagtggggtaaagacaagtgccaaagtgtttaaggtgcaaattaatgatgttttagtgaggctgcacatgcttttgaacaatgagatggatgccatgtggctgcctgaaccacaagctactacggcacgattgtataaacatcgggtgatcacatcaagtgaaaagaccaaagagcagttgggagtgatagcgtttcggacggatatgctccaaaccaaaaaccgcaaaaagcagttgcaagcttttatcaaggcgtacaacaatgccgtagactcactcaacacttacggactgtcccattattcggagcttgtcactaagtattgtcatacagatgaaaaaaccgtaaaggcaataccagaagtaaccttcaagcacgctatagctcctttagaaaaggatattcagaaagcaaaagcatttataccaaaattgtaaattgacgtttgaccaaatctctccaatattttgaattatactgattttgatttagaacagattaggaatttgattacttgcaaactaaatctacccaaggcgatagagaacttgcaggagtatatttccaaacacgaattgaccacttttcaactgaagtgggaacagttgaatggtgactatcttttgatgaaggattttcttagacgtggattaaaagatccacaatttaatgttgtatatcataatttattgcgtgaattgtatgccttgaatagtgatatacagttggagcaaatgattcatgaaaacggctcatatcagttggctcatcagacagcgaaatcagttgtacttggagatacaagtattaaaatgcaaatggagaaatttgttcaagatgttgccatgctatctttggaacccaaaagaggacaaacactccaaacaaatcagttgtatgaagaacatcaaaaatacatcaatcaggttttcaatgctttcttggtttctcctcaatggacggaaagtgttgcaaaatttgtggaagaattgtttttgtcacccactgttgatagcaacgacatacaattattgttgagtgggctgatgttatcagcgattcaactttttgattatcgtaagatattggtattgatagcaacctatcaaaaatcaacagacgagcaaatacgacaacgagctttggtaggtcttgtattgtgtttgccatacaatgacgcaaacatctatcccgaagtaagcaaatccattacgaaactctgtcaaaatgagcaaactttgcaggaattgctggagttgcagatacaattcttttattgtatgaatgcggatgcagacaacgaaaagctacaaaaagacatcattcctcagctgatgaaaggacaaaatatccaattcacacgcacgggaattatagaaaaggaggaagacccactggaagaaatgctcaatccgggtgctgcggatcgtgccatggaagccatggaagagaatttccaaaagatgatgaacatgcaaagggcggggtctgacatctattttggaggcttttctcaaatgaaacgttttggtttctttatggaattgagtaattggtttgtacctttttatcctcaacacccaggacttagtcagatgaatcatgagttaagggacggacagtttatgaacgttttattggagcatggtccattctgtgattctgacaaatactcctttgcgttggcagcgtcttccattcttaaccaaattccgtcacagatgcgggaacttttgaatagtcaagagttgttaggaccaacagttaataaggaagagcatcacaaaccagcctatatccgacggatgtatcttcagaatttgtaccggttttatcggctttacaaggacaaaaatcactttcataatccattttccacagagttgtcgcatcatacagttttttttgtcctcaacaatctctttcagaataccacattgtcgcacagacgtctcgagattggacaattcttgtacaggcatcatttctatgatgacttgcaccgcttgttagctgcttgcgaaaatattgatagcgtagaatattggagactgtctgcaatgttagcccatcaggaaaaggattatatgcgggcagggttggcttacgataagttgttagatgtggatagtgataacgagcaagctttaagaggtaaggctaattccctgttttattcaggcaatttttctgaagccatcaaatattatactcgtattttggaaaaagatgcgaatagtgcgcgagttcagcttaatttagccgttgcctacattaatgacaatcaagtagaaaaggggatgaaatatttgtttaagcttagttacgaatatcctgaaaatctgtccgtcaaacgctcattggcatggggctatttgcgaaagaatgaaaatgagcaggctttgcagctatacaatcagctaatgactcacaaaagccatattccttcagattatttgaatgcgggttattgtctttggttcgagtcaaagatagaagaagcagtaaagaagttcgcccattatgaaataatgaggaaggaaaagggaattgcgcaaggtagcgatgaaagtttacatgatgttttcattttggatgctcctttgctcaatcagtatcatgtaggaaaagaggaagcggcagtgatggaagatttggtaaacgatcagtgtcgaagttatgcaggaaggaagggtgaacaactgtcctagacgcttgccgtgtggtaaacagctcgcagctttaaccgttttctttttatctcggaacaggtttgtagataaattactattttaagcgcgttagctattctgaatgacaagtggaacagtcttgcgatttgcgaaaaaactgaagtcaatataagatagacaaattatgcccttatccgaagaggtcttacggacgtggcgattatttttgtgtttcgggagttatggaagaatttcctttcacgacgttaaaaaagattgttttgaaaagtcagcagacaccatagtagtgaaactgtcgataacattgtgcgaaagtaggggataaaacctcactattagcatttaccctctaagcgattgaaagtaataaaggctggttctataaattagttttgttagattttgagcttatttttgaggtcaaaatgcaagagagtgaaggagtgtagcgagctacacgactgaacgaacttacattttgaaccaaaaacggagcaagccgaatgcaatcaaacttgtttgaattgttgaggcgcagcctgttttatcccaaatcggtcattaggatttctctgtgtcgtacggcaaagagaaatcctttaattttttccatatggacaagaatgattgtcgtgtttttagtgatctggccaaatatagaatatgcttgtcttttgttctccccaagtaggctggcgttgatagcaattcgtaccgaattgtcttcagaaatttcttcttgttggaattaatc

SEQ ID NO: 106 - DNA, 1973 bp, Prevotella timonensis
  source 1..1973: mol_type = genomic DNA
tttccatacacatgcaccggatcactatgccccagtttcctgcctgctcggcatgtctgcctcccagtcaagcgcccttatgccattgcactctaaaaggtcggttaccaatcgacctgagggcacctttggaagcctccgttacgcttttggaggcgaccaccccagtcaaactacccaccaagcagtgtccgcacttcaagcgcgttagacctcagacagccaaagggccgtatttcaacgatggctccaaaagcgctggcgcgcctccttctaagcctccggcctatcctacacatcggatgaccaaggtcaatgctaagctatagtaaaggttcacggggtcttttcgtcccatcgcgggtaatcggcatcttcaccgatactacaatttcactgagatcatgattgagacagtgtccagatcattacaccattcgtgcaggtcggaacttacccgacaaggaatttcgctaccttaggaccgttatagttacggccgccgtttactggggcttcaattcaaagcttctacttgcgtataacctctcctcttaaccttccagcaccgggcaggtgtcagactgtatacttcatctttcgagttagcacagccctgtgtttttggtaaacagttgcctggacctattctctgcgcctcgtaagtaaacgaggaccccttttcccgaagttacggggttaatttgcctagttccttaaccatgaatctctcaacgcctgagtatattcaacccgactacgtgtgtccgtttgcggtacgggtgctgcatgactgaagcttagcggattttcttggaagcaggattacccacactattggctttccccgaagggaatgccatactttcaaaactcagctctcatggcggatttgcctaccatgatcaatgcctaatttcttcaacgagctattccgtcagctcgcggtggtgtcacttctccgtctccacaatcgcatcatgcagcagtcacggaatattaaccgtgtctgccatcgccctcgcctgtcggctgagacttaggacccgactaaccccgggatgattggcattgcccgggaaaccttagtcttgcggcggaagggaatcttacccttcttatcgttacttatacctacatttgcttttctatacactccaggaaaagttaccttaaccattcaacgtatatagaatgctcccctaccgatacttttatcattactatcccgcgccttcggtatctgtcttatacccgattattatccatgcccagaccctcgactagtgagctgttacgcactctttgaatgaatggctgcttccaagccaacatcctagctgtcacggggaccggacttcgttagactaacttagacagaattcagggaccttagacggcggtctggattcttctcctctcggggacggaccttagcacccgcccccttactgcactactgctatacataagcattcggagttcgtcaggtcgcgataggcggtgaagccctcttgacctatcggtcgctctacctcttatgtaaatcatagcacgcggcacctaaatgcctttcggggagtacgagctatctccaagtttgattggcctttcactcctacacacacctcatccagaagcttttcaacgcttattggtgcggtcctccatctcgtgttaccgagacttcaacctggacatgtgtagatcacttggtttcgcgtctacctccaccgactaaaacgccctgttcaggctcgctttcactacggttgacggatatcaatatccttaaccttgccggtgacggtaactcgtaggttcattatgcaaaaggcacgccgtcactgcataaagcagctccgaccgcttgtaggcgtatggtttcaggatctattgcactcctctcatcgaggttcttttcacctttccctcacggtactggttcactatcggtctcatgggagtattta

SEQ ID NO: 107 - DNA, 1802 bp, Prevotella timonensis
  source 1..1802: mol_type = genomic DNA
tttatgtaaatcatagcacgcggcacctaaatgcctttcggggagtacgagctatctccaagtttgattggcctttcactcctacacacacctcatccagaagcttttcaacgcttattggtgcggtcctccatctcgtgttaccgagacttcaacctggacatgtgtagatcacttggtttcgcgtctacctccaccgactaaaacgccctgttcaggctcgctttcactacggtttacggatatcaatatccttaaccttgccggtgacggtaactcgtaggttcattatgcaaaaggcacgccgtcactgcataaagcagctccgaccgcttgtaggcgtatggtttcaggatctattgcactcctctcatcgaggttcttttcacctttccctcacggtactggttcactatcggtctcatgggagtatttagccttaccggatgggcccggctgattcgcgcagaatttctcgtgctccgcgttactcaggataacactatgtcttctcttgcttcatataaggggctttcacccgctatggctgaacgttccagttcattctattcacaatcaaagtacaatattatgctcctactaccccacgattgcattgctacaaccgtggtttgggcttctccccgttcgctcgccactactaagggaatcatttaattattttcttctcctggaggtactaagatgtttcagttccctccgtttgccttactgattaacagtaataactatctgatgatagttgggttgtcccattcggaaatccttggatcaaaggttatttgcacctacccaaggcttaacgcagcttatcacgtccttcatcgcctccatgagcctaggcatccgccatacgcccttatttactttctttcgccacgatcatacgtcttcacacagatgtaaacatcgatggaaaaatcgtatgattggttgctcatactttcagctgtattgtttggttgataggcatcttaatcattaaaatgctttatcaaggttcatttgaacttttattttactctacagttttgcttgtgtcaatatgtcaaagatcgaacgtctaataattcataattcttaattcatcattcatactttagtcggtatgaaataaatttacgtgtttatgaatttaagactgaagtggagaataacggattcgaaccgttgaccccctgcttgcaaagcaggtgctctagccagctgagctaatcccccaggtttaattcataattattaattcataattcataataaatcaataattgattgaattattttttttagaggtaaaagttaattcatttcacatcattcatatcgtatcatcatatcgcttcattcttattaacttaagtatgaattatgaattcttaattatgaattcttaagcgtgacttcttaagtatgaattatgaattgagaattatgaattaaagattgtagtcccaggcagacttgaactgccgacctccacattatcagtgtggcgctctaaccaactgagctataggacttcaatgctccggtctgtcgtatcaagtcgcagggctgcaaactctattgcccggcttcctttttctcttttgtatcttaaaaaacagaggtggtgtacaaaaagcactattgacatgcaatagcagggtcgtcttacaaaaccttgataagaaatatcgtcttataaatcctttgtgtaattcttgtatcattcttcaaccygtrrgttgwtttmatkatgamttmaaaawtattaattatgaattatgaattcttaatta

SEQ ID NO: 108 - DNA, 2779 bp, Prevotella timonensis
  source 1..2779: mol_type = genomic DNA
cgcctgggcgtggaatattaccttgctcatttactaaatcttttgagaatagcttgcatatatcaaggatttttacgaaatttgtatataagttgtgcatactgattttataacttaatgtattgagcaacactaagttacaaataaattcttgtatgtacaacttttctttcatataaatttatctattattttaattccgccaacgggtgtgaataatttactggttgacaaccgctatggaatccgtcaacccagtaagaatggagctgatatcgaaaagagtgtgctttctcccaattatttctttgcatccacaaatacaggagtgaagcaacaaggtaaagacttcaagatgattgtttgggatgacaacaatctcaccagtcatgctccagaggatttatctaaattatttattaagtttgctcaaaacgataagatgaatatcaactgtgagagcgatgaccctgtcaatggggctcccttgaaatggaacccagcatgggactttcatcttcagcttggcgtaccccaactcactggtgcactttcggaagtgaagcctaattttcccagcggattggctttctttggcatgaagagggttaaatgggtgagcaatactgatgaccaaaactattatttctcttcatccgtggccagtaacttctttggagcatttggaacaaaataaacatcaatcaacatgaaaatgaacaagtttttcaaacagatactatttgttgtcaccttacttttttctttcatttcctctcaggcgcaaacccctgctgattggaaacaaatgaaagctgatgtcaacctgtattgggtgaacgatatgggacgtaatggttattacgaccagaaaaccatagcccagttgatgggtaccatggcggagactgttggacccgaggcagtgattgctgtaggtgatattcatcatttcaacggcgtgcaaagcgttaccgatcctttgtggatgacaaattatgagctaatctattctcatccagagctgatgtgtttttggtatcctgttttgggtaatcacgaatatcgtggcaatacccaagctgtactcgattatgctcatgtgagccgtcgatgggcaatgccagctcgatactataccaaagtattcgaaggtgatggctgtacggtgcgaatcgtttttctcgacactactccccttatcagtaaatatagaaagaataccgaaacttatcctgatgctcatttacaaaaccttgaacaagagctggcatggttggacagtaccttgactgctgcacacgaagattgggtgatctgtgtgggacatcatcccatctatgcacagacttccaagtcggacaaagaacgtgccgacatgcagaaatatcttttgcccgtgcttcagcgacattccaatgtggctgtatatggctgtggtcatatacacaactttcaatatatcaagaaaaaaagtgacaagattaactattgggtcaactctgcagcagctctctcacgtcctgtacagccaacagatggcacacgttggtgcgatgggtccacagggtttactgtgattagtgccaacaaacagcaactcaccctctatgccatcaacaaagaaggtaagatactctacaccctgccagtgaaaaagtagccacaacactctaaagcaaactacggagcagcaatgttttcgaatccacagcgctcgccttttgtatcaagtcatggtgtaattgcatggactcctttataatccagttggtggaggataagacgtgcaatgcgtaaaattgttcgagatatgtcaaccatatttgcccagtagctctcattattgagcgaagctcttcgcacgagctcttatagtgaatattttttacaaaatattaatttagatgaataatgacaattatttatcaataatttgtttctgtattcgtaattgtaacaaatttttcgtaccttgcggattgtaacaaaaacattattaatatgaaatcgaaattaaagctattcacacttttccttttttcgctgtttctaacaacagggtttgtcgcatgtagcgacgatacagaccccacagaccaaaccatttttgtagactcctataagggtaagattacttatgttaacattggatcgggtaaaaaagtcagtgcagacgacggtaaggttatcgttagcaagttgggtgacacctattcgttcagatttgacaatagtatccctgatttgacaggcatcaagtttgagaaaaaagatgacaatacatttgttagtcttggctcagatggtctaaaaggtataaagattactgcttccgagcttcacatcttaatggtaaaaggtggtgaaacttggacagccgactgtaagagatagaccttttgaacgtagtcacatgactacatatttataaggtcgaacttataaactgacctcagtgatataagaaatactgacaaacgatatgaagaggggtgacaattcttaagtgaatgtgcacttcttttttttgatacttagatgaacaagtgttgaaaaatggggtcagtcgtaaaacccagttgcatccctcctctcttcatgcacataatttcataagtatttgttatctttgcatcatgaagaccgagcaattgttgcgttgtatctttccagagatactcgcagattattttgatgtgatagatatccaagagaacatttcccagatagacttctggttggatgagcgtaactttatggaaaaagcagaccgcaa

SEQ ID NO: 109 - DNA, 2991 bp, Prevotella timonensis
  source 1..2991: mol_type = genomic DNA
gaacacggcaagtaccagctgaaagcctattggcggaaaacttttcatgaccctccgaaatcaaagattgcggtttcctgaaaactttgccaccaatttcttgcctttcattccctttgatgccgacgatcttaccatgcacataaaaggttcgagatgacggttacaccggaataataaaaaaaaagttcgggtcgaagaaacgaaaaatccttaaaggttgagaatcgggatgcccagaataataataaacttcaaaatacaaggttatgaaaaaaaatgatgccgcacaaaaattgttagcaatatacaatagctacgagtgtagaaaaatcaaactggcgaccatgcttaaaaaaatgtacagggacggtgacttgtggagagtttatggatttgcacatgattacactatttgaataataaataactgattaaattttacagatatggcaaactgggcaagtacaagctatcgtatcgagggtagtaaagaagatttggaaaaggtttacaacgtgatagatgaatttatgtcagaacggagaaaaccagtacaagcagacgcatcaaacgaatgggaaggaaatatcataagggctttaggagctacagatgagcaaatgaagaataattatctccgaggtttcatcgaagaatatgaaatggatggagatattatccgcatagaggctgaagaagcatggggtacaactgactttcgccatgtattggcacagcttatgcccgaactgactatttattatatagtggaagaacctggctgtgaagtctatgcaaccaacgatgcagacggcaaatattttcccgaaaggttctatgtagacgcttatgtaaacggagattatcaaagtgaatactttgacactgaagaacaagcaatgacttatgttgctaacctactcggtaaaaaggaagtaagcaaaaacgagttagagaattggaacgaataccatgaggaagacaacaattttatctatattcatgaatttgaaattgttgaatgctaaaggaaacggagggactaaccatccctccacaaaaaatattttaacatgaaatcaatcaatgaaattgcaagcgagaatggtttacaggtaatcgacacgactacaggtttgaacggctatccacaatcgttgaaaaaagctattattggctttgaagattttgagcaagcagaaaagctggctgaagagtatcatcttgatattgaaatattcacaaagcgtgacggttggcagctttggagcagaggaaacaatcatgcatacgaagccttcgaacgttctgcaagcgattatggtgagaactatcttcagtttgaagcgaacatgagtcaagatgactttttgcaacaagtaggtgctgcaagttttattgcagagctggcaaacgaagaagacgggcttgataaaatagaagaatacatcaaaggtttaagagagttatacactgaaatagaaatagccgatgacgatgaaatcgttattgcagacggtgatgtgtacgttgaaactatcaaagaaaaaacaatgcaatatagttacgacacaaaaaactatgtgattggtcttattaacaataacgaagattaaaggaacaacgatacccgcctactcggcgggtatcgatttgaaaaacagttgcagtgtaagcatgtctttgcgcatgccgaaagaaaaaccgaagattacatacagcatttgccgtgtgctgctctcacagttcgcagcacactccattattacctccccctattatccacgctttgttctgaaatagcaagttattactaagactatcattcctttcacccagcgcaaaaacatgctaacgcaagtttttgttacaacttctttccctttcggcttgttcctcacgcctgctccgccagagttccatcacgctgcagccatcttctcctttgtcctgttcctttttcaatccactgcgacagcggcgaagatggcagactgcttaatggaacactggctacgcaaaaacccttaaaacagtttctgctgttttaatcccatgaaagacactgtttctgacctttcaggatcgccaacagagtctttcatgggacttcgggagaggtgaaggaagattatttttgattaaaatcagttttatgtaatcagtcttgaccttacgataagaacctttggcgtgatatggtgcatcccgtcctttgtcaaaatatggcttagatatttttccgaacatccaaggtctttctcagagaactttctaaagaccgctgctacactaccaaagtagtaattcctacgtccttgaatgaaatgcacgtgaatcactttccttaattgtttatccataaaacatctaaaaatagaaaattaaaaatttcccttttcatcccaaagattaaaaccaacatcgtctctttgctgatatatgtctgtcgttacctcaatttcaatacctgtcccagtccaatttacagagacaactttggtattgtattcattggaaagcaaaccctccaatgggacttcaagtcctcgatacctacctgtgctgcttccttcgaatacaacatctttttcgtctgcctttatatatcccttatctacaaaactttgaatagataaggtgtccccaggagacggaatgcaggaaaacggccaggtacctgaccaattataaacatttcctgcccaacaaaataaaatacgcactttcatatatttcttttagggacaaaattagcaatttttattgatataacttctaaatactaaatatttagaagtttttagcattttctattttgtcgtaaaacaatcaggagtctactattattattctcctgaacctcatagtaattctattttattttccactatctaattatccatttccgtttctgccttcgacctcactttccatcacctttgtagtcatcatcgacttttatagtgcaaaggtatcgtaggcagg

SEQ ID NO: 110 - DNA, 426892 bp, Prevotella timonensis
  source 1..426892: mol_type = genomic DNA
ggacacgtgcggctttcggtgttatcttgattcaaaccaagggagcacaccccgcagaacgcacaactgtgacgtataacaacaacttctcttgggatcaagcaacctatttgccagatttcgttgacgtaccaacaagattgagagcggcattagaaggcatggctaataataataaatacgaagtagaggctttcggaatgtattttgataaattgttaccttatgcagaaaaatggaaacaacagaataaaggaaggcttgactaccaagagatgagaaaatatgtggatgataataatgttggagattacttaatgatgggcaatactccatattactacgctaattgggacatcaacaaaatctattttaccaaagcagcaccttctcaaagccatcaactatcggtacaaggttcttcgagtaaaactaattattatttatctttagcttatgatagaaaagaaggactcttaaaattgcatccagataaattagatagatataatgcttctgtgaatgtaacgagttctgtaacagattggttacaagttggagcccgcatcaactttactcgtaaacaatataagcatcctgatacatggaataaaacctatcaatatttgtggcgttgggacgcatcattcttaccttctggaagtattaatggtttggatcaccgtaccatggctattttaaaacaggcttcagatgagcgtgtaacaaccgatttttcacgcttaaatgcttttcttagagcaaatttaacaaaagagatgtcattttatgctgattttacatatgccattcaaaacatgaatagtgcttccgaagatttttctgtatatggtattaattggggtggaattaagcctggttatatagtttcaccaagtcaaactggtgtttggcgtgacaactcaaagagcaatacttggaccctcaatgcttatatggactatgataagagttggggaaatcatcatttcaaagccatggcaggtgtgaatgccgagaagtccgattatatttacctgtatggaaagcgtagtggtttgttcgatgaggggatgcctgagttgaatttggcttcacaagaaggacaagacattaagtgggcgcactcggaaatggcttcggcaggttattttggacgattgaactacgattacaagggcatttatctcttagaactgaatggtcgttatgacggttcttcacgtttcccacacaatgctcattgggctttctttccatcggcttcggctggttatcgcttctccgaagaggcttattttgagcctttgaagaaggtagtaagcaatggtaagttgcgtgcgtcgtttggtgaaattggtaatgaagccattggtgattacatgtttgaagaactcatcaatcaaacgaattcacgttatgtgtattgggtaggaaataatattgctaatgccaataaactaaccatgttcaacatgccaaaattagttgctaattcattgacatgggagcgcattcgcactattgacttaggtttggatttaggcttcttcaataacgaattgatgatgggctttgactggttccaacgtgaaaatagagatatgttagctccatcgcaagtcttgcctgacgtattaggtaccgctgcaccttatcaaaatgcaggaacgctgcgcacacgtggttgggaatttaatatcaactggaaccacaccttcggagaggtgaatgtatatgctaactttaacttgagtgattccaagactacggtacaagagtggcgcaatgatgcgaaactgttgaataccaattactcgggtaaggtttatggtgatatttggggattcgagacggatagatattttgaagaatcagatttcacaggtcaaaataccgatggtacatggaactatgcacaaggcatcgcctcgcaaaaaggtttggagcaggggtctttccattatggtcctggcgatatcaaatataaagacttagatggtagcggtgttatcgatggtggtaaaggcactgccgatgatcatggcgacctgaaagtgataggaaatatcttgcctcgttacgaatatagtttccatttaggtggtagctggaagggattcgatttggatttgttcttccagggtgttggcaagcgtgatgcttggactatctcttcgctaaatttccctttgatgagaggtgcagatcttgcagtatattcacatcaaaatagctataatagagttctttattcttcagactggaaaacaattaagggatatgaaattaatcaagccaatcgttatcctcgactgtttcctgacaatgatgtagcagggactgtgtcaggaattaataatggtagaaacaactattatccacagtcacgctatttgataaatatgtcgtatctacgattgaagaatatcacttttggatatacactccctacagccttgacacaaaaggcatatatccagagagcacgtatttacttcagtggtaacaacttattcttgttacacaaaggacacgatttgcctgtagacccagaagtgaacacgggtgaaggtgaactttacggtggttggggacgtacagcgcccattacgcgtacgttctctttcggtgttcaagtaaccttataatttaattcctaaaaattaacaatcatgaaaaagagcattattttaggtattggtttgatagcggcgatgtcaagttgtaatgatttcttagacatcagccctgacgacacctttatcaataccccatcatattggagtaattcctgcaacttagacaaccagtgtaaccacttcctgaataactatgtaggttatggcaatgctggcggtggtggatggttctattttaagaccttgagtgatgaccaagtgagctatcaagataacctgtggtcatacaccaacgtggtttctgcctcaagtaactggtcaaatccattaacagaaatacgacgcgccagctatattattcagggtttgaaatcctctacgttgtcagaaacggtgaaggcaagttatgaaggcatcgcccgtttgaatcgtgcctggcagtattaccagttcgtgagagaatatggagatgtgccatgggtaggtcatgtggtgtcaactgacgataatgacgtgttgtatggtccgagagtagatcgcgatattgtcatggatagcgtgttaaacgatttagattttgcagccaaacacattcagggaagcaacaaacaacgttttacagccgatatggcattggcaatgaaagcagatgttactttgtttgaaggaacctattgtaaataccgtactgctggagaaaatgctggcaaaggtccggatgtggcacgtgcccaaaagtatttgaatgagtgtgtatcggcatgtgaggcattgatgaagaagggatacaagctcaatgattcttatcagggtatttataattcgatagatttgagtaaaaatcctgaaatcatcttttacaagccttattctcagaacgttttaatgcactcaacagtcgattatactttgaataccagtggtacaaacggtatgacaaaggacgcttttgatgcttatttgttcttggatggaaagccaaaggcaaccacgacattgaacaataccgatgcagtacaggaagatgcgaatggtgtttttaacatcaattctttgctcgcagtgcgcgataagcgtctggctgtaactatagatactgttttggtgtttaagggaaagccttattcgcgtgctggttcgaatgaatttacctcgaccacagggtatggtgtagccaaatatgataaccctaaggaaatgactaccactgaccgaaacaacataggtaagcaatataccgattgtcctatctattggttgtcagtgatttacttgaattatgcggaagcaaaagctgagttaggcaatctaacccaagcagatttggataagagtgtgaaccttttacagaagcgtgcaggcttgccaaatatgacaacaacgccagaggctgaccccgctaacaacatgaatgttagcaacttgttgtgggaaatccgacgagtacgccgttgcgagttgatgtttgacaactggtatcgctattgggacttgatacgttggcatcaacttgatttgttagattcacaaaaacatcccaacatctatcttggcgctaacttaaagtatttgaagaatcctgaagttgatgtgaatgctgaaggatatatgattggttcgaataccttgaagcaggttcgcacctttgacaagaagcattatttctatcctgttccgacaggacagataacgcttaacaaggaattaaagcaaaatccaggttggtaatctccttgaaacgattacgctgagtagaagcggaacgtcaaatcacacagattctttcatcagtaggagtctgtgtgattttcttttgtgccagtagttaggtcgcttttcattgtagaccagattcttcacctcatcgacaggcagttgatggtggaggcattcaagttatttgtatcatttcttttgggaggatacagaaaaagattacctttgcaatggaaaatcaagaaagatatgatttatagtattgaagaggtgataacgcaaataggggcacagcgttatggttctaatagtgctcaaataggtttcttattgacagacagtcgttcactgtgtttcccagaagagacgctgttctttgctttgaagacagacagaaacgatggacatcattatataccagaactctatcgacgaggcgttagaaactttgtggtatcatccgtacccgtagattatgaacatctgtatcctgaagccaactttctaagggtgctaaatccttgcaaggctttacaaagattggcaaaatgtcatcgtgaagagtttcatattcccattgtaggtattacaggctcgaatggcaagaccatggtgaaggagtggttgtatcaattactttctccgcagtttttcgttactcgttcgcctcggagttataattcgcaggtaggtgtcgcactgtctgtgtggttgctgaatgaggagacacaggttggaatctttgaagcagggattagtgagccaggagaaatgacggcattgcagcacatgattcagcctaccattgctgtgttgacaaacattggcgatgcacatcaagaaaattttgcgtccatggaagataaatgcagggagaaaatgattctcttaaaggatgcagaaattttggtttatcctgctgatgaccctattattcaaaaggttgtcaacgattctgatttacgaggaaagaagttggcatggtcgatgagcgataaaagtgcgcctttctacatcaagacagtggaaaagaaagcaacgatgacaaccatcacttatgtgtatcatgaacacgaggattggttttcaataccgttcattgatgaggcttcagtagcggatgccatcgaatgtgccgtggttgcattagaaatggggatgtccatgagtgccttggatgaacgaatgcaacagttggagccagtcgccatgcgacttgaagtaaaggaaggacagcacggatgtacgttgataaacgactcctataattcggatatcaactctttggacattgctttggactttatgaaccgtcgtccagaccagcaaaaccgcagcaggacattaattattagcgacattgaccagagtggacgtcaaccatcggagttatataaagaggtgtccaacttggctgtcaagcggggcgtgtcccaattgattggtattggacagcagctttctgctaatcggaatttgattgaaatgccaaagaaattcttcttccctacggtagaagcttttgaaaagagcgaagtatttgcgcaactccatgacgaagtaatcttattaaaaggggcacgtcgattcaattttgaccaactaaccgagagattggagcggaaggttcatgaaactatcttggaagtaaatctgaatgccattgtggacaatctgaattattatcgctctttgctcaagcatggaacaaaattggtgtgtatgattaaggcagatgcctacggagctggtgctgtggaagtagcgaagaccttgcaagaccatcgtgtagactatttggcggtggcagtagccgatgagggtgtaacactccgcaagaatggaatcactgccaacatcatggtgatgaatcccgagatgagttctttcaagatgcttttcgattatgacttagagccagaagtgtattcttttagattattggatgccctcgtaaaagctgctgagaaagaaggcattacagactatcctgtgcatatcaagttggatacgggtatgcatcgtttgggatttgaccctcaaaaagacatgcagacattgatttctcggttgaaacgacaaaatgcaatcattccacgttctgtcttttcacattttgtggggtcggatagtgatgactttgattcgttctccgcacaacaatttgctttgtttgatgaaggtagcaagcttttgcaagctgcattcacccataaaattattcgtcatatggataattctgcgggaattgaacacttcccagaacgccaattagatatgtgtagattgggtttgggattgtatggtatcaacccaagaaccaaccaagtgattcatcaagtgagtactttaaggacgaccatccttcaaaaacgtgaagtgaaagcaggcgatacggtgggctatagtcgaaagggaacgataacgcatgatagtgttattgctgccattcccataggttatgcggatggactgaatcgtagattaggaaatcggcatggctattgtttggtcaatgggcagcgtgctccctatgtgggcaatatttgtatggatgtagcattgattgatgtgacgggtattgattgtaaagaaggagacagagttgagatatttggtgaacatctgcccgtcacagtgttgtcagacattcttgagaccattccttatgaggttcttacgagcgttagtaatcgcgtgaaacgagtgtattatcacgactgatctggcatcacttggtgacatttgttcgagaatacattgtgcgcaaaaatggtgagaagcatcttgaaggcattcagtcacaaggatgcttctcatttcattttacactttgcggaatatgttttgagactttgccatgttgcggtagatagacaagccatttaacaatccaagggaatcgcatttgtggacttatttcacaactaacttccagtctttgctctttttcttaacaccattctgacatacgactcttctgccatataggaagaacgtaccaatggcgcactttctacgttggcaaaccccatctcgagtgcttttgctttgtataaagagaagatgtcaggatgaacatattcctgtacatccaattgcttggaagacggttgaaggtactgcccaatggtgagcatacggcatccagcaaggtaagcttcgtggatagtcgttaacacttcgtcctgcttttcgcctaatcccaccatgatacccgtctttgtcattacgcctgttgcagcgatttctttcagcacttccatactgttttggtaagtggctctgctccgtaccgagggagttagtcgctcaacggtctcaagattatgtgcaacaatatcgggctttgcagccaacaccttttgtaacagttctcctcggtaatcgggtatcaatacttcgataatggtgtaagggcacagatttcttgtttcgcttatggtctttgcccattgtgcagcgcctttgtcgggaaggtcatcacgatccaccgatgtgataacggcatgtttcaaattcattgccttaacggctcttgctatttttatgggttcttgctcatctggaggtaatgggtgtcccgtctgtgtagcacaaaatcggcatgcgcgagtgcaacgatcgcctaaaatcatgaaggtagccgtcccgttcttccagcaatgtcctttgtttgggcattgtccactggtacaaatggtatgtaatcctccttgctctatcgttgattcaaccaaaccatacctttcgccaccttctatttttgtataaagccagcgtggttttcgtagttttggtttgttatgaacatcagtcattggttagttatctttcaagttgttaaaatggttaatagggcaaatttacataaaaacttgtgattatagagccttctttcgagttttttttatcaataagatgaaacaacagcatgcgtatctgagagtagtgttcatgatagtctcattccttttgcgtaatcttgaggaggaatagggttcgaaaagtgtgtatcctgaagtataaaaaaataaccactcgggctttttgcaatggtatggaaatcgattttttgtacaaagcttcccatgatgggaaatcgattgttgcaaaaaccacgagtggttatttttacggtatgtgaaggttgaattgcaagtcgttaaacatttcaattaaatgtccattcgtacgaacacttcaacctttggattccgtgtatgataccaatgcttatagagagatgcaaagctctactctacgtgcataagttttcatttccgactttttatcaatgccgtatgaaagtgcagaaatttggtttgcatttacgccatgattgactaaatacgcccttacactattcattctctgcatagccaaatctttattaaaagcttttggtccatctttgctggagaatcccgttaactctacttttaaatttcgattgtttttcagtacatctactaccgcatcgagtgtatgctcggcttctttagataattgattagacgaaatttcaaagaaaacctgtcttaaattagtgtcaaaaggtgtcaccttaacaggatgagcgggttcaacaagcgccttttcttgacagcattgttctgttggattattaacaggtgctctcatgatgagcgtatccttcttggcacgtagcgcattttgctgctttgccatggattcaacttgctgtctaagtgttggatctttcaccgtttgacttaagacttcaatttgtttttgcagttggtcaatctgttcttgcaattgttgagcatcttgagaatctgtagcatccaaggaattaggctgcaagttctgtattggtaaataaggttgataaccctgtatctttccaacttgaggctcgtacaatggaatgtattcaacacgtctggaagaggaattatacacaggtatcgtttgtcctgggcttatccgatgataattttgttctcttttctgctgacgcatattcctcattgacctgtttttttttcttttttcactggtagatactcttcttagcacgtccatcaattcatctctattgacgatgatggtgtcatctgcaacaggtgcaacacttaccacaggtgtcgcatctgcatacgtgatagggagtgcaagaagagcaagtgctaccagacaattttttttcagcatgtgtttcaatttagaatgtgaatgaataacccacagctaactgattctgcttcgttaagctacgtgcagaataatcaaagaatactttcccacctaacatttctgtgcttacaccaaagagcaagttagagccaaagtgtgtatccttgccgtggaagatgccaagaccaaagcctgcataaggttcaaacttacctaacgaggcaatcttgaaattatagatgatatttgcagaaatacccattccactgttgtccgccatggctgcatagagttctggtacaaagtcgaggtttgttgatgcaacttgcatataaccgcgcacgccaatattccaagaagtcaagtcaccaaagcctaaccctgtgaagattccaatgcgattaagcttcaaacctttgctgttggttgcctgataagcaccagaattatagactgttgcaggtgccaactcattggcaacaacgccgctaccgtcagtaacgatggtggttcctacagcattatttctttggctaatcaccttatttaatttctcgttcatgatacggagctctcttctgagctgttcagtttcattattctgaacgggtgccattctttgcagaggagctactggtcggtaagattcctgtggttgtgcattatttacgtcatagtcgtaatcatattcataatcataattatgtgcatcatttctggcttctcttgcaatacggttaaccaattcgctgagctgactacgtgtcatcttcacattgttacccttgctttcgccaagttcgttcactaatttccgtttgatagccatttcgtcattttcaatgttttcaagttcttgctggtgacgagtcttcaggcgtgcgatttcagttacccgaatggtatcgttagcttttaatgcgttttctaagtctttgtccaatttgttaatgcgcttctcatagtcagccttgagcttatttacgcgctcatcgtactgagccatttgctggtcatagttcaatatcttttcgttgtaatcttctatctgactattgtattcgtcaatttgtttatcatagcgtgatctcaaatcgttcagttcttcgttagaagcttcgcgctgcgcatctaagcgacgatttacgtatttattatatttcttttcgccatcggcagccaatccgaggttgattctcaaacctgcattgtatagcatgctggtgttgatatggtcagggctttgaatattctcttctttgactcccttttcagatgtgaacacagcattggcagtaccaaagagtgcaacgtacttgctgattggaatttcaataccagctcctccaaatacaaatggagagctttcggctgtggtgttgcctttctcatcggcatatttgtccccaaccttcatataacctccacctaactgtaagtaggggttaatgcctcttgggaagttaaggcgagtgatgatgtttccaccatacaatgctaagtttttggtgaaagagagtgaaagtttgtcagtctctttgttggcttgataatagaatccacggatacctaccaatgaagacaagtcaaaacctgcgctaccacccataagataagtgtcagtcatgggcatatctttgtcaaaatcaagataagctactgcaggttcaaccacaaacttcagtcctttgaaaccatctgagaacatgttgcgatactctctactgatggcatcattggaatcatcaacttttccacccaaatagaaatcgagtgtagcacctgctgtccaattatataggtggttgccaccgttagatttatcatactctggtctcatcaagtagctacctttgctggcattgaacatggtgttctttgcttcaatagagagagctgcacgagggctgaggttaaacttggcaccaacaccgagcgaagcaaagagctgctcgtctttcatggagacatctgtcatcactgcatcaccagcataggtgttgtacttcatttgctgaactccaccacctgctgtaagatatggtgcaaaatagctatttttccagagattcaatttgatttcacctccgtacttgattaaatccaccttggtatctctgatgtttttcgcccatccttcgtctgtaagccaattttgtctacgtacttggccattggcgtcattaccacgcagatagaatgcgcgcaattcaaaaagtggtccgaagccgaagccaagtttaccaccatacagaggcatgttgtcaatagaaaggtccttgtcccaccagatgtactctgcagcgggagatacgataaacgacacgtcattcacttgtgccgttgacttgagacttcccagtagtaaaatgcctactaaggaaaagattctcgtcatactttttttcattactgaaagttttatgttaataattaaaaaagaatttatgtaataatactttggtcatcgtgacaatgcacgacttttatttacttgttttgtagacgttatgtcgttaaaaccaaagttgtacattgaaattcaccttataaattctttacaaaggtaagaaaattttggaaactttacaagcgttttatctatattttttttacaaatgttagaaattgtatgattttgaaacaaaatcttcattacttttcctttgttctccttaaaatcatgtagttacacatgttttacttcaataatggttttctatcaccgtctgtattgggttgaatgactcaaagcgtatgcacaataatgatgttgtttgaggcaggttagatgttcttcctacaataggaggttttacctttttggggtgatattacaaacacattaaaatcttattatattttttgccttaaaaagttgtaagtatgcaaaaatatgtttatatttgaaacaaatttacggctgtgttataataacagccctccataggtactaccgttagctcaatataggctctctggcgacggtaagtcggtttgataaatagagccttaagtttaatttgtttaactttaattctatatgttaaaggttatcaattgttcagcatccgttctgttgattgcagtgcttgcggcgttaaatttgcctatccatgcttctaatgagagattcgtggaggcagttgccgtagcccagcagaatggaacatgttctggtgttgtcaaggacaatacgggagaagtgatagttggtgcatcggtcagggtaaagaactcatcattgggcgcaattaccgaccttgatggcaggtttacgttacccaatgttggcaagggtaccgtggtcgtagtaacatacttaggttacaaaccctacaaatttgtttacgacggtagtagaaaggtgattgagataacacttgtgaacgatgacaagacgctcaatgaggtggtgataacagcctatggcatgcctaaacaagccaaacaagtgggttacgctactacaaaggtgtccacagacgagattgagcgcatcaacgccgtgaacccagtgaatgcgttacaaggtaaggtggctggtgtgcagatcaacactgcaggcgcatcaggggtaacttcctcatcagccattactattcgtggtgcaaagtctattgacaaaaacaatgcgcctatttttgtgattgacggcatgattattcaagagccgttgactggaaacctaagcggtacagactgggggtcgcaactcaagaacctgaaccctgccgattatgagagtgttacggtgttgaaaggtgccgcagcaacagcactgtatggttccaggggtgccaatggtgctgtggtcatcgtgtcaaagggtggcaagtttggtaaacgtggtttaggtatagaggtgagtcagtcaattgagatgacagatatttataaatctcccatcgacctgcaagatgtatatggagctggaacaacattcaacggttatcagggtggattcttggcagatggctcattgcagcggacgcctaacagcttcggcccgaggatggatgggcaattgataaatcaatacatgcctgacggacaaaagaccccattctctccaaaacccaacaattggaaagatttgtacaaaaccgggttgaacaataataccaatgtggccatcagtggtggcggcgagaaatcatcgttccgcctgtcgtatggatttatgaagaacaatggtgtttttattcgcaacagcttcgaccgtcacaatgtgtccttcaagggaatgacagaattaaataaggtattctcgctcgaaatcggtttcaagtatgctttctctcgatcgctcaacggtggtagccaaggtggttgggactggggtaataacgtaggtatgatatctgcttataatctgccgcgtaatatggatatcgcccactatgccagcatgtaccgcgaccctgtgacccatgctgttgagtctacttccccgtggggaagtctgcgaggctacctacatacacgtgacacgagcgtaaggcagcggtcggagcagtctattctggccgatgttacgttgcgtgctaatattatgccatggcttaaagccagcctaaaagccaactacaattactatggtgtgaactatgaggagcgtcagtatggtacaggacctgactacggacccacaggggctggttactatgggcgaagcggaagcaccgaaggaagctataacttcttggctatgctcaattcgcctgataacaagtttaccattggtacagaagagctcaccttatctggtattgtagctgctgagctgtatggcaataccccacgcaacaattgggcgaagggtactaatggaggattggtcatcccaggcgtgtttgctttttctaattcaaccaacaagattgaacccacgttcgactatatgccagccaatcagcgtacgtttggtatctatggcattgtgaatcttggatggagagatcaagtcttccttgaactcactgcacgtaatgactggttgtctacacttacttacccaacctatattaccaatggaaaaaataactataccgtattttatccatctgccaacttgtcgtgggtgttctcagactcgtttagaaaagatctgccaaagtggtttactttcggaaaacttcgcgcatccatcgcacgtgtgggtatgggtacatcggcctatgccaccagtaatggatatggtgtatttgaccaaaggtctatttacaagcccgataagagtgggtcggttctgtccgcaaccccaaacttaggaactatgttcaacgataacttgaagcctgagattcagcagtccattgagttgggagcagatctcagattcttcgacgaacgtttaacgctcgactttgcttattacaagaccaatacctttaaccaaattatgcgtgtggggtcggttagcgaggcaggtgcaagcagccaactcattaatgcaggcaacattcaaaactcaggtgttgaaattcagatggacgtaacgcccatacgtaacaaagattggcgctggaccgttggtggaaactttaccctgaacagaggaaagattgtagagttagatgaacatgtgaaggagtggcaactcatgggcggttacgatgctgcaccagagatatgggcttatgaaggtggaaagtttggtgttctcacctcatatcttaattctccctatagtactcctgtcgcacattttgaaggtccgagcggtgacccacgcaatggcaagatgttgatacgctatgaccagcaatacgggaaaccacatagcgttgcaatgtattcgccagtgacactgtatgatcaaggaaagagagaacgctacatccttggaaaggtagagcccgatttcacactcagtctcaacacatcgttatcttggaagcagcttgacttgtacattcaaggcgatggtcgctttggtggtaactattactccaatctatggaagtataccgtaccaagaggaaacttgaaatcaacactcgttggacgtgacaaggaacatggtggaatcgcccgtatcaactacaagggcgagacagtgtacgatggtttgatgctcgatgcagtattcgaggaaggcgcaaaagcccctgtacaaaatgctgacggcacacctggagctttagtagacgttggcggcatgacttatgctgatgccattgcacaaaagaacattgtgccagtgatgacaggatcatggtatgcttggaactatggttggggtatgcctgcgtttccagaggccatacaggacaatacctggttctgtctgcgcgagataaccttaggttatcgcttgccagagaaaatatgcaagaagtttggagctaattatttaaggctcggatttacggctcgcaacgtatgctacctcattaataagctcacagatgggctgaaccctatgtctatttccagcaacaacccgttgcagcccatggacattggagcagtaccattctatcgtacctatgcgtttaatttaactgtaagattttaataattccgaatcctatgaaaaaatatatattgatagttgccaccttgttggctacctttggaataaccagttgcttagacgacttccaagacttgaatacagacaaagagaagttgcctactgcaaccccagccaacgcttttatgggagctacgctcaacttcaacaactgtagccgtgcacaccttttaggtaaatacagtggcacgatgacctatatgcaatatattgtttctgcaggtggaccatcggcaggaacgtacatctcgcttgataagactggtcgtacagaaccattcgccccagcatacaactactattatacggtgaacggtgataacttcggcggttttggcttgcgtttggattatctcattacgcaagttattccagttcaaaacgaaccagaacgcttcgctgatattggtgccatagctaagatgttgctctcttacgaacaatggttggttcttgacacgtatggtgcagcacctctcactgaaggtttgaaggcgcagaccgaacggctcactactcccaagtacgatttgtatcaaaaagcaattgacggtacaccgatgtacaagaagttagatgccatggtaaaggagtgtgtagctacgctcaaagcttcgaacgataagcaggtgcaattgaaggatgcagatttcttctatggaggcgacattgccaaatggattaagtttggtaacacgttgcgcgtgaagatggcacagcgattggagaaagcggacaaggcattctataatagtgtgattgacgaggtgttgacatcacccagcaatgttattggttcttacgacgagtcgtgtatttatcatcatcccaatgattacaacaataacactgatgatattcaagatatcaccagccgatatgtggcatcgcgcgcattcgttgcattccttgaaacgtatgacgacccgagattacctattttggttcgtcgcaacggctttggcactggtaacaacaacaaggaaaatgatgattggtttgacactttcaagaaggaatatcccaattacgagaaatcctacaaaggctttattgatagatatgtaggggcgtcagctaatccagacagtgctaccagtgagtattcgcggaatgcatatatgaccttaccttatcacaaaaaggatggtacagaagccaatttggaaataagaatgaactcacaagtggaaagccgtttcttcgttaagaacggtggtattcgaggcaacaacaacatgccagctcgtgccatcgaagacacagagtttatgattaatcaggacaagatgtcaacctttacaccgattattacttattctgaaacttgcctcatgttggcagagatagctttgaagaaaggtagcgcagttgcgggtaaggatgccaaagcttggtacagagaaggcgtgaaggcttctatggaacaattcagaacatgggctaccaatatgtgggtgacagcccaagtaaacgataaggcagccaattataaccctatcacggatgagaagattgcagcttatcttgaccgcccagagtttcagaatgtcacgttagagaagataatttctcagcaatgggtaaacctatttgtgcaaccagaagagatgtgggcaacttggaagcgaacaggctaccccaagtttaaggatcagccagtacccgaagatggagtggcattccttgaatcgattaagtctgcaggtaatgcattggtgattccacgcagaaactctctgccagttccaaacgatttgaatattgaaaactataatcaagctgtcagtgcattgaagagtgatgcaaaatatggtgcagatgtcgataagacagaaggtcgtatttggtgggatcaatgacagtgatcttcaagaatagtatgacttgctcataaaataaaaaggagttgaccgcaaataaggtcaactcctttttataacttgtatgttgtcaatagctggtcaacaggaaggagatgtatagatttcttccttgttcattttgggtgttagtatcgtaagtaaatgctggtgagagatgtttacaaaaatccctgctgtttcaaggtgtttaagaaattttccgacatagcctcgttgtctttttgcgtatagcgaaggtctgtgaatacttgagctaaagtctctttatgattcacttcacaaaagtgaatgttttcgggtaagttttctttctgtttgtaactctcgtcgattctttttggagtataatcttcaaaagtttcgtgatgaacaattgccgatagtggaagacggtcagaaacagctggcgtttcatcgggccaacctaaggtgatagtcgcaatgggcatcactaacttgggtaatttcaaaatgttgataatcttttcaggcgagtaaagtgttgtgcctaagtagcataatcccaacccttcctcttctgcaagttgacaaaaggtttggcagaacagcagcgtgtcggtcatggcattgagaaaactcaaaaagttgttataacctggttgtgctttcctacattctgcccattttgtggtccgcctaaagtctgcacaaaatgtcagcacaaccggagccgattctaccatgggttggtgaaagtggacgggtgagagtttccttttattctcattattgcgtgttactaccacagaataaagctgtaaatttcccatggtctgggtgtgtgtcgcttcggataacaagcggttgagtaagtcgttgtccacatctctgttttggtaaactcgaatactccttctggtgttgatggttttcatatttgattatttttatttctacaaagttataaagattttctaaaaagaaaactttgcgaacataaaaaacaatggctttttcttttaagactcatatttgaaccacggaacgcaataatagtacatcgaatataaagttgtggatacgcagtattcaataaaaatagatgctgaattttctttacaaagtgcctttcataactcgcgtatttacaactaacgtcacagttggtcgcaaatacgcgagttatgagtgatgttcgtaatttattgttattgaatatgttatgcttgttccttctctttttatcccaaattttaccatttttgggcgactaaagcattactctaagccccttatttgcatgctttaatgccgctgaagaatgtgaatagcacctctaaaagatgtttccaagggcgttaactcaatgttccagcttcaaaagacgtttcgtttgttcaaatcagcgtatttttgtctaccttttgcctattaaatttttctattttgaagatttctaatggccgttttttggtaaaataataggacaaaagcaactgctttctttatcaaaaatgcagtaggttaaatgatgcagctctttcatcaagaggatgtttttgttataacaagtgaaagaatatggttgacaatgattgcaagccttgcgatttgtttcattgagaatttggtttgttgtcgacacaaaataaaaaagattatttttcacaagcaaaaccattcgtatatgaaagtggtatctaaaaagcgttcgaaatactaaaaatgatttttttatatcgaaaataagttgtagttttgcactcataagatttcaaatatagcaattgtaagaacatcaaactaatacattctttttatcgtatagcaatggaacaagcgaaaacttactctttcgaagaagcataccaggaggctcttcaatatttttcgggtgacgaattagccgcaagagtttgggtgaacaaatatgccatgaaagatagttttgggcatatctatgagaaatcgcccaaggatatgcattggcgcattgccaacgagatagcacggattgaaaataaatataaaaatccgttgagtgcccaagaagtttttgagttgttagaccatttcaaatacatcattcctgcgggtagtccaatgacaggtattggtaacgaccatcaggtagccagtttgagcaactgctttgttattggtttagacggtgatgcagattcctatggcgctattatgcgcattgacgaggagcaagtacagctgatgaagcgaagaggtggagtggggcatgacttgagtcatattcgccccaaaggttcacctgttaataactctgcccttacctgtacgggactggttccttttatggagcgttacagtaattcaacgcgtgaggtagcgcaagacgggcgccgaggcgcactgatgctcagcgtgagtatcaagcatcctgatagtgaggctttcattgatgcaaagatgacggaagggaaggtgacaggtgccaacgtctctgtgaagatagatgatgagtttatgcaagccgctatagatgacaaaccctatgtgcaacagtttccagtagatagcgacgagccttccatgaaaaaagaaattgctgcaaagtcattgtgggaaaaaattgtgcacaatgcttggaagagtgcagaacctgaggtgttgttttgggatactattctacgtgaaagcattcccgactgctatgccgacttaggtttccgtacggtgagtaccaacccctgtggagagattcctttgtgtccatacgattcttgccgtttgctcagcatcaatctctattcttatgtggtaaatccatttacgagcgatgcgtattttgacatggagaagtttgctaagcatgtacaaatagctcaacgactgatggatgacattgtggatttagagttagagaagatagattgtatcttggaaaaaatcaagttggatccacagagcgaggaagtgaaagagacagaaagacacctttgggaaaaaataaaacgtaagagcggacaagggcgccgtacaggtgtaggcattactgccgaaggtgatatgcttgccgcaatgggcttgcgctatggcaccaaagaagcaacagaattctcggttaatattcataaaacattggcattgaatgcttatcgttcatctgtcaccatggctcaagaacgtggtgcgttcgaagtgtttgatgccatacgcgaggcgaacaatcctttcttacttcgtatcaaagaggctgaccctcagctttatgaagatttacaaaagtatggtcgtcgcaacattgcgtgccttaccattgcacccactgggacaacgtctttgatgacacaaactaccagtggcattgagcccgtgtttatgcccgtgtacaagcgtcgtcgtaaagttaatccgagtgataccgatgtgcatgtagattttgtggacgaggtaggagatagctttgaggaatatatcgtttatcacaagaaattcttggaatggatgaaagtcaatggtatcgataccaccaagcgatacactcaagaggaaatcgatcagttagttgaacagtcaccttattataaagcaactgccaacgacgtcgactggttggaaaaggtgaagatgcagggagctattcaaaaatgggtagaccatagcatcagtgtcaccgtgaacctgcctcatgatgtagacgaggcactggtgaaccgtctctatgtagaagcttggaagagcggatgcaaagggtgtaccatctatcgagatggttccagagcaggggtgatgatttctgtgtctaagaaagatacgaagaaagaacctgcagaacaagccaaagataatgacatggaggagcgtgtgaagatgccgtgccagcatcctgaggttacagaagttcgcccaaaggagttggaatgcgatgttgtacgtttccaaaacaataaagagaaatgggtggctttcgtcggattgttagatggttatccctatgaaatatttactggtttgcaagatgatgatgagggtatcgtgttgccaaagtcagtgactaagggtaaaataatcaaacagaagcaagaagatggtcccagtcgttacgacttccaatttaagaacaagcgtggctataagacaacggtcgaagggttgagtgagaaattcaatcccgagtattggaattacgctaaacttattagcggtgtgcttcgttaccgtatgcctatcgaccatgtgataaatttagtgggttccttacagttgaaagacgagagtattaacacgtggaaaaatggtgtggaacgcgccttgaaaaaatatgtagacgacggtaccgaggcaaaaggtcggaagtgtcctgtttgcggacatgagacgctgatttaccaagagggatgcctcatctgtaagaattgcggtgcaagtcgctgtggataaagaacctttatgaagatacaatcgagttatattttcttacgtaacctgcggtttcatgccttccacggcatgttaccgcaggaaagtgttacagggaacgactatttggtgaacgttcggattaaatttccgctctcggatgtttttcagaccgattgtattgccgataccattagctatgccgatgcttacgagtgcatccgtagggagatggagaaaccgtcgcaactattggaacatgtggcaggtaggatagggaggtgtttgataaatagctatcctgtgattgaggaagtagacatagaaatcatgaagatcaatcctcccatgggcgctgattgcgatggcgctggcgtagaattgcatctgacaaatggaaaaaactaaataaaatagcaacgttttcggtggaaaatgcttatatttgtcgcctatgaataagaagatccagttctgtttgttcacgatgatgatgtttgcagtgagttgtatggctgcaaacaaaaagtttacgctcgttattgaccccgggcatggagggaaagatcatggtgccatcggcgtttattcacgcgagaaggaccttactctaaagtttggattggcttttggtcagctggttgaacagcgatgccccgacgttaaagtcatctatacgcgcaaaacagatgtgtttatccctttagtaactcgtgcagagattgccaacaagaatcatgcagatttgtttatttcagttcatatcaatgccttggctggtggacgtaaagtgaggggagtgcaaacatatacattaggacaaggtcaaaatactggtaggaaaggtattataaagaacttagaagtggcaaagcgagaaaactcggtcatcctacttgaagagaattaccaacaaacctaccaaggtttcgatccaacttcgccagagagtaacatcatgtttgagtttattcaagatgtgaatatgcaaaagagtgtggaacttgccaaatatatgcagcaacatatttgtgaggctactggtttgaaggatatgggtgctcatcaaaacaatttggcggtgttacgtctttcgtccatgccaggatgcttattagaattgggctttatctctacacccgaagaagagctttttatgaatgcgccccaagctgccgacatgtatgccagaggaatttttaatgcttttgctcaatataaaaataggtattatgaggggttgacagtgccgtataaagcgcccaaaaaagtgacgccaaccgttcctgaaattgttcctgaagtttacaaacaaaaagaagaaacgaagactaaaaaggcaaaaagaaagcgtgaacctacttctgttttatcgaagaaagaggagaaaaaagtagaagagaccaccaacaccgacagtcgaccagtaactgaaacatctaagcctgaagtcattgcagaaactcgtgatgatattccaacgccagtgaacccagatgttcctatattcaaagtacaaattttgagcagtagcaggaaaatggcactcaatgacgaggctttgaaaggactcaaagggtgtgagtggtatcaggaaggtactctgtggaagtacacctatggctcgtctaccaattataatgagatacgtaagttgcaaaaagagttgaccaatcgttttcccgatgcttttatcattgccttcaagggcggacaacgcaccaatgtaaacgaagccattcaaacctttttacaacttaaaaagaaataaacaacatgagaaatcatattcaagaaattaagattgcactcgtagccgtcgcaggattggttgctttgttctttggcatgaagttcttaaaaggttcgaacttgttatcgagcagtgatacctactatctcgtttttagcgatatcagtgggcttaccgagtcaagtccaatctttgccgcgggctatcaagtgggacgtatcaagaaaatttattttgattatagtcatatagagaaaataaaggtcttggcggaagtcgatcggaaaatgaaaattcctatgggaagtactgcttcgattagtagtgacgtattaggaaatatcaaagtaacgctgaatatagcaccacatcgggggcaatatgtacagccgggtggagtgatttcaggctctatagatacaggtacggtaggtaaaatgaccgagatggtgccaactatcaagcaaatattgccaaagttagactcggtgatgtttcatcttaacgctttgttggctgatccagctcttgcacattccatccacaatattgatgagataactaacaatttatcgacttcgtcaaaacagctgcatattttgcttaccaatgtgaatagggaagtgcctggtatagtgtccaaaacgaatctcgtcttaacgaacactgagcaattcaccgataatttaaggaagattgatgtcgcttcaaccatgacaaaagtggatgaggcaatggcagatgtgcaggaaattactgctaaaatgaataataattcgggtacttttgggctcttgttaaaagatcccaccctttattataatctcaaccagacgatgaagaatattgactctttagcggttaatcttagacaacaacctaagagatatgttcatttttcgctcttcggacgaaagaacaagtgatttttagattgatttgggtaattgatatgacgaacatctttgaatcaaaattgcatttgattcaaagatgtttaattataaagtgtctaaatagaaaaacttttgtttcacattttaagaaaagttgtaaagtcttctttttaacagtcttatagaatgttacaagaatgtttcactcttcaagtagttatctttatctaaaagcatttaagttgtttgtaatcaaactattaagaacggttttgtcagtaagcgatgttattttttttcaaaaggtcttaaagtgcgtaggttgtgttagttacgacaatttgatgacattgtgataaaaattgccatttgtttattcaaattttcttttataaatttgcagtcgattggcattgaggttgatcgaaagacatacctaaaatacgatatgattaaatgaatgtgagtcctaatgaagcttgggacaagacccttacgcttatccgtgagaatgtctctgagcagcaatataacacatggttcaagcctatagtgtacgagtcgtttgaagaatctactcgaactcttttggtacaagtacccagccctttcgtgtatgagtatttggaagaaaattatatagacttgctaagtaaagtattgcgtcgtacattctgtgaccaaataaggttaaaatatcgaatcgttaccgaccaagagcaccatctcacgcaagatgtagaggcagagcaaactgatttgtctgtgaaaacacagttggcgaaaacacgtgttaacgagtcgcccacaactttagatgcagcacagccgcagcaactggatccaaatctgaatcctcatcaaacctttaataattatattgaaggtgatagtaataagttgcctcgctctgtaggactttctattgcagaacatcctcgaaaaactcagtttaatcccatgttcgtttacggaccttcggggtgtggtaagacgcatttgattaatgcaattggtatgcgaacgaagcaactctatgctcaaaaaagggtgttatatgtcagtgctcgtctgtttcaggtgcagtacaccaatgccgtgttgcaaaactcgattaacgattttattaatttttatcaaaccattgatttgttaatcgttgatgatattcaggaatggatgactgccacaaaaacacaagatactttctttcatatctttaatcatcttttccgtaatggtaaacgtatcatcttagccagtgatagaccgcctgtagatttgaaaggaatgaacgaacgtttactgactcgtttttcctgtgggttaatagctgagttagagaagcccaatgtacaactttgcattgatatcttgaacagcaagatacgcaaagatggtttgcaaattccagacgatgtagtccagtttattgctgagacagcaaatgggagcgttagagatttggagggtgtgataaattctttacttgcttactctgtcgtttataacagtacggtagatatgagactggcacaaagagtaattcagcgtgcagtgaagattgatgacaaaccgctcaccattgatgagatattagaaaaagtttgcaatcacttcaatgtatccgtatcggcagtcaatggaaggagccgtaagcaagatttggtgaccgcacgacaagtctccatgtatttggcgcagaaatatactaagatgccagcttccagaatagggaaacttgtaggtggtagagatcattctactgttattcacagttgctcacgaatagagcagcgtttacaagttgactccatgttctccaacgaattaatgagcattgaaaactcttttaagttgaaaaactaaaaggttgcaaggcttcattatcttttaggcttttattgtaatgcctgtcgctgcgattgttgaaatgaaatatcatttttgctatgagcgttgataacatattagacagggttttagaagtcgaacacggatttcaacatatccttgacggagctgatgaaattctttcggcatacgcaaaggaacaatgttttgaagttgcactcactttgtttgaacatgaagcctatcaagctcgaatgttagcaacaactatattgggcagactggcaacggaggataatagtgctcttcgttttctgaaagagcgaataagcaccgataagaattggcgtgtgcaagaaatgcttgcaaaggctttcgatgaagtctgccaacacagaggttatgaaacatctttacctctcatagaagaatggctgaatgataacaatccgaatgttattcgtgcggtaacggaaggattgaggatttggacaagtcgtccgttctttaaagagaatccagctgttgccattacgttaatcagtaaacacaaggcacacgaaagcgaatatcttcggaaatccgttggaaatgctttacgggatataagcaagaagtacgcagaattgatacggcaggaggttgagcaatgggtatagtcagctctctatatttttcatttatctacagttttttatactgctttttatgtgtacatacttttgtagtccttcaagaagaagtctaaaatttgttctaatgaaaaaacaaaggaatttatataaccaaccataaaaacatactcatcaatagaattcgatcttgaaatattcaaatttagtacttaccaatatgaagaaaaacataatcttacttattcttctcgtcagcacgacttgtctatctgcccaaacactggacttctcgaaattagaagggcgatgggatacgacaaaaaacggtgcaatatgaatctgcacaatatcagataacctatgaatacaagtatgcaaaagacgcaaagtatcctgatgcaaaacgtacggcagtaacaattctaagaatcggtacgcaacacaatatgttcattgactatggacaacttaccttcgactctatctccgcctcaattgcaagaggggaatctcaggtaacttcatcgggtcctaaacttatcggagcattgaaaagcataggcttacgcgaactcatcctgctgaatagagagactaaaaaagagtttattcaatgcgagccaggaggaattcaaagatatcaatatgaagaagatactcctcaactgaagtgggaattactgcaaggagacagtactattgctggatatcagtgtcaaaaggctaagacaagactctttggacgagattacatagcctggtatgcacctgatgtagagttgccatacggaccctataagttctatggattacctggactcatctttaaagtgcaggacacacagaacaacttcgttttcaccttgacaggattacagaaggtaaagagatatactccaatttacatgtacgataaaagtgctgtgacgaagagtacccgaaagactgtcagacaaatgtataagaactattgtgccgaccctataaaagccttaacaggagatggaagcattaccgtatcggctgatgttgcagcaacagtgaatgcaaagccttacaatccgatagaattagaataacatcttgcgaaggatacttcttttattctacctccttaccacctctttcaccctttttgcacagcaggatgaagcgctggtaaagctgacgattgaggtcagggactctgccagcctccaaccattatctgacgtaatgtgccgcatagtaagcccaaagggcaagatgctaagctataagattgctgacggaaggggcaacctcagcctcacagcacaccaagaggatgtactaatgttcacactcattggttacagtaaacggaaaataaacgtagctgacatccatcagactacaaatcagccagctattatcctactgtcttccaagccggtggaactaaaagaagtcgtcgtaaaactatctcccataagaaaacaaggtgacacactggtctacaatgttggttcttttctgcagaagggtgaccgtcatttagaggatgtactcaaaaaactaccgggaatcaaggtttctgaaaacggttcagtgtcttatcaaggtcgtgcaatcaatcggttttatattgaaggacaggacttgatgggtaataactatactcaagcaactcgcaatatgcctattaatgcggtgcgtaatgtcgaagttttggagaatcatcaacctgttaagatgatgcaaggacgcaaaccatcagaatcagcagcattaaatatccgccttgacaagaaccacaaggctcgtccttttggggagattactggtagcttaggcgtcaaacccactatctgggacaatcagttgtttctcacacaggtgatgaaacattcgcaaacacttgtttctgccaagatgagtaacacgggaaaagacctttctaaggaaattaaagagcacattgatgtctataatctcgatgcatacgagccacttctacagggtgttctgcaagaagatataagccaagaggctctcccacaagagcgatacttacagaacaagtcttatagcgcaggttttaataatatcattacactatcgaaagacataacactacgcagtaatattcttctttatgaggatcatgctggatataatcagtcgactacaaactattatggaggacttactcctatcatgttggagacgtcagaatggatgaagcaacgcatatttcgcatcgtaccaacactgaaatacgaagaaaacagcacgcatagattcttttctgacgaacttaaatactcctttggacgacagacaaccgaaaatcaagtagccacgaatgggattggaattactgaacagatacgtatcaaaccgtcttatatcaagaactatctgtcttcttccttcaaattaggaaagagtatgttgcaggttcgctcactcgttagatacgctaatcgtagagaagaactggtaacagcttctgattccttaccactatataatgttacagaacgctttgcaacacggtcaactatgaccagaaacagtatcacaacttcaatccctaccctcggaaatgatttggacatatccttacgagcttattacaggaataactcgtacaattatcaaggtgatatctatcatcgtacattcaaactacaaggtgaaccaggctacacatggaaatatacaaagcaaagctatgttagctttggacttcctattgaatggacaagaatcagcctttcagagaagaacaacaaactgtctgcacgcaacttcatagcatttaaaccctacttgacattacaacaagtactgacgagcaaactgacagtgaacctatcctcctctatctctacagatgacaactctcttgatttctatgctttgaagcgtttaagagagggatacagaaacatacaggtaacaggaaatgacatttataagtctacccacctatacacttcgctccatttccgctatcgtaatctcgcaacgatgctctttgctaacctttcacttacctactctgatacaagaagcgaggcttattgcaactatgagtacaacgattcaatgacaattatgaagtgggtaagaggcagtaaccaccggcataacattgctataaatgctatgttggataagactttcatccccataggcgtttccttaaagtttgatgcgacatataacagagattcttatcttgtttcacaatcaggtgttatggtcaataaccattctcatcacgcttcaggaacgctcaccacaagtttccaaaagatatcttggctgcgcctatcagccgcttttacagctaaatattactgggaacagagtagtatcatgaagttggatgttctttcgtcctatacaaccaatgcagctctttacctcttccctacaaagaagttggaactaaaaatgaagttttataatctgacaaacgaagttatggatggacattaccatacatgtagcctattagatggagacttcaactacaaaattaataatgtgtgggagctgggagtatctgggacaaacctattaaacagcaaatcttacagtattacgcagaatacaggtatcaatactttcaacacattcctacctttacgtggacgtgaattactactccgcatacagctgagattgtaataacatcagcatcttctacaaacagtttactcgcacactaccgatacttgtaaataattttccgacaactcaaaaccaatatatgctcttttagcttctaaaagatgcctaattatgctgcaataggtgcccttttgaggcctaactaacacccttttgaagcccaattaagcaccttttattttactgtttggtaactaattgattctctgttgattgcaaacttgcttttaaaacgtatttttatcattatttgtagaggaattatctgaaagtatgtaatgatttttcaaatcatgatctattaaattagctattgcttatcgctacaaataacaagtccactcgtcaacttcaaaactcgtaaactatcaattagagactcctaattaaactttattggctacccagaccaaaatacaacactccaagagcctaaacttggttgggtaatatctgatgctggcaatatttactcgacttgtgaagaagcagacaatgcaggtgagaaacctgttgccatgattgcatatataagtgataatggtaacggacctgcaccttataacctgagttcgggataaaaatgtcccgttctcgatagtacccccaagagcataaatatatatcctctatcttgagacaaaggttatcaataaactttcatcgagctctgatatgactggtttagaacagtgtaagctgctgtccttgccggtctatgcagaaatctacattgatagccggcttcttctcaaagaaacagtaggctgcaagtgccgacagtgcatttatagaaaattaaaaacgctcctatgtctggagtgtaccagctgtgccacgtttttcagttcatcattgatggtttctatgactgatctctttctgagtaatattttgtcatacaagggtattagcttgttcttcatgttactcctcagccccgtgacaaggttaatgccatcattgtataatcgttcgaaaagcccttgggatatataccccttatcagcaaacaacttaccgaagaggttgtcactgagcctgttgaacactctttcatccctatcatccacatttgccttggtgaacatgaagttgaccaactctccatgctcgttgcaagtcaagtgcagtttgaagccgaaataccatcccatcgtacttttccctattgaagcgtattccttgaacaccctattgcgacggatacgcttgttgtggcacactggtatggacgtgctgtctatgaaacttattccggtgcaacgtcccaaacagcacacttgcagaaacagcatcatctcaatggcaactcttgattccagttctatgaaacggttataggagagttgctcgggaaacaaatccctcatgtgctccctgacataaaatagatagtaatgcttgaaattgcggaagtcattgaagtggaaacagatgagaatagtcataatctccgcacggctcattcgccatttacgctttctatgcttgatgccgtcaggctcctgcagtgccagttttgctatttcagcatcaaattccttgcaaaagtcatctgcaatacaaaaaatctctgtaattttgtctttggtaatcatcgctataatatttgtaacttgttgataatcatatataaatgtacaaaaatataacgagattaccaacttttttatcactttcttatcccgaactcaggttttaaggaactcggtaacgagtcgcccgtattagtaaaactgatgatgcaaactatctatcagaatgacagacgcagcatcaagcacatcggtgctcagcaatttggtatgaagttcctgcttcgtggcttgtatgcccataacggcttgctgtatttccacactcgaatggaaaacggcacgaatatgccgtactctgtggattttatcacattcaaggtggttgataagaagatggcaaagcgcaccgccatacaggagcaactgttacagccacttcttgcctatcatcaggtaatgcaggtgtgtggcatgggtagtgaacacactgtgtttgcgctcgagcagttttctcttgcagaagacaagcagcttgaagtgatgctctatgagagaaatggcggtcgtacactgaccttttatgtgacggcagaagacctgcagatagcaaagaagattgataagctcaaactgaactggtaatgaagaagaacaatatcattctgacagtatgcgttgcggtggctatgactttcagtctgccctcgcaggcacagcgactgatacctaagcaaaggggcgtagaggtcgtaaggagtgttccgcttatcaagggagaaaagttccttgcagctgacaactttggcatgggagcatcactcacccgttatatggggcgtgagaactacacctttgtgggagttgagtatgaacagcagaatatggcgtacagaagttataacgtaaaactcaaggatgcactcttgcaggtgggttatatgcaccctgttctctccgacaggggtaagaacgtgtttctttatggcggcatatccgccttgggtggctatgagcagctgaacgaggacaaaaggctgctgcccgatggggcgacgctgctcgaccgttcccactttgtctatggcggtgccgtgcatggctcggtggaagtgttcctgacggacagggttctctttcttgtaaaggtgcagggacgtttcctatttggaacggacttgcattgtttccgtccggctgtttctgcaggactaaggtttaacttttaagtagaagaaaagatgaagaagatattgaatacgatttgggtaatgggtgtgcttacccttgctgtgttttgcctatctgtttgtgataggaatttggatattcagcagtcttatccgtttatggtagaaacaatgccggttcagaaagacattgtcaagggacagacggcagagatacgctgcacgctaaaacgaggcggtgagtttgctgacactcgctatacgatacgttatttccagcttgacggcaaaggcttactaagaaatgataacggtactgttttcaagtctaacgaccgctatccgctcacaaaagatgtgttccgcttatattacacttctctctcatctgaccgccagacgattgacgtgtacgtggaggacagtttcggtaagatgcagcaactgacctttagttttaacaacgagcgggaagagggtaaggataagcctgcatcttctcgccactaagaacataatggatgcgaacgataaattctttcattttactttgtgtattctgcctgttctgtcagccgacccttgcccagcataagaaaacgtactctgctgcagatcttactcaccaaccctatatttggtctttcacaaaaaacttcagtctatcttcttctattatctatctcttcaatatctcaagacatcttttcaacataggctcattgctaagaatgataacatacaatctttgtcttgtcctcgtcaatatctgatagagcatctggcgttgcgaataatatctattatttgctattagcttgcctccttcgtcatatccaaaattattatctatgatggcgacaaccttatcaaactcttgtcctatcacttcatgtgcactttcctcttcggcagtcccatatccttcataacagaatgtagagattgttcctggcgtgtatttgggtattttccaccctttttcttgtaaatgctttgacaacaatataacttcttgttcttgggaacaataacacaagtctatattagcatatttcaagttacttagtttttcattatagtcaaacagaggcttgataaaagaagcgatttctttattagttcttattttgtctgtcagtttataaattggttgagtcaaaatcgctgaaatttgcccagccatattccgcgacttttcgttattatgtaaatattgtttttcgtcaaatgaaaaaatacacttcattttctttccttccacattaacctttatatcgttaaactgtgtttgataaattctttgcgcttcatccacgattattatatcatattctgtcagcactttatatccaatcatttttgccatacaaatatcccacccatagttttcttgcaacatactttgaccagaattcaactgtgcacaatggacaatgagaactcgtttacctttatttctcaattctttggcaatatcgtatgttaataatgtttttcccgtaccagctgctccggtgagtgccataaactccgtcgtagatgtttcaacaactttcatgacattggtttttatttcctcttggtgctctgttaggaaatattcctcttccataaatttctttgtagaattgaatggggagattaaatagttactgggattgaagagtttattaatatcatcaaattcatcacagtccttaattaattctttatataagttatcaaaggaaacaggagtaagatgttctttatccagcatataaagtttttcagtttcttgaacgtatgtaaacagcgaaacttctctatctaagaattgtaagtaataacgatttcttttaagttgcttcaatatcttttcttcactggctttagactttaattctatattgaccacattggtcttattgaatcgtagtaaatcaaattcttttcctatttgtggtattatatacccgacaaaaaaattatccaataaagatatagaatcatgtgttgttttaaaaagttcaataaatgatgtcatgcagtttagttcattttcactcaatccacagtttttccccttttctgctaattctattccatagaacccaagatatgaagatagtgtttctatacttaggctcttatacgaatccactaagttctttagatttatagttttcattgtaattgtttaaatcgtgaatgtaaaattgatgcgtggggcacattatactccacgcatcaatgtaaatattagaaagtcacgctcgttcgtctccccttatggctctgcaatctctggtcccgattgagagtgattcttagctggcttcttagtttccttgtcaggcgcagtaacacgttcgtagctcactccagtaagtgtaaaatacttctttgagggagtgaggtgtaccacaggtttcgtaatatgaacctttgggttgaactccgcttttcctttctctaccagtttactctggaaagaaggtgtaagtgtcccgatgtctccgaagtctacaatgtctccgttctcaacgtgcttttttgctatctcagctgcaagtctgagaacagcctcgacttctgcacctgtgaatgttgtagcgtgtgccacttcgtcacataagctacgatgatcaactctctttcgtcctgtaggatgtgcctacacaacgatttttcctttcaaatttccaactgttcctttacgctcctttagcgtataagcaatggggctgttcgccatagtaactagtgttgcccccgattgttaagcctttggaggttggggctttatcctcctcaacttgttagtagatttatatcacgaaggtaagaaatttcttgactatctccaagaaaagcacatactttttttgacacttgtgaacccttttacgcaaaaaagttcacctaaatgggtaaaaccatctacctattatcagaaaaaggtagaccttttcaattaaaaatgtctatctttttcggcgaaaaggtagaccctttttgaaaaaaccgtcaaatctttctggaagaagcattatgcctaattaaaatttctatttaaaattgtatttatgaaaggaaagcattatctttgtgggtaatattaattaaaagaatggcagtacaacgaatttaatacttgctttattagttgctctattcagtaatatactaataaaagagttctataagactgttgtaacgatgtagataatatatacagatcaaacatatagaacaaaactatgaaactatacattattggcaatggctttgatataggtcatggaattccatgcaaatattcagatttctacacatatcttgaacgtaacagagaagatgttttagaagaaatggagcaatattactatgttgatagcgactcggaattatggtcagattttgaacgaggattagaagaaggtatctgttatgattctcttgcagatataatatatgaaaacacccctaatttcgcttcagatgaattccgggatgctgattggtatgatgcgcaaatatacatagaggaggaatgcgataaactattaaactacattcgctctggatttgaggaatggataaattcgttagagttgagcaacataacggaaaagtacgcaatagacaaaaccgcccgcatcctttctttcaattataccgaagtcttggagaatatatataagatacctgctaaaaatgttatacacatacataataaagtgggtgagaagttgatattcggacatggcagggatgttgaaaactttaatgtaaaagaagccttatatggagatgaggacgcccatttggttatagacgaagaaacaggagatataacaactatggaggatggacatgagcaattcgcagaaaatgccgtttgcgcattttatgataagatgcgaaagcatacagatgaggttataaaggaacactctgattactttcatagcctttccgataccgatgagattatcgtaattggacactcctataatgaaattgacaccccctatttcaaaaaaatatcagaatctgtcaacaataaggcaacgtggacattacattatttctctgagaatgacaggttaaatgccaagagactaatggacgaaatgaatatcaagcatgatttactgcattataagcattgctctgaaatgatgaacaaagaataaatttgtggattatttcaagggggagagaaaacaggaaccttttgtgtttacataaatgaattaaatttttagtgattatgatggtaaaagagactcttgaagagtattttaaaagaatgggacggatagaaagtggactcgtcatgtcaagcaatttaatcgacaagctggagatttgtagctttatacaaggcgacctcattattagccattctcaagacaacccttatgggggcataaatcctgtttgtatggatgattccaagagaatagtttgtcctgattttatttatcagaaaaagcttttttcagaaggctattatatcttcccccgatatcatacgatagttcgatattatacaacacacaaactattcctaggacggatttatgtgcaatcactccggaacaataccctttacaaaaacatacgttctcagagagtaaagagcataactccttctgacctgaaaaagtataaaatgccagaaaacatcgtctgtgaggatggaagagcctattataagacagattgcgagacaatattgtgcatcaatgaccctggtctgaacgagtgcgtttcgggcgtatgtcattcggcacttgcattgtgcaggtatattgatgagagcacggggaatgtgcatttcactttattagacttttccaatatattcacaggcgaggagattgacttgaatgattccgaaaaagtcaaatatgatccaaatgacgccgtgttctaaatagcttttctctatgacatatattcaatgcgtaggctgtacattcgattttggaaaatatataatccgcaaaacgaaacgtttcgaaaaaacaaaacgaagcgatgtgtttcgtaaaacgaaatgttcttttttcgacttccccacacgcaacttaaaacgcctcagaagactctggggcgttttaagtttcttaattattgctgtccggtaaaaacaaattgaaagtctgcaatccgtttgtatatgagcaatacaggcactttttgcctatggggcttgctttcagttacaaatagtaagcattataaaaacgtttatttttattagactatgacttatattttaggtttaatgtcaaaaaatgtagtattaatgacgatttctcttacgcagttagagagaaaaaagttttaccggacagcaatatttcttaatcataaaaatctcacacattcaagtcgaacttgacgttctcctcaacgccaagcagcacccttgtgcgctccaaattattctcgtatatgtgtacatttccgagattcagtgtgatgttcttcaatggtaggtctatctggcgtgccatgagatagaggtggtatatatctgctggcagtccaaggtttgcatcactgctgcgctggtaggccgacagaacaagttctccgtcatcaatttggaattgtatcaggctgaggcacggagcctgattgctttctgctcctgtttcaccgaggaacagcacataattcttcgagttgcgcttctcgcggtttatcctcgctaacaaaggcggcagtttctcaaagtaagtcggataactattgacgagcacggaaccgcaatagtcccaccagttgatacctgcctcgcggtatctctccacctgccgctcacccttcatgaagagttgtagttcattcctcaactttttcctggctatgccgtggctctcgaatatatcgagcaagtcagcaggcgacaatgaaagttgctcgttgagcaagtagcggatattgcctttcttgttggtctgggtctttccttgttccagaattttgtccagtatctgatagtatttattcatcgttcaaacggtattagaatgttattcaagcggcatccgtataaagcatgatgtccgtataggacgaactataattcatgtgggcgttgaactccctgcggtggcagttcctgaacgggtcgccgaggttcgggtgtctgcccatccagtcacacaactctatgatagaggacttgttcgaggtgaagtagatgaaacggtagccggagaggactgtcagcacatcgaggtaatcggacagtttccagtacattctgtaggtcttgccgtccgtactcagatagggcggatcgacgaggaacaccacgctcggcacgttcttgtaacgctcaaacacctccttgtaatcacaggaggtaatggtcagcccatcgagatagtcttcgcaaggaggataatccactcccttgatgttgttgtataaggtctctttctccaattccgcatactcggtggcatacttcatcgaaaagaggatggacgaggacagcgtgatataatccacatacccgtgaacccgttcatgcctgcggatacacgacagcacctgctcgcgctgttctcccatgatggccttatggcgtggcacgtccactattgcacgcagttcagccagcagggcattcgtctggggtaatgcctccagccgtttacgatagccgtcaaaatcattatatacaacggtggagttcggcttctggcacttggcgatatgcgacagcaatccgctgccaccgaacaggtccacgaaagtcgtattgtcagggaactgccggagtaccttgatgtactccttggcaaacatccgcttctgtccctgaaaaggaagcggtgccgaaaggtattgtcttctcattgtctcactaaattggtatggcaaagttcgccatattcggtgagccagaagaacattcgtaccaaatcacactgcaagcgttttgcagtcgctttgaaagcgtttgatgagcccgtacaccttgcgttcgcttactgcatacttttcagataaccgggcaactatatacgacactttctcgccacgtcccagaagcgtagtataatctgaatataagtccacaaactcttcatcttccaaacgtattcccgctattttgagcctttttatcagctccctgttaaatttcaagacctctattatcttcatattcaaaaattttgtatctttgcaatgtctcacttattattgcgcataatgcgcacacaaaaaaagaccacatgagcggtcgaagggtatattgcccccggctgcgctcatgtggcgttttgtgttatatagtaagtgagacgactaattaacaggccgggggctttttttcctcccccgaatgattctttacaacatcataccattcatggttttatcaataatgttatggtgataaaggcatcgtttgtattattctctgccaagctttttgcggaaaaatatggcttattattactccaatgacttctatctgcaattttacttcagtatattttgaaattaaaaaaattatttccaatatttgcagtgaggattccgtagctaatgactaccgattcctcgactgcgggggctggccataggtcagccgtccgtttttttatttgcttatgatgtcttcgatttccttgtcaatggcctgttcgattttcttgtcaagttcgcggctttctccaatgaactgccgctgcggtatgtgtatggttgagcctacgggcttttgtgccatacggtaccagaagtcggcctcggaattcttgtgtttccttgcccacgagtctccgttttcctcccggaactttgcccagaagaatcgtttcattctttttgttactacgatatcccctcctgaattgtgtatgtcggcgtatggtacagaggtacctacggttacggctgcatcggtgggcgcataggctatggatccgtagagtctctgtcgtgatgacatgagcggcttatactgtctgccagccccgtgtgcgtactgctgtctgtgtgtgcgctgccatgggtgcagtcccccgtcgacgaacccaccctgccggaagttgtcctggaagtggtcttttgctatgcgtcctaccttgatgggcagtgtgcgttgtctggcatgctctatctcgcggctatatagctgtaggagctgtaggaacttctggggtgtcatggttggtgcttttttatttgtatttgctgttttttcctcattttgtttggcgtttgagaagtaatgtgtacatttgcatcagcttcgcaagaagttagggacagggcgcaagccgtgtaccacccgagggcgttttttagcgtcctttttttttatcacatttcttttattatattttcattcttgaagtagaaaaacactcttaattccagatattttcgctttacgtcattcaatgctttatacacgcttggcgttttttctttcagttcgtaaagtatagctttcgccccctgccggaacctccgataatgtcaggtgaaaagcctgacatttttgtttgtcgtttaataaatactgattatatttgcaacagcctcgcaagaggttaggggctaagcatttatgcggcgcaccacttttaggccagtttttctggccttttttcatacttgctgtaggagctgaatgtattgttgtggtgacatattgctaattcataattcataattgtggcaatcaacttgtgaacttgtgaacaaaatttgtatttttcttcattttattttgttgttttgaaattattacttatatttgcgatgagaatagcgttaggagaatgccccggatttggagttccggcaagctgcgctcctttcgctattttctttttacatgctttataaagtcctgtgcatcagagatgctgtgcaaggtgaacgttccatcgacccattccttaacaataatataggcatctatatcctttactttcgtcttaaagatgtgggactgcgccaccttctgcatttttttatgtttttccgcagttccgaggtattctgcctcttcgagtatattctgaatatcggtgagcattctggctttctcctccatgtacttgaacggctggttgagccactcgtcaatagaagcccttgagacgagtaccttatgtggaaagttacgatttgtgagcttttgcccttgtatagcttttctgattttctttttctcctctttcctttcctcttttcttacggctttctcgacagcctgtttcgctccagggtgtgcatttttaatatatgggtgtgatttggcgaagatttgtgctgtactccctgggttgttgtcgagtccgggctgtgggtcgtgggctgccgtactgtcgtgaggcacgttggttgctaatttgtcggtagatcttaggtcgcacttgcagttccatcggtctcccggtctgtgctgttcccagaaggggtggtcaacgggcagtattgtcccccagaaaggcatgtggtctgctcccgggtttggcgatgtggatggcatccactcgaggtttggaagcacatctttctctcgttggaactgctgccagttggtagcttgccttgcgcgcagcactgcggtgtcgtactccgttcgcagccatgccttgcactggtgtgaggtaatgtcctgcacgtcgtttttccaccgttcaaacggctttagattgccgtttgaatccatgagctgccgtgcgacatcgttctgtagccggtgcgtcttgaacgctgcgaatacagcggtgttgtgtcgtagtgcgttgaggaagtcgtcttcaggcctttgagcctgtctgattcccttgtcggcagcggtgttgagtgtggacacgaacgcgtggaagaatgccggctcgatgtcggtttttggattgaagtttcgcctgtagatgttgtgaagtgcacgttcgatgacttcgtcggacattgcaaagcccttttcggtcgatgtgaggcagcactttccttcgtcaccatagtagaggtcgttgactaccagtctaaatgagccccgtcctgcggggcctaggcgaaaaaatgatgtatgttcttttgctgttgtttcttaccatcactcttccctttttggtcgtcggtgttttgcggctgcgcttgggaatcggaacgagtttcatttttctcgtttgtatgggatttgtcgtctgggtcttgcatctccatcatggacatgttgttcctacgctctcccacgggcatggaatacttttcagcgaaatagcttgggtccacctcgtagcggtcagccaccatcgtttcgtaagccacctgctgctccggcgtgaaatcaacggagtagtcccagtcgaagcggcaacccttgagtgggaatccatgcgctaccatgcgtggcaagagctgattgttgatcacatccctgagcatgtcggcatcctcttccacaaggttctgaaacacctgcaagtgggtctgactttgcgagagactgctgccgtcctcgatggtcatcgtctgcccgatgatgagcttggacagttctgagtttgcacggtctatgcgctggttatagacattatacgcatcgccacgcgtggattcgatgaactccagatcggtgtccagtggcatgacggcggtctgcgaggcacccgcctcgatgagcatgcggttcaaccggtctatctccttgctatcacgcgaggcagtcttggctatgcgcatcggcatgccgaagatctcgccgaaggtgtcccagaaagcaagcatgtttttctttgggatagtgtgctgcgtggcttttaagaacaacccgagattgtctggctgtcctgcttctatgagccaataggaaaacggcggcttgcggtaatctattcccgtgttccagttttgcccaaggtcgctcacaacacgtccatattcaggaatgacatgtttgcgcggtatgagccgaacgtcactatagcaggcgcacccgtcaccgtcctgcacaacctctccgagttcaatgagcgaatgcccccaacctacggagtcgagcaccagcgtacacagttgcttgaaccacgactggtcgaagtaatgcagtgcctctttgttttcattttctttggaatcgacgatcttaaaggtttttgccatgacaaagccctgccgctgccgcacgcatccggaaagatgtgcgtctacctctgcgtcccgatagatgtcgtacagccgttgcctgttgggattctgtatgtcaatcgcaagttgccatgccctgcgccagtcagcgatgtccttacgggtgagtgcatcggtggtctgctgtagcgtcatcacggcgtgtctcattcgtttacggtcatcttccttggcaagattgaaacttccgtagggggtatgtatgacgttcgtgtcctgtcgtcttcccagtgtgctgaataatctctttatatccatgatggtttcttttatttttagttcacgagttaacaagtttacaagttcacaagttgacagtcctttttagtttacgagttcacgagttcaaagttgaaagttgaaagttcaaagttcaaagtaatcagctaatttctcccctccttcggaggggttagggggaggctccttaccagttgtttctcaatggcttttgggaatggaacaaaacgcctatgcctgccggctcacccttgtcatccatggccacagggatatccggcactatttttccactctgcaccccctcaagccacttgatggcgcgttcgtagcgctcttttctaatctcgcttcccatcttctgtggcaaggctgccgtcatgtggtacaatgcgatgtcacacatatacatgacgatgagtttattgcgactgaagccatctgcggcaaacaccgctttgcagtcatagacaggcctaagataactcgatatctcctcctgtgcctcgctctctgcgttggctcggttttcggcagaggtctgtgataccgttttcagggctgcctcgccgataacgactctgtaatcttcatctgtgataaacataggaacctcctttttatgtggttacatacaatgctatcttttcaatatccgctaccttgacccccttacggaaacggtgggtgtgcacgaggtgacgtatgttcttcttggacacaaccttgagcctgccacccatattgagcacataatacttcattccgaacaaagccgacagctttttggccttccggactgcacgcttgtatttccaagcgaaaatgatgtcttttatcagttttatcatactaccatgcgtttttggcggtcggtctttttccgaacaccggttgaaaactctcctgccttgcattgcgctgcagaatccaaatagccccctcatctgcgtccggcgcatcgtcgtgcacgcggctgccacgctcaagggcaagcgtctgttcaatgcctacctgcatgtccggtgaatccttgagtttttcattataaaacacaaagccacgctcccacagcgggctgacagcctcgatgcgctgtatcttgtcgggcttcttgcgtttgtcgggcatgataggcagctggtatccacgcaggttaccctccacggcgaactcgtccaaaatgacatcctgcatgaagttcgcctccataaagaagagtatggccgctttgtccctcatccgttcgtagaggtcatagagccaccgcaccatccccccgaccgtgtcttgacgtacataacagtctatgagatggagttcgtttccgagcttgccccacagccgtgaagccttgtagtcgttggctgtggttgatttgaaagacgggtcggtatagcatacgagcatatcatacttgcggatcgagggcatgggcttgtatcttatccagtcggcacggaagatggtgccgtccacgatggggttgtgcatcatctctttctcccacgcccgatagcccacgaagtcgcggtactcctgtgcgtcttccttggtccatttctccttccataccggctccccgttcttgtctacagcctgaacctttgagacgaatacgccgcgcgtggctgctatattggccagtacggaggtctttgatataaggttacccaccatgaggaaacgtccgcgccccacatcgagcgcaccgaatagtgcctcctttacccagtcggtgaggtcgtgcacacgcttctcgttacggcagagctcgtcatcgtcaaggtcatcgatgacaatgtagtcaggacgtgcctcacgctcacgcagtccgcgcggcgactggccacggccaacggcgaggaacttcacacccgatgaggtcttgaactcacctgccgtccacagtccgaggttcttctgctgcccgaagtcggcgatgatgcgctgattatattccagttctgcctgaatatctccaagcaaccggttggcgctgtcctgcgatttgcccaccacgaccatgaaattgatgagccgcttgggacgcagcatcagccacagcggcatgaagatgtcaaagtgcgtggacttggcgtgtcctctgggccacatgaacaccgccttgaggttaggagttcccattaccttgcgtgcggcttggttgtggaacggtgcattgtgtaccgtacgaaccacctctcccgtcgtcttgtcacgcagggtgaggaaatgcgggaaataatactcacagaaggcggcatagttgctgagcagtctttctttgcgcctgtctttttgggcaggtgtctcgttggcaagtgccgtggtgtcggtgatcgacaggatgcgcttgcaatgctccttccactgttcgaatgccagtttcttttctgctgctgttgccatagttttttagtttaccagttcacgagtttacgagttgacaagttgatagttatttagtttacagcctctccccagtgattagctgaactaacagctcgtgaacttgtgaacttgtcaactcgtcaactaaaaaaaatatctattttattcccatctgttcggtgagatacatatcctgaaatttattgatggttttgatgagttccggcgttacagaggggtcgatggtggcgcggtactccagccacttggagaatgccatgaagacctctatcgcatccacgacattggccttcttgtcgagcttctcgatgacggaggacagtttggcgagcttgtcgcctatgccggctatgagcgaggggtcttccgactcgttcacttctgtaatgagtttgtcgatagtgagcaacagcttgttgaccagttccggtcgtgttacgttctttgccgcccgcgcctctttccaaccatccgcattgcaccacttggatatggtaacccttgacacctctactttctccgctatctcgttctgctccatcccagcaaggtagagagagcgtgcaagggattttttcttttctgtttctgcttttgtcataaatcggtttgttgctttaccatgcaaaattgccttattttattgaggtttcaaaaaaacggtgcagtcacttcatagaagcgtgtagtggtttcatacttttttggtagtcaatgatttatgacgtaatattgcagtcaaaattgaatatgaaacgcaaatgggaaaacgtgtaagaatatctaatgacagcctgaacagctacgggttcagagtgctgacgagcggcatggacgtggcgcagtacaaccgtaaccctgtacttctctatatgcacgaacgcggcaacgtggtaggttatgtgaaagacttgaaggtggagaacaatgaggtaaccggtgaactgatgtttgactgtgcttctgaattgagccaacgttgcaaaaaacagttcgagttcggaagtctaagaatggtgagcgccggtttggaaatattggaaacaagcgaggatgcgagcatgcttgtccaagggcagacacgtcccaccatcaccaagagcaagctatttgaggtaagcgtcgctgatgtcggtgccaatgatgatgccctcgtgcttcataaagacggaaaaagaataaccctcggcagggacggagattgcccgctgccgcttttgaataatattaacaaacaaaaaacagaagaaatggaaaacaagaccatcgccctgaatttggggctgccggaaacggcaaccgaggctgaaatctccgccaagattgccgagttgaatgccgtcaaggaacagaacgcgtctctgcttcaggaaaaagagaagctcactttggcgagaatcaacaaccttgtcgagcaagccatcgccgacaaacgcattgagttaaacaacaaagaccagtttgtggagctgggcaagaagattggcgcggaagagctggagaagacgctccgtgtgctgcaccctgccgtacgcctgtcctccgtcttgggacatcagggcggtgctactgacagcaagcaggagattacgaaactcagccaggtgccggccagccagcttgccaccttgcgctcagaaaatcccgaggaatacaaacgcctgtacaaggctgagtatggcattgagtgccagatataaacaaaacaattcataccaaaactataaaaaaaatgaacagactcatgaaaacagttctcgcactgctattcaatgcgatagtaggtgccgtcattgcccaaatgcttggcttgcctgccatggtgggcgcgttcaccctcaacttggtggctgccatggtgggtgccatgccaaaaggcgcactccgcgcaggagtatttacagagatatggaccggcgagctggtgaaagccctgcgcagaggccttgaaggctcatggctcgacggcgtgccagaccagagtaccatcaccaacaacgacgtcattcacctcgtcgacgtaggagtcgaccctgacgtgctggtcaacaacaccacctatcccataccactgcaggccttggacgacaaagacattgccatcaagctcgacaagttccagacaaaagtcacacctatcaccgacgacgaactatatgccgtcagctacaacaagatggcacgggtgaaagaaagtcacggcaacgcgctgaatgacgctaaatttacaaaagccgcccatgcgctctgcgctcagaaaaacagcgccaccacgcccgtgctcaccaccaccggagagcgcgatgctgaaacgggccgactgcgcctgacacctcaagaccttgtggccatgaagcgtgcgttggacaagatcaaggtgccagcagaaaaccgccgtcttgtgctctgccccgaccacgtcaacgacctgctgctcgccagccagaacttccgcgagcagtacaacatcgaccgcggaaccggtaaggtaggcaagctctacgggttcgacatcttcgagtatgccaacacgccgctctatacgcaggctggcgtcaagaaatcacttggcgcaaaggccgagaagggagagttccagtgttccttcgccttctacacgccacgcgtgttcaaggccacagggtccacaaagatgtattacagcgaggcttccaccgaccccgaataccagcgtaacaagatcaacttccgccattatttcatctgcatgcctaaaaagactgatgcgggcgtggtaatggcaagtggctataaagaaaccgcatgatgagcaagccgatgaaatatctcgtcatccattgcaccgccacgccggaggggcgcgaggtgtctgcggctgagatacgccgatggcacaccgcgccacccccggcaggcagggggtggaaacacgtgggctacactgacctcattcatcttgacggcaccatcgagcggctggcgcccaacaacgaagacgaccgtgtagacaactgggagattaccaatggtgcggcagggtacaacagcgtgagccggcacatcgtgtatgtgggcggatgcgacagccacatgcaccctaaggacacccgcacgctggcacagtgcgaggcgctcaagcgatacgtcctcgagttccacagccggttcccgcagatacgcatcgtaggacaccacgacctcaaccccgctaagcaatgcccctcgttcgacgtgggccagtggatagccgagataggcatacggcaaacgttcaatcagcattcataacacagagcaatgggagacacgatatttcaaatcctgcaatgggcaatcccatcgggcggtatcggagccgccattgcctggatcgccaaccgacgcctcagaaccgtcgaggagaaaaaaaagatagaggatacctacaagcagatgtacgacatggtgagccgtgagctcatcagtctgcaacagcaaaacgaaaccaactatgacaaaattgagaatcttcgcaccgatggcgacaagatgcgacgggcgctcaaccgcctctcacgggccatcgaggctattcagatatgtcctcatcgcactacttgccctgtcagtgtggagctgtcgctcgaccaagacagtgacacgccaaagcctgcacgaggaaagcctacgcttgcaaagggacagcctcacggagacggtcacccaaacatggcagaagccagtgagggttcccatggcaacagcctgtctcaggctgacactcgacagcatcagatctctgccaccgtcagcggcgtacacggcaagggaaaaacaggcggccgtcaaactccaaaggaaaccggcaacggcgaatgagcctgagcaaatcatcattgaggcacaatgcgactcactgctactggtagccgcaaattactcaaagagcatcatcacgttgaaacggcaactcaatgaggcaaacagggcaaacagcgagttgaaggaaacggcaaaggagcgcgaagcccccggtctcaaaattacattcatcgccttcatcgtcggggtggcggccggcatagtattaaccaatttaataagaaagatatggcaaaaagtgttttagacggaacaaacctcatccttagcgtgggtggcagcgccctgggattttccactggatgcaaggtaaccaccaccaccgagacaggtgagcgcgtcacaaaagaggctgcaagtggcaagtggaaggagaaatatgtaaagagcttctcagagagcatctccgcagagggatgtgtgctcaccgacggcgacagtagcacacccacctacgatcagctcaaggaaaaacagctcgctggcgaacccatcgacgcctcctacggattacgcgatggcgacaagcgaactggaaaaaccagcggagggtatagcggaaaatacatcatcacatcgctcgaactcgacgggcaggccggtgacgatgccaagtacagcgtacagctggagaactgcggaaaggtcgcaaaggtagcggcaggacttagcgagtctgggtctgtggcttcgtcaaaggcgggaggaactggcgcatgaagattctcatcaacggaaaggcttacccctgttatctggtaatgggggcattcctgctgttcaagcgagagacaggaaaggatgtaagccagctcaaacaagaaaacctcgaagacctgctcatgctcatgtggtgttgcctcaaatgctctgcacaggcagcgggacaagagttcccactcgatttcgaaaccttctgcaacaccatcacgcccgacatgctcacacagtggaaccggcaaatcagttccatggatgaaaaaaaaacgaccaacaagacgtaacgcaggctgatgttgagcaactgctcggaatcgcgttggggtgcatgggcatggggatgaacgacttctgccgatgcaccccttctgagttcagggcggcatgggacgcatggaacgacaggcgcatggcggtagagcgcgaccagtgggaacgcttgcgcatgagctgcctgtgtaccttgcagccatgggcaaaacaaaggttaagcccaagtgacatcatggagtttccatgggatgaaaaacaggaaaaacaaaagcaagacatacccgacagacaggaaatcatgcgcaggtacagggaggaaaagcggaaggcaggactgaaatagcccgcttatttagccttgatgacaccatagcagaacaaaagacctgcgatgatcaccacaaggcaaaacgcaaccgtaagcacacaggctatcgggtgctccgctatcaggttgtgaaggggctgtaagttgacgcttgctaacataaagttcaaagttcaaagttcaaagtttgaagatgctgcaaatataagaaaaaaaatagaaatcatgacaaaagaggtcagttttaccatcaaaatcaatagcgacggaggcgtgaggaaagtcaccgccgacgcaaaagaggtggggaaggcactgtccgaggtgcaggaagaggcagaaaaagccaaacaaagtgtcatcacatgggcacaggcggcacaggccgtggacgcacttcaaaactccatcgcacaactccagggggtgctctgcgaccttacacaggcataccaggtacagctggtggcagaaacacagctcgacaccatcatgcgacagcgcatgggaagtaccgacgcggagatacaaagcgtcaaagaactgtgtgccgcgcagcaggaactcggcgtcatcggcgacgaggtgcagttgagtggtgcccagcagatggctaccttcctcaagcagaaacagagtctcgaggtgctcattccggccataaatataggtattatgcctttcttgatgtcgtgatgtaccacccgtcctatttgatttggctgttggaaaacgtcagtggagatattttctttgttgcgccacgagtgatggagcaaatgcgttatatgtgtccctcattcgtctttacaaaggatttgttgaactattatgcaaaacgcaaacaggaatttgaagctttcaaaatagaggaagatatgagaatagaaaaggagaaacatagaagatggtcgtgggaggaatatgagcgccagcggaacgaaagatattgggaagagcctccaacctatgagaaatatcgtgggacttatgcgcaagatgctatgggatatagcgatgatgaaatagatactatttttgatggagatccttctgcctattggaatatagactgatccttcttgtcttactatattgtggagtcgtggaaaagaagcaaaagtgcaacgctcgtagtggaatatagaagaggtggctatctcaaaatgcgagataaccacctgatgaaataaaacgaaggttttacagagctgtgcttctcaaagcacgcagagcaggatggcacagagaatcgccagccagaagagaatgctcagcagcgtaaatgccactttcagaattaccctggctataaagcgtagtatcagaaagcctgcaataactgacacgacagttacgacttgtggcgttactatctttgagatcagccaaatggcaccgataacgatggaaagcaggaagcctagttcgatgaagcgtgtccaactgaagcggcggacttgcttgggagaagtcggctgctgcttgttcttatcggttttgttctatgcgtctgccttgatgaaggcaggtgtgtgaacgatttcgttaagccgtgaggacaatggaagctcgcttctattgtctcggcgagaaatcgcacttttaagaacgtcttgattcatgatgattgtattcatataggagcttttaatagttcaagagcaataacaagatgctctaacgacccaaagccaagtgtttgcaaaactcttgacgtgtggagtggagcgtttatcttggctcttgacactacaaaagctcccgatggtgatacattaggtaatgttctcactatcgaaggttggcagaccattaacctcgatgatcagaacgattgtccctgtcagttcggtgtagagtttctcatactctggacttgcaccaaagtcgtctgtcagttcatacttgtcgaaaacgctttgcacagccttatttttcagaagcattggtgttagtctttcggggagtggagaaggaagttctttctcgaactcattctctaagacagacacaagtgtgtcgtacttggaaaagtgaagtcctcgatacaagacttcacttgccatggtctctgcttcaagatgtgagaaactttgcgccactgcatcacagtaggtggtaagggcttcatcggctcttgctgttatgaatggtttgtcacccagcagttctggaaaatgctcactgagatagttctccaacttcagacggaagtaagatagttctttcttggttgttgtcataatcttcttggtttagggttgtacattattttgagttgatgcccatagcaacattgaacttgtctaacttgccagccaactgttccatatcgtgttctatcttcttgttggttattcgggcataaatttgtgtagttttaatgttagtatgccccaacatcttcgatacactttccataggaacacccttgctgagcgacatggttgcaaacgtatgtcgggcaagatggaaggtcagattcttcttgatgccacaaatgtcggcaatttctttcaaatatgcgttggttttctgattcgttaggatgggaaatagtttgccgttccgataggtcttatgactgtatttggcgatgatactcttgggaatgtcaagaagcaacacatttgtttccacgcttgttttctgccttttggtcataatccactgcttgtcatcaagcgtaacaatgttgtctggtgtaaggttggatacgtcaatatatgccagacctgtgaagcatgaaaagatgaaaacatcccttactaactccaagcgttgaatagcaaattccttgttggctatcttcataatctcctcatccgtgagaaaaccacgattgaccggctccaagtgaaaacgatgattgagaaatgggtcgtgatacaaaactcccattttttgtcctaatattgttatggtcttgaaagttttcattgtcttggttgcagtattgggattttgcccaacgactgtacgaaggtagatatcaaattctcgaataaccgtatatgtaagctctgatagtttgatatccgaccttttgtaattcctttggagaaattccctgaagtggcgttcgcagacattatatttttgtaacgttgcactactcgcagaaataccgacttgtcgtgctatatcggcattgtgcttatcaaagagttgcaacagtgtgtcaatgtcttctttcttacccagatattctgatttgatgcgctccagacatacatcggggttgtcttctaattttcgatagatactctgcaagccattacgaatgttgtccagttcaagatttgtactaagaacgtcggttgtacgtcctttcagtttctcattctccttgtcccatagtgattgttctaccgcaattcctgtggagccaagtgaaagacgttcattattgagatagattctcaacattactggtgtctttccttccttgttgacatagttgcttctaagatagaaggcggttctaaaatttgtcttcatacttgtttttttttaattgtagccagaaatagagaaattgtagccagacggaaaggaaattgtagccaaacgtccattctttcaacttctgtagcccagctacaaagttctacataattatttgaatagcagtaaaatacaagtactctaaacgaactctctacgaactcttggctacaatttttgtttgcctcaaaaaaatgtagccagattgtagccacgggagagtattttgggagtatatacgacctctaaacgacctctgaaaagtaagatttgtataaaacaaaagtatcgtaacttattgaagttacgatacttacggatttttgaagtttttctcaactctttttacagagtacttcacgcggagagagaggctctttctcttgaactatcacaagctatcaaatcgcatcaatctattgtaatatagcagtttacgcaaaatgttaataaaatgagatttcacggaaaatctttggtaatattatttttagggtgtaactttgggtgcataaaacaatacacccgaaggtatgaatatcaaacggaacatcatcttcacgttggagagcaggaagaaggacggagttcttatcacagagaacgtgcctattcgtatgcgcgttaattttgcatccaagcggattgagttcaccactggctatcgcattgatgctgccaaatgggatgcagataagcagcgtgtgaagaatggttgtagcaacaagttaaaacaatcggcttctgaaatcaatgcttcgctcttggagtattacacggaaatacaggctatctttaaaaggtttgaggtggaggatataatgccaacgtccgaacagattaaggaggctttcaatgttttgcacaaacctgcgagcaaagagcctaagctccaaaaagaagcattgccttgcgatttctttcaagtgtttgacaattttgtcgaggattgtggacgtcagaacaattggacggactccacttttgagaaatttgcagccgtgaaaaatcatttgaccaactttcgtgaaggacttacctttgagttctttgatgagcgaggcttgaatgactatgtgggttatctccgtgacgtaaaggaaatgcgcaattcgaccattggtaagcaactgagtttcttgaagtggtttttgcgctgggctttcaagaaaggtgtgcatcaaaacaacgcctacgatagttataagcctaaactcaagagtacccaaaagaaaatcatctttctcacttgggacgaactcaaccgtctccgagagttcaaaatcccttccaacaagcaggcgctcgaacgtgtgcgtgatgttttcctcttccaatgcttcactggtttgcgctattcggatgtattcaacctccgcagaagtgatattaaagacgaccatattgaggttacaacggtcaagacttccgatagcctgattatcgagctgaacaatcatagcaaagcgattcttgacaaatacaaggatgtggcgtttgaaaatgataaggtcttgcctgtcattacgaaccagaaaatgaacgattatcttaaagaattagctgaactcgcaggtattgacgaacctgtacgccaaacttattatagaggtaatgagcgtattgatgaagttacacctaaatatgccttgcttggaacacacgctggtcgtagaacgtttatctgtaatgcacttgcattggggattcctcctcaagtagttatgaaatggactggtcatagcgattacaaggctatgaaaccttacatagatattgcggacgatatcaaggcgaatgctatgagtaaattcaatcaattataactccaagacaatatgagccaagataaaatacagaaagcctatacccaagatttatctctcgttgtacgagccatcggtgccgaccttgaacatacacaagtgcgcatgattacttcggctaatgctgatatgctcttccattattggaaggtggggcattttattatctaccttcaaaagaaagaaggctggggaagcaaagtcatagataaactttccaaggcgatacgttctaaatatccagataaaaaaggctattctcgtagaaatatcttctatatgtgccagtttgccagtgcttatccgttggaagtgctgaaagaaatggataggatagatagcttactcacaactcctactgtagagaaggttttaagtctgacaaacgaactcaatcaaattgtgcaacaacctgttgcactaattcaagccatagaaaatcaatcgaatacaattacgcaacagcctgttgcacaattagaagaagttactgaaacattgtcagcaatctatcactgcgatatcagtcagatagaggaaatcttcaagcattctgccatagttcgcaccaactgggcgagccatgtaattctgcttaatagtaaacttccattgggcgagtgctattggtacatttcgcaagcagttgctaatggatggagtcgcaatgttctgcaggtacagattgagaccaatcttttcgctcgacagatcacggcaaagaaagtgagcaacttttctgtacgattacccaaaccgcaaagcgaccttgccaactatctgatgaaagacccttatatctttgatttgatggggcaaacagataaaaaggcagaacgagaccttgaacaacaattggtatctcatatcaccaaatatcttttggaaatgggcagtggctttgcatttgtggcacagcagaagcattttgaagtaggcgattctgatttctatgccgaccttatcctctataatatccaactacacgcatacatagttatcgaacttaaagcgacaccattcaagcccgaatacatgggacaattgaacttctacatcaatgtagtggacgataccctccgtggcgaacacgacaacaaaactattggcttgctcctctgcaatggtggcgacaaggttgtggcacaatatgctctctctggttacgaccagccaatcggtgtgagcgactatcaactaacaaaggctattcctgagaatctgaaatcagctctgcctacagtggaagaagttgaggaagaactatccaaaggtcttagaatagaaaatgaccaaaacagcaaaatataatttttatacaatgaacattatagaatcaatcgctccttttgatattgaaacacgaaaaggttttgatttttatcagatagaaaatgcgctagctactgttgatgaggtagaaaaaaagaagccagagtttgtatatgaaataatagcgatgaaattggtgcctactcaaacagaaaatgcttggggattttactatggtccacaattcacattaaaaaacgagcaaggagaaccaatgtatgtgccttccctaaatgatattacttctgacgctattatgtattgggagggcagagccaaagcctgtaataacccattactcatagctagatatgctgatttagtttgggaattcaaacaaaaaatagctcatatagggcaagcatcttggatgtatagactttgtgtagacaatatgcttcgtgtctgcaatgaagactattgttctcatcctgttattgcagtaaacatacttgagcgtttatttgcaatagtgaaaaatgccccagaagacatccagttagtgaaagatgcctttattacatttgagcaaaggcattcccaagatgacactgtgaggttatgggcatctcgctttttattaatgatggagtataagaagagttttactaacatagaagtaaacacattaataaaagaacatgaagatcgtctgatacggttatctactcctagcaataatgaacaaatgaatccatggatagtcatggagcagtctaagttacttgcaaaatactacaattcaattcaggacagagacggcatcaagagagtttttaatatcacagaaacggttttcgaccatgaatctaataaaatgaatggaattcagttaatgagcaatctagaaactatatgtcaaatgtattctcattatggccttaaggacgaatggaaacgactttctgtaaagattcaggaacttggcacacgtgtaaaagaggaaatgcaaccattccaaacagaatttgaaattcctcaaaaggtttatgaacaagctgatgtgtactttggcgataaggcagaatcctccgatgttcggtggagaaattttgcaagctattttattccgataaaatcaaaagaagagatagcattaaaagagctcgttaaaaaatatccattccaatttatgattgggaataacctaatggatctcaaggggcatccaatgtcatatgtcggaccatatgaagacgacccagagggacaacttatattgcatatggctcaaaaattaaatattcaatcatattttcttgccattgcaataaatcgtcttctcacgactaacactcttacggttgaaaatgtgatgacctcgttaattattccatcgcctctttttgaggagagtaggtatgatattatacgagaggctatagaattctttattcaaggggaatacatattattcagtcatctaattgttccccaaatagagaatgcgatatgcaatcttgtagaaatgaataaagtatccattctgaaaccccaacgaggaaataaaggatatcagcttaggactcttgatgatctattaagagaacaatgtattgaagatgtattcactccagatggggcattgtatctacaaatagtcctgacaaatcaaaaagcgttgaatatacgcaatctcctttgccatggtataatgccccctgagtattttggatctggtgctgcaggtagattatttcatatattggttatgcttgggctaactaagataacagctcctgctatttaatatcccataacacaacaaagaaacaaatgaacccactttaaaaaggctctaagagccttctttgttataattttccaaatgcttttttagttctctttgttcttgcttaatcctaccttgttgcaacaacaattcggcttgcctctgcagggcttcctcgtaatcgacaaccttctgttgcatctgctgaatggctttgggattgcgatttgtaataaagacgctgtcaagatgcacgaagtcagtggtggtggctttgccttgcatgcgcagatagcggtagcggaggtcgtaatcagaggctgtttgcagcttgttggctcccataccgaagaaccaacaacccaccatgaccagcccacaaaccaataagagtagcatgcgctcggctaattgtacgcttgcaaatagtgagtagttcttaaatcctacgggcttttgttgctctttgatgagttgttgcaaggtttcaaacttcgggtcgagtttcttgctcgacagtgatagtgcctccaaaacaaaaagttggtgctccttgattttggctagcgtttctttggaaagatgaatttgcacggtctcttgtgttgtggtacgctctgcatttgtgttagcaggttgctctgcaagcgtggtacgcagttctgcttgcgccttagtgatgactttacattcttgtttaagttcttcgagcatatcgagaacaggtgctatttcgttgttcatacatttgtcattttaaggtaattaaattctacgtttgcgtttagctctatttcgaagtttcttttgaaagcggagttcatcaacatctacgcctccgcttggcatcggcatcgtaaagacttcgccaagcgcatcagataagtcacttgcaaatccgctttcatctatcgaatgtgccatcgactctctcgagcgatgctgttgcgcttgctggatgtttcgctctatctctgcattgaggcgcgagaaagaacaggaacggtctatctttgacccactgaaactgcaaccgtctttttcaaagatgattccttgcactacattggtattgcctttcgtcttgaaacgagtggcaatactctgttgttctaaacctgagacaaagtttttccagttcagcgattgagttaatactattttgatagcatcgaatatctcatagcgcaacttgtcttcacctcgcagtcggtggcgatttaccgtattcttcccctctccaatggtcaagccatagcgttcagtcagctctcggcaaatctttgtggaacggtatttctcattgcggtcgctgatggtcttgccatcattgccgatgcggttgatacaaatatgcaagtgtggatgctggcggtcgctgtgccttacgataaggctctgcgtgtcgccatagcccatttcatgaagatattcgttggcaatcttcaccattttgtcatctgtcagtcgtgctgaatcatgtgctgagaatgaaagtatggtatgacaaactggtttctgtacacttggacgcatagaggcttgcaagttaaagtcgtgtgcaacgtcatttggtaaagaactgcgcactccattagcttgtaagatcttggctttaccttcacgcttgctaagcatataactgataactccactaaagcttgttcctttaataatcttggctatcatggtttcaagcgtttgatgagttcatgaatgaggactttgagtgcattcaagtcttcattgagggcataaatgccaaaggcattgagtcgatgggctatctgattgagattgtttgccatacctgaaactgtgcggatgagttgcatctctccaggtttgatgcgtgccttaacctcggcttttgtaatgagccgacgtaaaaactcagtacgagtgatagaggcttctcgtgctttgccctgcaaggtgtagtactccatcgtattaagccgaagaagcacttggtatcttcgtttctctgataaagtcttggtgggtcgcccacctttattcttctgttccatatttttattttttgatgagaccaacgggatttttacctcccagtggtgggagcaagtaggttttgagatactcaaaacacaaacttgcttcccagataaacactatcttctgatgccacgtttcgtggtcagtaataacggttgtttctctttcactttggattgagcaacgagccattcattgatatctttgtgagttcgatagcgaacagaaccgtctatgatagatgggcaaaaatgcttcaaaacttcaaacgattttcgtccagcatcatcattgtctagaaaactctcaacttgcttgtagctttttatcttctcttgaatgcgtggcaaaagagccaaagaattaagaactatggtatcgcaagttgaagaaggatttagcgtttgccacgaaagaaaatccataaatccctcaaagatttgtaggcggtcggttcctcttttaatcgttgtaatagccttcggagcgatacatcctttgaaatacatattgcggatttcccatcccaaagcatcgtttgcaaatccaattgcatagtatgtccgtttcatgttttggaatagaacttccgagcagtaggaattggctacagtaaggggaatgtaacgcgctgtgagatagcgaagcaaattaggattggaaagtgattgcacagatatgatttctaatttgtgcttagaggtttttctttcacctccaaaagaaaaatcttgatgcactatttgttttgaaccgattagcaattcaatggcttcgtacatggtacaatgctgtaaagtacgtacaaggtcaatgatgtctccatgttcgccagttccaaagtcataccattgattacgctctgtatttactttgaatgatggtgtactttcgttgcgcagcggagagcagtaccaaaagtgaataccttgtactcgtgcaggtgaataaccctgttgctgcaaataatctgtgatagagatttgcttgatattttgtatttccattgtgattttattttgatgtttgaaaagaataactctcagcctttttcttttggaggctggttgattttgtttggtcggacggtcgcctactataagcacccctttgcgaccgaccaaacttatttctatttggtcgggttggttcaggtatatatagcctgcgtccgaccgaccaaaggttttagggtagatggtcttggctgagccgatattttcctcgttcttctttaaccactatgcctttgttgagcaagaattgcaaaagttccttgattttagtttgcccataggatagccccacaatcttagcataagcctctttgagagctacgataagtttactatatggcaagacttcgtgcaaagaaaaggcttgtgtcaatacttttcgatgttccgtgttgcttagttcgtggtaagaatggcggtgggacttgcaatctgtatccgtgtaggaagtgtcgatttcgggaatgcaaatctcatcttcgacatccttgagccgaaaggcaaacttttcaaaaggtttggaacgaatgatggaaggtgcaacaatactacgttcaggcatggtgttatcctttgtaatttgcaggacagtttctgccttgttgttgagttccgtcccaatatgtccacgtgcgttatcgtcgcccttgttgaggtgaagcacggtctgaatatggatattctgttcacttgtccactgcattaaatcacctaccaacttggttgcttccgttgagttgttgatgtcgagcatcaaatcacgaatgccgtcaatgaccaccaaacccacattgggtgtgttgtagatggcataacggatgatttctctgcgttcattagggtcagcaatggctctaagatgactgaatttcaaattctgcggttccttgtctatcggcagttttgccaatttcaaaatacgttgcattacaagttggcaatggtaaggactttgttccgtgtcaaagtaaagtatcgtgcgtttactttcaggaaatgatgcttgatattccagcacttgtccattgacaagggctgctgcaacgatggcactcacattgaaagtcttcttagctttcgccttacctgtcgatacactgaagttccccagtgtgccaataatagcttcacctgcttgtagtacaacaggaggaagcgtaaactcatcggttacatgaatgagcgacttttgccaaatgttttcataatcagttgtattcattatcgtcctcctatctttcgccctgccaattccagcgcaaggtcggcatcaacgataatcttgcgccccacctgcgtaatggcacgattgattttaccactctgcttgatgcggttagctgtaggcaagctgcatccgaaaagacgtgctatgccagccaatccatacacatatcgcttttcttctttggaggaagaagcctttgttgattccctgctcgtggatatattaccgtgttgtgcaaggaaaagtaattcttcaccagtcatctgccaaacaggcttgtccagtaattcgtttatcgtcataatccaattgttttgaaatgaataactcacccttgcgcatagggcattcagtcagctctgacggtacaaaagtagagggcttttgatgttattccaagaagttgggatatagcgggaagtatagggaaatgcaaggaaatcagcgactatcaaaaacgctcaatatacattctaaaagcagactatttcgggcaaatacacattgtttctcaatcatcattgattgtttaagaaattacttttgatgtcctttcactggtaaaattattttctgtaacatgaaagttccgttattcttcgttttattcattataagttcataactttgtaatcaatatcaagataaacaatcatctaatgggacagaagaaagagcacagcaaccttatcaaggagcatttgaagaagcgaggtatcacccaaacatggctcgccaaagagttgggtatgagtttcagcatcaccaacgcctacgtttgtaaccgcaagcagcctaatctcgctatcatcttcaaagttgcggatttgctccgtgtgtcacccaaagatttagtgaaatagtttataaaatgtgatggataataaagtaaaagaatcactatacaatatatatctttcaatgcccaaagaatccttgtttgaaaaaggagatggttgggtaaatatggctaaattaggtataatattgcataaagctggtataaattataaagttatggggtatgataaacttagtgaattcgtacgcaagtctggtgtgttcgaagaatattcggacatttcttgcaagatacccgtaaaatatattaaaggaaaaagcaaacaccaagatataacacacaaacagccgattcgacaatcccaagctcaatatgtaaattcaaaggatgtagaaagattacaatatagattacgattagaaaataatcaatttataggtcagtttattccacaaaaggatgaaggatggtataagattattgatattcgtaatactgattttacgaagattgaagacaaggagcgtggcgtaaagaatctgtcaattttattcaaaagcaataatccattcaaccgctttgcatattacaagttcacatgggtactgcttgaaacaaatcctctcaagttcggtattgacttgcaaaaggaaattacactactataccccaaagatattgttggcagtctatacgagggtattatgcgttatccagcaggtgcggcaaagaagattgcccgttcacttgatacgctcaaaaagcaacttacacaaagcggtaaggaagttttcatctatgagttgttgcagaatgctaacgactatcctcgtcatgtgaaaattgctggcgaggataaagttttgtcagttgaggtggaatttcatattgccaagaactacttgacattcgagcatactggcgaatatttcaatccgaagaatattgcggccatttgtgatattaatgatggggagaaagcagataacacagaagccattggatataagggtattggttttaagaccgttttccttgacaacgactatatactcctgaatactggtaattatacatttagattcgataagtctgcaacggatgtaatcaatactccatggcagatactgcctatttggacagagaataatgaaattgataatgacatcaagtctgtattccgccagcatcctaatgacgagttcagagtaaagttcgctcttcaaccacgagataaggaaattctgaccgacgaagacagagatgataactacatcgatttgtttaccgatgtatttgaatcagagcgcgtcatattgtttatcccgaacatcaagaaggttagcatctttattgatggtcaggatgaacctattgtacgtgagaaagacaataaagactggtgtgtatcagattctcttgtagatgatattcctgaggacattacagataaaataaacgatgtcttggaaaatccagactctcggtcggatggttatgagaaaataccagagaagtacataaactttcgtaagactgcggtaaagtttgcgtgcaagaaagctgaaagaaagttgatgccagttgatgatgccatgctttattgctatctaccagcaaagcgggctgattggggcttcaatttcctaatgaacaccgatatggtgcccaacggacagcgtgatgatattgaggatatcgaactcaatcacgttattgctcgtattgcaggtaaacagttcttttattggatcaagcagcttattgaaagcaaaaaatacgaccttgactctatctttgcacttatcccaaactttgatgagtgtaagaagagacgcgtgtataagacgtttatagaggagttccaggaagaatttgaaaagttcataaaaggaaagccttttgttccatgtgtggataaggatggtgaacaaacctttgaatgcatcgacaatattattaacgacatgactggcatgacagcgaacggagtcatttcagacgaagacttcataattcttatggagttgggtgactactccttgccagttgacgagttaagacaatcggaggcattcatggatttcttgtacaagcattctccttcgcgccttgatgtaaaggttgatgctgttgtaaagaaatgtgaggaaactaatttccagacatggttgacagttcccgaaaacaatacacgatttataagacattggttgagtgaggataaactgaacgagtttgcgaagaaaaatatatttattgaatacaaaggcaatttgtttgcagcagaaagtctctactatgattttgacactaattgtaacagaataggattcttgcgtagatttgtaccgcatctttgcgaggcatcaagagcaaattttgaggaagatgaaaattggaaatcatttgcagacaagtatttcctgtctttctctgctgcgtctatgattacagattacattttatccaatgaggatgctatggcgttgcttaacgtaccaagcaattctgttgcattctatcgttatcttgcagtaaaggaagttgatttaaaggctaacaagacaaaggttccgtacattaccgaggatggtgatgcaagtaccgactataccaattatcattacttcttcaacgaagaagctcatggcttaacacgtgagaaatggttgggcgagaatgttatcaacgtactatcgcatatctattttgatagcctgactgatgacaagaaaggtaatataactgcaatatttactaaccttggattcgaggaatttaccaaggactccttcatcacgactgtcatagttggcaatgccgatttccgagcaaaagtaaacgctgccatagaaaacaattatgccgcaaacaaagcatttgttgaatatgtgtacggttgtgaagcgcagttgaaggaaaacgttttcaaggattatgtcttgcgttgtgttgacatccacaaaaatgaggtatatctttgcagcgatgacgtgcgatacttcaatcaggatgcgtatgctcagaacagcacctatgctgacaatatcaatcatgcttggttgcaggatagcatgatgtatgctctatcgaatgattattttgaaggtcgtgagaaggaagaggtaaagaaactggaatcgttcttgcgtcagcagtttggcgttaagaccttcacagacaagtcgttcttcacagatgttgtaatcaaaaacaaggcggttatctatgccagtcttgttgacgaggcaactatgctaacattcttggaatacctgaagcgagacgcagacagactctttgatgatactatgagtttcaacgacatcaaggatatgcctttacttgcctatgacggagccatagtaagagcaagggaactgaatatccagtatatcgaatacaacgaggacgcaaagattttgtgcgagaaagcatggtgtccgaggacgtatgttgtgctctcacagaaatataccgatgatttctctcaggatatgcgtcagctgttcaagattgtgaagtttgacatcaataccacaactgacatcattgctcagaacgaaaacttgcgtcaatcggttaattttataaacaataacgttgctttctggagatgggtaaaggtaaaccagaagcaaattgcatctgttgataagttcaagaccattccgttgcttgacaataacaacgcacttatcaattgtgcatcgctttacatttctgacacctatcaacaggagcaaattgagacgctggtaactacgtatgtaaaggaggcgcagtttgtgtcttcgtcttacatcgaaaccgccaatgagaacgagaaggcagagtggatgaaattgttcaggaaactcggtcttaagtccgataacaaggatattcttctctcagacattttgcctaagctttcgactattgaaactgagtctttggactcggtcgttgcaatgatgaccaagtatctaaaggatttaaaggaaaagtgggaagacaagagacatgaaataatccaacttagagtgcgcactcaatctggcgactacaagactctagagcaagccttaatcgtcaacatggatgaggattctgtatctgaaccattcaagtacatcactcttgctaatgaggttcatcccgatattctaaaggcaaataaggacttgcttcatgctatctctgaagagtacggtaattgcaatatcattaccgaaaagcaaaggtggattgacgaaaaggttaaggattatcttgcaaagtttgctgccgatgagaatagcgttgcagacattcacattcagtttgtacgtgaagtagccaagatcaagatacagagtgagtatgacataaatgacacacttcgtaagcagataaagtatctgatcaagtcgaatgaaacaacatacaagtttgctcatgagctgacacttggaacagaatattctccaacgtgcgactttgaggcaaatggtgtgtctgaattgtcgtatctttctgacgcttacatcttcgaaggtaacaaggatagcatcaagcaatatttcaaggcggagaacgttcatcagaatatgacacgagaggacttgaagtatctcgcaaaccgcacattttcttgttatttctggtcgaaatgtttctctcgtcgcttggtcgaatatgaatcatgggtggaagatggatgtttcaataaccgcgtgtgcataccaacagagaattctgttcaaaagccagagttgttgtatgcacctcacatagctggttatgctgttcgtgccaaggcacctcaatggcaagtgaaggttccttacaaagctgttgttgactctattgacaatcgtgatgctcgtgaattatttgagaagatcaacttctgtaaggctctctcttttgaagattgcctttattaccttgctcgtgttacgcatccaagagaggaagaaactcatttccgcagtatagtgattaattggatgctgtcttcgcttattcaagatgagactttggttgacaactatcgtaaaacaccaactgcagaatggcgtaatggtaaggggcagaagaagcatattacggaactttatgctatccatccagatgcgacacaggaaaggaatatcttccgtggcgatgagtttgttatgcagataagtgctttcccttatgatacagattcgtttgtcaaggtctgcaacatgctgaagataaaatgtctgacaagttctgattttgtggcaacacctataggcaaacaagatgaaacagctgatatggttgccatactcagacctcgtctgcttatcttgtcggctatcgagaacccagatcgattccaagaactctacgaacgctataatacaaagctgtcgcagtatcattttgttgtatgtgaaaagatagacctcggttatgacactatacataatgatgtggagcgtatctataacgatgataatcacctttattatgtaagctcatggaagcataatcgtacctttacaaagttctgtagtagattgaagcgactggtaggttttgacgtgtatgataatgtatgtgaagacgttcttgatgatagcgtttctgtagaagcgtgcatcgaaaagtattgctcttcgcttgcatacgaagaaaagttccgcacttatcttagattgttggatttgaccatcaatgttgagccagaggaagatgaacctatcgaaacagaaaacgattactatagtaatgctacgaatgaaccaacagattctgctacagaagcaactacagagacatcaacagaaaatcagtatgttgacgatacgggaactattcgcgaggatgacaagcctggtgcaccaaataaagatgtaacgtcaagacctgttaacgaacttgaagttggggaagaagcagagacatcaccaatagaacctattcaaaccgcatcgcagcagccaacttctgactctcgtccacaacagcagtcgcaacaaactgaattaccagttggtcaaacaacgtcatctacagcagaagaagagtcggaagatgaccttggtcagtatgacacatatgaacaggttgatgaagaggatattgaagactacgatgacacagacgatgtagaagctgacgttgatgaagatgttgacacaacggataatgccagcacaacgtcttttaatactcatacatctaacacgtctcgcgcttcatcaaacaagcctcatacggattatgatcctgatcgtaatgggtacatggggtctgttgataaggaaaagaattatcaacctgttggcgacagaccttacaaacctcgtacacgtaagcatccgaagatcttcaccaagaaggaattagaacgccttcgctcacatggaacgcctcttgaactggaatcattaccaccaacgagggaggaaatagacctcttagctcaatgtaacatcaagccagagcagattgccgacaccaactatattgctcagttgcgtctgtatcagaacctcagaaatgagatgcacgcagagcctgaggaaacaatggaagagttcgtgagtaatgcgagtgatgtaactgtacacagacttaaagatgggagatacattcatacttgtagtgctgctcgtggcgtgatgtatgcttctccttctgtatggaataagatggttgatgacaagtggaagatttgcgtttatcttgatggacaaggcaagaacttccattacattaacaacgccgaggaattcctgaaactcgtagaaaaagacgatgttgttatcaagattactggcaaggagaaggttgatgttgtcagggctctttatacaggcatacttgaagatgccaaaggtactgcatacactttgattcgtgtggctgctcgtacaaatatggatgccgtattcgctcactatgttggtgctatgtcagaagtggaagatggtaacgatgattacaacgataacaactattgattatgtttgacaatatcaaacttgcaaactataagtcattcttcgctgaccaggtgaaggaggctattgacgagcaacaaaagatcaatcgctcgcagatgcggaacttattcaagactggtgaattatcgcttgcttatattgattccattcagcatgagacaggcatgattatcctcaaatgccctcgtcgtatggctccacgcttgaaagttctgaagggcgtgtgcataattaagaaaggtgctaagcaagtattaggtgaacacgttacggagtgggtctgccgttgggaggaattcgttgataataaggattttcattctcctggttctgacatgactcccatgtactatgttcatactggtgattccaactatgactatgttgcatgctctggattcagttttaagttgtacgatatcttatcaaaggcgttggctgatggcaaaagtctttcgcttatcgttcataatccatttcctcctgtagagtatttctgcaaccttgccagctacatggatgcattctcttcaaacgaggaattgaaccttgaaccgactatagattatgaggaatggacacctgaggaacttgcgtttgatgaacagaagccaacaggaatttctgacacaatcatagacacgctcgctaatgaacattgttgtatcgtacaaggtcctccgggaactggtaagagttacaccatcgcttctgtgatttcatcgtatcttgatgctggcaaaaccgtctgcgtcaccaccatggcgaacaagggccttatcgagttgataaagcagaagcctttgcagaagtatgtaaagggaggtcgtgtcagcaaaacaaatctctctattgacgaacacaaacaggtgtctggtgtaaaagctgcctctgccgacttgcaggttcctggtggcgaaatgctctgtgcgacaaactatcagttgtcaagcgtttttagcgaaaagaagatgactctgtatggtttgccacaatacgatttggtagtcatagaagaggcttctcaggcattccttactgctatagttgcattcaaacagttgggtgtggattgtatgatagtaggtgaccctatgcagttaccgcctatcgtaaaactcaataatcctcagtacaattcgtggaatgtttcaacgcaggtagaaggattgaaaacgatggcattaggttcgcagattaagtcgtaccgtatcgtcaccacattccgtctaaccagacgttcggcagcactcacaaaatatttctatggcaaccgctttgtatctgtaaagaaagaataccttgattttactgatgcaaacagccctctttttccatccgagggcggtgtactataccattgcacaaatgatgttcgaaatggcgtgtattctgataaagcagatgcaataatccgtaatgtgattgatacgatggagaagtgttatccaatgcgatcgctggcgattaccactccattccgcgattcggtaaaagaactgcaaaagcgattctgtacgtcagatattgaattggacatcaccattgaaaccatcgaccgaatccaaggtatgacagttgattacgctgtgctctatgttcctggacgcaacccaggattcgcactagaagaccgtcgcttcaatgtggctaccagccgttcgctcagcactacgctcatcatttctgatattcctttgaacgaattccataccgtttcgccaacagtcatacaattcgttgacaattgcgataagtatgatggtgatacacgagtaatctcaaacgatagacttgaaactacaccaattgcagaacctaacccacatatagaggaatctccaaaacaagaattcgcaaattcttctattggcgtaaaggttgtcggtaagattgacctgtcgaaatttgagtgcaaaaagaaggaactgagttcagacaagaagaactactacatcatcgacacaaatgtctttgtaaattgtccagacattatcagaaaaatcgataagaagtaccctgtcattctgtctgctaaggtaattgatgaactcgataagatgaagataaagttgagcgatgagggcaaacgtaatacagaaaaagcactccgtaaccttaacagcgaaactcaacatgagattatctatgagtttgccgacacatctcttttgccagaagattttgataagcactcaccagacaatatgattgtttccgtactttttatttttcttacatcatttataatttttacttttccataaatcttgaaattagttagatagagagtctcagtaataattttatatctacgtaaccattctgtttcacatatggcttatgccctgagcaaatctggaaacggaatagttacgtttaaaccgcaatgctatcaagaaagagtagcaatcggttggcaacgttcacagatgaaactccagagtcaaaatcaagggatacaagattaagttgagggtatcggtttttgagtttcttttcgatgcctttcgaaactatatggttcgcgatacaaccaaagggttgcaagctcacaacattagtaacaccttgctttaccatgcttataacatcactcggcaataaccaaccttcaccaaactgcgcggctaatgaaacgatgccatccacttcttttgcttcttcaaatatattagtaaatggacggaaatacctaaaacgagaggctattttgtttattttcttttgtctacgccatatcaagctataaatgcttttaacaacaaagtcgggtacattcgaatgacatagtcccatttgtttctcaacaataacattgacaaagttttgcagaaaaaatggtgacagaagagcgggtaccacctcaatatttttggatagtattttatctaccaagaactgatgcgcaaaaggattaaatttcaagaagatctcgccaacaattccaactgtctgcacgtctcgttcttctgtgattgcattaaattcctctgctgcttgggcaattagattcataagtcccttggggctgttctttagtatttgtgtagaggccaaatttaaatatttgtcgcgtaaagcgagggcggcattgctcgatttagctccaactacaatggcatcccttttcaatcttaccactgatgagtggtaaaattttgagattgtatcaccatatagaaatgttgtcgtaatgattggggcaaacttaatccaaggcacatcgagtttgccgctttggtttttatcctcctcttccgcgctcgtagacactccaagtgtgattaatggcaccttgtcaaagccgttggcttgcatggcacgtcgaatgagcgcagcgtaattagtggctctgcattgtccacccgtttgggtcataaccacagatattttgtcgaggtcatattgtccggaacgcaatgctttgacaaaatcgccaacaatcagtgtcgcaggataacacacttcgttattggcatacttcaatccatacttggcactttcagaatcgctcggaggaagcacctcgacatcccagccaaaaagtcggcaaagagatggcaacaaaggagtgagatactccgtaaagtaaggcgccaaaatgtgacgtgaaattggcggaagcgcatttgcctcttcatggcttgtgtttgattttatgacaccctttctgtcatgcgcggataactttcctgctttgttcccccctcgaagagattcgacaagagaccttacgcgaagtttaaggctgccaatattgcttacatcatctatttttaataatgtgaaaggttttccatggcgtttcagaatgcctcgaacctcatcttgtatgaaagaatctggtccacatccgaaagatgtcatctgcacaaagtgtacatcgtttggttgttctgcgcaccattggcccgctttgatgatgcgactcatgtaagcccactgcttaacaaggtatgtgtcgccagcgcttgtattgaaatcgttgcgcactatatcctcagaaatgacatttacgcccaatgacgctatcatttcagatagtttgtgttgtaccaaggggtcggtgtggtaggggcgaccagccagcaaaatcgtcaaattgccatttactcttccatctgcaagaatttcctccgccatttttttgacttcacttgtataggcgtcttgtgccaatatggcggcactataagctttgtcaatagtacttttgcacacgccgagtttcttgagataaccgaaaatttgttttttcaaaagagctttatccctaaaattgataaccggggaatccacatgcgtacgcaatttcatggcgccacgtatcacatcggagtacgcggagacaatggggcagttgtagctgtttatgtttctgttatcgtcttgctgttcataaacaacataaggcataaagataaatcctgttttgtcaccattgagtttcgatattttatcatcaagttcttggatatgcgcatgcacgagcttggcagggaaacagatattgtcactcatcacgcttcccaatgcctcctcgtagcgatggaaggtagattcatcgctaagcattataccaaacccagctgttgtaaacagggcgtgccaaaacggataatcctcatacatgttcaacacgcgaggtatgccgacaacacgttggcaagatggtttctcgacacactttctgtcaaaaagcagcttgtatttgtagatatagatgtttttgccttttgaagcccccttgcccttattgttgaaaatacgctcgcacttgttcccagagtaaaatttatgggtgccggcaaatgtatactgggttacgaagcagttattttcacaacctttacaattgagcaatttggtattataagctgatacggataataggtctgctatgcttcgagaacactttacatttttttgctcaaacaaattgattgcattgagcgcgcatccatacgctcccatcatctctggcatgttgccacgggccaccttggtgccagttaacagttcaaaagcacgtacgacagagtcgtttttcatagtgccaccttgcactactatcttattgccaagatgttcattcccatgaagtttcaatactttatataagcaattgcgtaccacggaatatgacaatccacatgctatatcctcgattgtaactccctcgcgcatcacttgtttcaccttggagttcataaacaccgtgcatctcgtgccgagatcgcaaggtttttgggcattgcaggccaatcgggcaaagttttccacttcgtaaccaaggttgtgcgcgaaagtctgaatgaatgtcccacatcctgacgagcacgcctcgttcagctccatgcgcactacaacctcgttctccacaaagatagctttcatatcttggccaccaatgtcgagtataaacgacacattgggcataagatgagctgccgcgcgataatgagccatcgtctctataattccgtcatccaaattgaatgccgttttgatgagttcctctccatatcctgtagagcaagaacccacaatgtgtatatcagcccccaccttgtccgctgctttttgcaggcgtaacaaaccgtcagacacggccttgataggattgccaagattcatggcataatctttgaaaacaatttggcctttaccctccttgttcattcttacagccactattttagtggtggtggaaccagagtcaacgcctatgaccacttcttccacgccacgttttaagggatagagtggggtggcatattgttgtttagatttcaaccagttttggtaatgtaccacattctcaaacagtggcggcagcccttcttgaacatcagtcttgtcgtgccttgacgtggagccggtgccggtgaccactttgcagtttctttgatccgctcgagagcggtcaacgagcttttgtgcagactgcgccaacaatcctttgagctcggataatttcctcggttttgtatcgccggatttaaatgcgcaacccattgcaggtatcagattgccattttcaggtacggtcaaatcgtcgtatggtatcttaaggtattcagaaaacgcttttcgcagagctggcagaaatgtgagagggccgccacaaagcaatattggaggagtgaagtcgcatccgcggctaagcgttgttacagtttgaacggcaatactatggaaaatactggcagcaatgtcactttttggcaaattgcgcgacatgagattttgaacgtctgtcttagcaaacactccacatcttgctgccattggataaacatgttgggccttttcggccaacgcgctcatttttgcgttgtcacaacccataagcaccgacatttggtctatgaaagctcccgtacctcccgcgcagttaccattcatgcgcagctccatacttttgccattgaagaaaaccaccttggcatcttcgccaccaatatcaacaagtgttttaaccttcggataacgttcgcgcacaaacactgtggccgccactacctcttgcacaaaatcggcttttagctgctcttttgtttgcatacctaccgaccccgtgacacatagtttcgtttctatatcgccgaactgcttgtatatttcatcaatatacttggacaccaatgccataactttggcgttgtgccgctcataacgcgaaaacaccaagcgatggttgttatccaaaacgacaatttttgctgtagtcgaccccacgtcaagaccaatctgatatatattgcgcatctacaccaatatctattaataaatctttttctgaaaaaagctttttacaatttacaaaaatactacaaatacagagcttaagcaaagattttttattttttttgcaaaaacagaacgattcttgcaaccatttttaattccatttcgtctaaatataaaacatacaatgcagatgacatgaaaaaaactttattattactcgtttcagttgttacgctatgctcatgtggcaattattcaaagacattcaacagcacagaagttaccagtgcgttgaaatataaagatcaaaatccaatcatgttaacgtctgataatggattacaactcaaatcaaaaattttaggattcaagactctttccttgaaatcatttcttaaacgatagttttcgggtgtaataaagggtgtaagtcgcataactcgctgatttacacccttgtttgcggagagagaggaaaatgaccattccgctgcaactccttgtatcatagtcttttatttttttatccttttaaattgtagccatattgtagccacaacagagtattttgagagtacacgcagatactgctacccgaaatgcgcacttgcatttcttgggttcaaaagtacaaaaaagtagaacatcctccaaattattgtgggaaaatgttttagaaatcttttggctacaattttcagtgcatggtgcaagtctatatatatagatagaccttgcaccatgcactgacagtcccaaaggtgtgattgattgatatggcaggctcaatattttcgcctacgtattgggcaacacggcaacaaataacgcataatgttaaaaatgcaaaatggcaatataatgccaatattggcaatttaatattctttctaaagccctatttgttaagaactttgcagcattatttctaacaaaaagacggatacatatgaagacaaagaaacaaaactccggaagtaacgcaaaattctacgttgtacttccgacacttgaaatcatgctctccgccagcaaaaactgcaagctaagggcaggctatgccaatatggaatattccaactttatgaaacactgcaagatgcagaccgaccttcgtatcaacacttatgcaagatgtgcggcagccttcgatatggacgtgctcttgatacatctccccaagggtatgattgagtccatgatagcaaccacgccccataaaagccttcgcttctccacaatggagcaggaagatctcatcgtcattctcaatcggctatgcaagctggacagtagaagatttaagcagcatcttatgcagttattgcaccaattggggaaggactctgaatttccagacggatgataatccacggagagcaacaattcaatcctaaactgaaaagagaaatggcatatgacagaagaagacaatttacaaaagacggtaattgcagagttacgctcactaaggaacgacatggagcggatagccggctttatcgtggaaatgagacgcgactattccgttttggaggataagatggaactcagttcctccgacgtcatcagactcttgggcatttcgcgggcatcccttgcccgatggagggacaccaacgcaatcccgttcaggtatatatcatgcaaccacgttgcctatccgttcaagggactttacgtcgccgtcaagagcggacgtgcctccttcaaggggttcagacgagtggaagccctgcaacgactcaacgcctacaaggatggtgtccttaaaggttatatgggaaatggtcaaactttatttgaggagctatgaacatcaaagaagaaatactaagccgaaccaacaaaggactggatgtgttctgcttctatatgcccatagactttgtgccaaagcgcaatttccgaaatcctttgtatgacgataggcgtgcatcgtgcaatatctatctcgacaacaagtccggctgctaccgaatgaaggactttggcaacgatgcctactccggcgactgcttttggtttgcagccacaatgctcggactggacgtgaggaaagactttgttaaggtgcttgaaaccataaatcgggacttgcagctgaatatttgcattgaaaggaaagaacatagtaatccccacacaatgatgatgaaaccttgcaaaccaaccttagtacaaccacctaaccagatcaagaagatggaaggtaaaaaatggtacaagctaattgagcaatctttcaatgtcaaagaactagactattgggagcaatatggtattgatactaagactctgcaacgttttcatgtaaagtcgcttgctcgctatgagtctgtttccaatcagggtaagccgtttacacttggttcaacacatgaagatccgatgtttgcatacagtatggggaagtttgtaaaagtctatcgccctaagagtaagctgcgctttctttatgggggtgagaaagtgaacgactatgtctttggcttccagcagctgcccagcaaaggggatgttgttttcatcacaggtggggagaaagacgtgctttcactttcggctcatggtttcaatgccatctgtttcaatagtgagacggcacagattccagagaatatcatcgaggggttgcagctccgctttcgacacattattatattgtacgatacggacgagacaggtgtaagggaagctaaacggcagacagatgcacttgctcaatacaaagtattgagtctaaccttaccattgcaagggggtaagtcggagaaggatatatcggacttctttgccttgggtaatgaagcaaatgacttgaaagtgcttcttaatgatatgttcaccaatatgtatgcacagacgatgatgatattgcaatcttgtgagatagactacgataatccgccagacgcttcaaagtcggtggtggcagtaaatggtgttccgcttggaacgcaggacaatctgttttgtatcacaggtggagaaggaacaggcaaaagcaactacattgccgccatccttgccggcactcttgggagagaacgattaaaggcagagcaaaccttgggattggaagtaactgccaaccccaaaggattggctgtacttcactacgatacagagcaatcggaggcacaactctataagaacttggagaagacacttcgcagggctggtatcaagtccgtgccagagttttatcattccctctatctagcatcgctatcacgcaaggacagactgaagattattcgtgagagtatggacttgtttcatcacaaacacagtggaattcatcttgtggtcattgatggtatagcagacctgatacgctccgccaacgacgaaacagagagtatagccatcgtggacgaactctatcgattggcaggaatttacaatacttgtatcatttgcgtactccattttgtacccaacggcatcaaactcagaggacatatagggtctgaactgcaacgcaaggctgcgggcattctctccatcgagaaagatgacaatcccgaatactcggtcgtcaaggcattgaaagtgcgtgatggaagcccgctagatgtgccgataatgctttttggatgggacaaggaagccgatatgcacgtttatcgtggagaaaagtcgaaagaggataaggaaaaacgcaagaccgatgaactgttggctgtcgtaaagtctgcattccgtgccaaactaaagctatcatatcaagagttgtgcgatgtgttgatgcgtgaaatggaaatcaaggatcgaacggcaaagaagtacattgcctatatgaaggagcagcgtattttgtcgcaagacacaagtggcaactatcaaaaaggagaattatgtcatacatagaccaaagaaccgaagatacatggcagaaacgcttgtttgacaagctgatgactgtcgaggacaaacttgatcgcttgctggttttacaggaacaatccatcgacacaaccgtacaccctccattgaaacctgaatacttggacatcatcgacgtttccaagatactcaaagtggagcagaagaccatctataactgggtttgggctggaaagataccctatcttaaagccaatgggcgtttactctttctcagagaagagatagatgagatgctccgaaagcgggagggatggtaattattgttgcttatatttttttatccgcaattattttgctggggcaaaaataatacttacctttgcaagcagaaagttggttgcggttttaccgcacatgaagataacagtactcgcttggcataccgtaagatctgccggcgagtcattttttttttatatatactatggcaaataaaaaatcacgttccattcaggaacaaattgatttactgaaagataggggcatgattattgaagacgaggattttgcccgtcttcacttgaaccatatcagctactaccgattaaaagggtactggtgggatatgcaaaaggacagagaccatcatatatttatggaggaatccagatttgaggatgttatctcacgttatttcttcgataaggaattacgcctgatactgtttgatgccattgaagcgatagagatagcactacgaacaaaaatgatttatcatctctcacaatcttttggcgggctattctataccgacaaaaaactctttgtaaatgaatctctccaccaacagcatatagaggatttgatgagcgaatttatgcgcagtggtgaagtctttataaaagaatacaaacgcaaatacggagtgtggaaagacgggaaatgtacatcatttacccagcagcctgatgcgtgggtgatttttgaggtggcaactttcggtaccctttcaaagatatacaagaatctctgtcatcagttaccggaaaaggcgagaattgccaatgacttcgggcttaacatacacacggaactctcaagctggctcgaagctatatcctatttgaggaatattgtagcccatcattccagagtttggagtcggaatatggtaaaacgacctatggacatcaacaatcccaaaggtatatggctgagaaatcctctttcggagtttgccaagaaaaagccatatctgataattacctctatgttgtacctgtgcaatgctatcaatgccggagacacttacaaaaagaaaattatctcattgatagaagaacgtccggatattccaatttacaagattggcttccctaaccattggaataaagaacctatctggcaataatgaatttatggagataattcaaccaattatcatacacaatataagaatgccaaaataaaaatttttcaaaaatcgaaagtcaagcacaagaacaagtgcttgactttcatttggataaccaatacatatttagtgtctccatttgggtctgaaactctgtgaatggctatcttcaaaggaaaggctatttcttttagcaaatatatattttttcgtggatttttgagctgactatggattttaatatgtatctttgctgtcgtgaataatgtattgtttcgcgacaaaaattatatgtaaatatgaatgaaagtattgaaaataaaatacttgcaaaggtaaagaagtgcggacgtagttctgtattctttattggtgattttatttcgtatggtagtcgaaattcagttaataaagcattggagcgcctcacggcgaagggactgttgcttagagtcgcacgtggtatttactgctatcccaaaatagaaaaggtgtatggacttggtgcagtccctccatcgcttgaagacatcgccaaggcaatggcaaaaagagacggggcaagaattgtcccaacagggctttttgcccaataccaactgggacttactcaacaggtgccgatgaatgttgtttatttaactgacggagtgtctcgcacaatagatcttggcgaggggaaaaacataaaattcaagcgtgcctcacccagatactttgccattcgcagccagttggctcttcttttgacaatggcacttaaagattggaaagtggaaaatctgacggaagaacagattgccctcattaaagcacaggtaaacgcaaatccccgctttcaggcgacagatctaaaactaatgacctcaaaggtaagggaatttataattagcttgtatgaataagtttttgaatttatcagattcacagcggaaaaccgtctatgaatcaattgcgcataaggtgggactgccagcccaagtcgttgagaaagatttctgggtaaccgcaatcctacaggtggtctttgcattgcctgttgccaggcatatagttttcaagggtggtacaagtctgagcaaaggctggaaactcatagagcgattctcggaggatatagaccttgctgtagatcccgtattctttggcgcgcaggaaggagaccttacgaaaaaacaaatcaagaaattgcgtaagacttcgtcgcttttcgttttagtgaagctagctcctatgatttgcgaagagcttgaacggcaaggattacagtcgtttattacagttgaagcacaacccaacggcgaaggtgataacacatatcccgaaccacgtcagatttatcttcattacaagtctgtctttgataaggcactcacatatcttcgtcctgatgtagtattggaagtcagtgcgcgttcattgattgaaccgacagagccaatacaaatcaaaagtatccttggtgagcacctccctattatgccattgactgatagtgttatatatactgccattcctgcaaagacatttcttgaaaaggtgttcttgctccatgagttattctctgttcccgggcatggaatggtggctgaacgcaaaagccgacacctttatgacctttacgtcatgatgaataaagatttggcaagggatgcagttagtaatgatgttttatgggaatccatacgccatcatagggaaatttacacctctgtgcgaggtgtggactatacacctgatgtacgcaaacgtctccagcttatccccagaaaagatattattgacacatggagttctgactatgagtcaatgaaagaatctatgatttacggggaaaagccaacatttgatgaattattgaaggggatgtcaaaacttcaggagatgtttagaggagaagattgtcataaataatgcttacggttctggaatagaacaagatttcggcaataaaatggtattattgccgaaatctaatcgttaacacttatagttctatatttagtgtctccatttgggtctgaaactctgtgaatgactgtcctcttctttattttgaacaggagacggctcattgcttatcttgacagaatgactattgccagataaagcctcttcttgtttcatgccctccgtttcttccttttcctcttccgatggtgcaagtgtaagggcaatctttctgtccaactctgccgactgccctttgagcgaacgaagctcttcttctttcttccacgttccattagcgatagcagtatagatttccttattggctgcaaccttctctttctccttctcgtgcgattctatcaccttggggatacgccccagcgcacccaagaaattctcacacgcaagtttcgggtccgcagccaacttaccgttattataggtatagtaaatgctttcctgtcctttgacaaagaaacggttcacggagcagtcaaacaaatcctttgaggtactctccgtcttcaccatgatagagaaaccataaatctcacctattttattgtactcacctttggtgcgtgccttgtcgttaatttcttgcaggcgtgcggcaatgaccttgatgtctgtgctgtcctccacaccctttatgaccagtttgttgataggattgccctctgcatcacgttccacgcgcttctcaaagcacgccaagtctgccttggcttccttgatcttgtctgaatggaaagacacggagctgtcaatctctgccaactttcccgttgcggcatcacgttcacggaggaagttcttacgctcggattccagcgtggcaatcttcttgtcgagtttggctttctctaacaagtccgtattaccagatagcacggcaacatactctgaaaagttcataccgctatcctcgtccatcgaaccctcgtcaatggtacgactaccgagcgtattggtcttcaactgattgataaacaattgcttgttatgcagaaggttgaacttgtagctgtcaagtgaccgttccacggcatagataatcacatcgaccttgttgtctgcaaattctttggcaaccaaatttcctttacggattgcccgaccattgcgctgctccaaatctgagggtcgccagggtgtgtcaagttgatgcaccgccaccgcacgctgctgtgcattcacaccggtacccaacatggacgtagaaccgaagatgatgcggatgtctccacgattcatcgcttctaccatcgctttcttggctttctcgttcttgcactcctgaataaagcgtatctcgtaagacgggatatgataatcttctaccaatttacgcttcacctcagaatagatattgaagtccccaccgggcttgtaagtacccaagtcagaaaacacaaattgcgtacctttctgtgcatcatacttctgataatagtcattgagtaatttcgcacaatggcttgccttgttgtcgatatggtctgagtacccgttttcgtctatcatgcgtagatccaagctcatcttgcgcgcgtaatcagttgcaatcagcatctttgccttttcctcactctcgctcaacggcgcacgccccaaaagcgtggcatcaccgtttttggcaaactccatcaacttgccgataaactcctcctgttcaggtgtcggcggaatgttatggagtatctcgtttttttcgggacgatcgatgcctatatcctttgctgtgcggaaatcgcaaatctccgcataaaagtaatgggggtgaatgtaatcgactgattactaataaaaagcagaatatataatctgataaggtgaacgactaagaaacgagcgagtttctttccctttctttattctgcaaagtctcaaagaactctctgtttgatgttgcaaagatagcgatataattcatataagcaaagtatttacgttgttttttcaatgaaaatcaaccttagacatttctaattctataaaatcgccattttaaggtattgcatatatctatgaacaatggtaattttgcaaaatgataatcaaaagaattcttttaatcttcatcattctacttctgctgtttcccactgctaatgctactattttgaatttagttgtgggtgatactatatagtctacccttaaaagcctaatattcctctgattcacagtatattatactgcaaattatttgcttatatctgcaagtttttgtacctttacattataaatcttgcagatatttatgcttaaacgtacatccaaacagctctctatgttctcttctttagaggacatgcttagtcatcaacatccccttttccaacttagtaataagattaattgggagtgttttgaaaatgctttttctccattgtattgcaatactaatggtcgcccagctcatcctattcgcctgatgtgtggtcttttaatcttaaaacatttgcgtaatgtttcagatgaaatggtggtttctcaatggagtgagaatgcttactatcaatatttttgtggtggtcttgaatttatgcccaaacaaccctgtgacgcttccgagttagttcacttcagaaatcgtataggtgaggaaggtatggagttaatattagcagagagcatccgtgttaataccgaccatgatgacgaagatcattttgatacggctttcattgattctaccgtgcaggagaagaatataacctatccaacagatgcgaagttgcataaaaagataatcaaaaacgttctgaagatagttcatgacaagagtcttcctctacgacagagttatacgcgtacgctgaaaggaatttaccgttcccaacgttttcgtaatcatcccaagaatcgtaagaaagctcttaaggcagataggcaactaaggaccatagcaggaagattagtaagagaattagagcgtaatcttgagggaaagaaagggtatgagaatatgtttgagctatattacaaagttctttctcagaataggaagtcaaagaataaagtatattctctgcacgaaccagatgtggtttgcgtcagcaaaggtaaggaacataagcaatatgagtttggcaataaagtatctattcttcgctcatggtcaggacttattcttggtgcatgttcttttaggaatgaatatgatgggcatactatcgaaaagacattggaacaaacccgaaggatgacaggaaagcaggtggataagttagcaggagatagagggtatagaggtataaagcagattgggcagacaaagatactcattccagacgttcctaaagctaaagacagctactaccaaaagagaaagaaacacaaactattttgtaaacgagcaggtatagaaccaacaataggacatcttaaagcagaccaccgattatctcgcaacttttataaaggtgtgaaaggagatgctatcaatgtattattagctgcggcagcatataacttcaaaagagctatgagagctcttttgtaccttataaaaagaatcagcataaagcttgtcagtacaaactttatgctgaaatatagtttttaagggacgactaagtaaattccctaaaaagttggtaatttcgccattattttgcaaccttatggttgaaaataaacaacttacaaacatatatagcgatgattaccactgacaaagttaatgaaatattctgtgtattggatggcttctgcaagaatttagataccgaattaactaaagatctccatatcgccccatggactagggatataagcgaatgagaaactgcaaagggcaaatgtccaaaagcgaaatcatgaccatcctactgtgctaccattttggctcattccgcaacttcaagcactattacctctttttcatcgaggaacatttggcaagctatttcctctatgccgtttcctacacgtgtttcgtggaactcatgccctgcgtatttttcgacctgatgcccttcatgcgcatccaaggttttggaaagtgcatgggcattagtttcgtcgacagtacaatgattccagtatgccacaacatgagaaggaaatttaacaaggtgtttgatggacttaccaagaacggaaagggaacgatgggctggtgccttggtctcaagctgcatctgctgtgcaacgagataggcgacgtactcatgttctgcctaacccccacaaatgaagatgacagaaaccctagggtgtggaaggtcttcaccaaagtgctctacggcaaagtttttgccgacaaggggtacatcaagcaagaattctttgagaacctcttcaaccaaggcatccacctcgttcatgggctcagtcgaacatgaaaaacaagcttatgcccttgtgggacaagatgatactccgcaagctatatataatagaatgcatcaacgaactgctcaagaacaaggctaaccttgtccactcacgccatcgttccgtacataacttcctcatgaatctttgtgcggcattgactgcatactgtttcttcgagaaaaagcccgagggactgctagtgcgcattgaaaagagtaggcaattggaactattctaaacaaacccttatcccgaactggcgtagaaactatattctaataaagtgatattttaggctttaccataaactaaacataatagattgtttcccataaattccttttatttcctactttacccgaaaactttttcatctcttcatatacctataatttagctacttgataagagtattcaccattaaaattatcaagcaatggaatcaaataacaatgacaattatgtgctggtcttggaagaccgcacggaagtgaagaatgagcaagaagcgggaaaacttttcgtagtttctggtatcgatgacaagggcaaccttaaaaccaccgaagcaatcgctgccaatcaggcagcgttcctaaagttcaataataaggacgggcttttgaagaacttcatgacgaacttcctcaaacagttcaataacccgactcgtttcggactgtacaaagtagtagcaaacaatgtagaacaaggtgtggacaatcttcgcaccatgttgcaaagtcgtgagaaacctgaaagcaaacagcaactgacagagattggagtgtcttttgacgattatctgccgaaaaagaagaatgccacagtcattgatgaatcgaaaatcaattggaagcaactcgacgacctcggtcttacccgtgagcgattggagcagaatggagaattagacaagatgctcaattggcagaagagcaatctcttgacgattgccgtacctattggcgacacgaccatctacaccgaagcacgtcttgcgttccgtacggacgataacggcaatatcggtttggcaattcatcctttgagaaaagaaccacagcttgacttttcctatatgggctacaagttctctcccgaagaaaaggagcaactccttgctacgggtaatcttggcaagacaatcgaagtaacgcccaagaacggcaatgctttttctgcctatgtctccatcgatccgcagaccaatgaaatcatagccctgcgtgccgaccgtgtgaacattcccaaggaaatcaaaggcatctcgctttcagatgcgcaatataaagatcttgtgaaaggcaaagccgtgaaggtggagggtatgaccgccaagagtggcaagtctttcaacgccaccttgcaggtcaatgccgagcgaaagggcattgagtttatctttggcgacaacaagagtttaagagaacgacaggaacacaaacaggctcagcaacaaggcgtacctcacaagctctgcggcttggaactatctgagaagcagcgtgaagcattggatagcggtcgcacactctatttgaaaaacatggtcgataaggagggaaactcctttaacgcctacgttcgtatagacaaggagcagaaccgcccacgtttttacaagtggaatcctgacaagaagcaggaaaccggcaaggaaaaagtggttgccgtagccgaagaacacaagacacaggtagcggtcaataatgacggcaagaccaacgaagccacgaagaacgtgaaagagccattgaagacagggcaaacacagcccactgccgcccaaaagaagaaacaggacgaaaacaaacagaagaagtctcgtggacgtaagatgtaacccctaattctattatcgactatgacaacttgtattattgccgagaaaccctcggtcgccagagatatagcccgcattgtcggggcaaatagtaagcaggatggacatttagaaggaagtgggtatctcgttacatgggcaatgggacaccttattacccttgctatgcctgaagcctacggcttttctgcctacaaagccgaagacctgcccatccgtcccaattctttccaacttattgtccgccaagtgcgcaggaacaaggaatttgtatcagatcctgctgcattaaagcaacttaaagtcatccgttcctgctttgacaaggcagatcgtatcatcgtcgctactgatgcaggacgtgaaggagagttgatctttcgctacatctatcaacatcttggttgtaggaaacctttcgaccgcctttggatttcttcactcacggataaagctatccgtgagggcatggctaatctcaagccgggaagccattacgataatctctatcactccgcgaaggcaagaagcgaagccgactggctggtgggtatcaatgcaagccgtgcattgtctatcgcccgcaggggaggctattccttgggacgggtacagaccccgacactcgctatggtctgccgtcggtacatagaaaatcgtgatttttcttccgtcccctattggaaactctccgtagcagcagagaaagagggcgtatcgctgaaagctgtgagcaatagtgcatttgacaatgaagccgatgcacagtccgctctcgccatgcttcgcgaacagagccagcttaccgtgacttcggtcgcaaaaaaggtgggacatacgtcgccacccctcttgttcgaccttacctccctacagaaggaagccaaccgaaagcacggcttttcagcagataagaccctctcaatcgcacaaagcctctatgagaagaaaatcacgacctatccccgcaccggcagtcgatacatcagtgaagacgttttcgaggaagtacccactttacttggcaagataggcactgcacttccgacaccacttaaccgccactcggtggacaacggcaaggtaactgatcaccacgccattatccctacgggtgaaactccatcgggactatcggcagatgaaacaaccatctaccaaatggtagtccttcgattcatcgaagccttttctcccgattctgaggaggagcgtatgcaagtggaattgaccgacggtacaaacacctacatttggaaggcgtgccgaagtatctccttgggctggaaagccgtgcagcatagtactggcacgaacgatgaaaaaggcaaagaggaagaagaacagactttatccgtattgcccaatctaatagaaaacgaggtgttaccactgctttcttcagaaattaccgagcacaagaccaagcccaaaccgctctatacagaagcgactttgctttctgctatggaaaacgcagggaaagaggtcgcagatgcagaaagtaaaagagcaatggcagagtgcggcatcggtacaccagccactcgtgccaatatcatcgagacattgattctgcgagactatatccgaagagaaaagaaaacggtagtcccgacagagaaaggcttggcagtctatgagattgtcaaggataaacgaattgccaatgcagagatgacaggctcgtgggaactgacccttgccgccatcgaggctggacaaatgccacccgagaagttcgcacaaggcatcaactcctatgtggagacgatttgcgaggaactccttgcccttgctccacaggtacaaaagtcctatcccacctaccactgccccaaatgcagcaatgagagtgtgggcttctatgccaaaattgcgaaatgcaggcacgagggctgcgacttccacatcttccgtgaaatctgcggcacgttcctttccgaggacaatatccgtgatttgataactaccgggcgaacgcctatcctcaaaggcttgacgagcaaggcaggcaagaagttcaacgcacgtcttgttctgggcgaagaccataccaccgcctttgagtttgaaggaaagaaaggcaaagcacgaggaagataactctcacagaatcggagataaaacaaattagttggaagataggaaaaattatcttccgactaattttccctctccatcttaaaacagaaaaattatggcatacaataagaaagcagtcttggagggcaatacggaagccatccgtgtgatcctccgattagagaaagaacgccgtgaagccaccgaagccgagaaagtcctgctcagaggttatcaaggtttcggtggtctgaaatgcgtgttgaaccgttgtgataatcccgatgacctccgctattggagcgcatcggagcaaaacctgttcgcgcctacccaaaggctcaaacagatgatttaccgtgatgccgtcgatgccagcaccgccaaacgctattgggagagtatcaaggcaagcgtactgacctccttctataccgacacccgtatcgtctccgccattgccgaagcccttagtgctgccgacgtgcaagtaagaaggtgcttagacccttcagcaggtatgggagcctttaccgaaacctttgccaaaagtgccggtatggtcgatgcgatggagaaagacctactgacggcgcgcatcacacaagcccttcatccttacggcaaggataatatctttgttcggcaagaaccctttgaagccatcggagaactggaagaaaaggacaagtacgacctgattaccagcaacatcccctttggcgactttatggtttatgaccgtagttatagcaagggagagaatatccttaaacgggaatccaccagaaccattcacaattatttctttgtgaaagggctggacactatcaaggagggcggacttcttgcatttattacctcgcagggcgtattggacagccccaagaatgaagccatccgccgttacctcttgcagaatagccgtcttatctccgccatccgcctaccttcgggtatgttctccgagaatgcaggtacggatgtgggcagcgacctgattgtcctgcaaaaacaatcgggcaaggaaattggtgagggcatcgaacagcaatttgtacaaaccacctctgttcccaaaggcgacggcttctctattgcgttcaatcataactccctcttcgagggcgaatggaaggatatttcccaccgtacgattgccatagacagacaaatgggtacagacccttacggtaagcccgcttgggaatatacgtttgacggcagtatcgaggatatggctgacagtctgtgtacacaactatccttggaagtggagcagcgtttcgaccgcaagctctacgaaaccggcatacccatgaccgaggaggaatggcaggtacacgtggacaagatggtgcagaaagtgcaaggaggtctaaaaacagaacaaccacctctgttacaagaatccaaggataaggaggaaaagaaagaggataaggaagatgaaaaagaagaagaaaatgcttacaatttgatgcccgacagcactaagaagcaacttcccaaactctatgcaacagaaaagcaactcatcggcgaccgcacagcatacgctcgctactttttccctatgggagcctataccgcctatatgctggaatacgaccccaaggaacgcatcggcttcggagccgttacgatgggctatggttgggaacttaggtatatgtccctcaaagaaatggaggaagtcaagatacacggattgggtatagaacgggacttatacttcaagcccactaaattgcacgagatagcagaactggaagagattgtcagaggacaatacactaaagaacccatcattgaggaaatcaaggatgaaagccgtcaggaagtgcagaaacctgtacaggaagacaatcaaccacaagcaatggtagaacaagtcaaggaggttttgaaagtcgaagaagctgcgccagttttacatacagagcctgaaaccgaaccagccccagaaggtgtccccgtaattacccttcaaagacaatacgaacaagaaagccgtgaaattcgcacagacgtggaagccccacgcgagatgaacggtcagacggtattctttgatgaagaccatcatccgattatggatagcaccatagagacagaagccatggaacagttcttgtttgccccagaggaatatagtctttggacacaagatgtagcccgtgtaaataatgaaatcaaagaggctgctcaacaaaagaaggtcagcgataaccaaccactttctgcgagcaggcaacccaagccggcaagaagcacgccaagcagttcccgcagaagcaagaaaactgcatctgctcccgtcagagagccctcgctctttgactttatggaggaagccgaacctcgcaagccacagcccatagcagaggttaagaaagagtttgatgcttcaccgcgtccgttcctttcttctcccgactcacatttgcgtgacggctcgatagtcgtacagaatgggcaggtaggtttcctgtctgacttgaaacgacatcctaccttcaacccgatggacttaccctttgctcagctctcacggctgaaagcatacattgagattagagaaagttatcaccgactctatgattatgaggcgaacaaccaagcggaggacaaggaagagcgtgagaaactcaatcggctttatgacggctatgtaggtcgttgggggtacttcaaccagaagacaaacaccgatgtcatcaagatggatgccaccggagtggaaatgctgttcttggaacgctccgagaacggcaagtacatcaaggcggacatcttcgaccatccgacggctttttccacctccgaactgtccatagcttcagacccgatggaggcattgggcgcatcactcaacaaatacggcacggtggagcttgactatatgagttctttgcttcccgatatggaagagagcgatatgctttctgctttggaaggacgcatcttctacaatcccgaagaggacagctatgaggtagccgacaagtttatttctggcaatgtgattgaaaaggcggagcgtatcgagtcgtggctcttggatcatccggagcatgaggaagcgaaacagagtctgactgccctgcgtgccgccactcccacgcccattccctttgctgatttggatttcaacctcggtgaacgctggatacccgcgaaagtctatggcaagttcgcctcggagttcttcgagacggacatcagggtgagttatcattctaatatggacgagtatgccattggctgcgaccaaaagaacggtaatatctggcacaaatatgctgtacaaggtgagtttagacgctatgacggactcaatttattgaagcacgcacttcacaataccattcctgacattaacaaaagcaagaccatacttgatgcggagggtaatgagaagacgattaaggttcgtgacggtcatgccatacagatggcaaatgccaagattgaggaaatcagacaaggctttgtagattggctcggacggacacccgacacgttcaaggagcagctctctgaccgttacaaccgcctttttaactgctttgtgcgtcccaacttcgacggtacgcatcagtcgtttcccgacctcgaccttaaaagattgggcatacaagacctttataagagtcagaaagatgccgtgtggatgctgaagaccaatggaggtggtatctgcgaccacgaggtcggtgcaggtaagacgcttatcatgtgtacagcagcctacgagatgaagcggttgggattggctaacaaaccgatgattattggactcaaagcaaatgtattcgatattgctgacacttttcgcaaggcttatcccaatgccaagatactctatcctggcaagaatgacttcaacaagcagaatcgccaacgcatcttcaatgacatcaagaataatgattgggactgcattatcctcacgcatgagcagttcggcatgataccgcaagcattggagatacaagaagcgattttgcagaaagaaaaagattctgtagaagaaaatcttgaagtgctccgtatgcagggagcggacatttcccgtgccatgctcaaaggcttagaaaaacgtaagcagaccttggaagccaagttacaggacattcaagacagcattgccgagcgcaaggacgatgccgtggactttaagatgatgggtattgaccacctttttgtagatgaaagccaccaattcaagaacctgatgttcaatactcgccacgacagagtgtcgggcttgggcaatccggatggctcacagcgtgcgctcaatatgctctttgccattcgcaccatacaggagcggtcaggcaaggacttgggagcaacttttctttcgggaactactatcagtaattcgctaacagaattatatttgctcttcaaatacttgcgcccgcaagccttggagaagcagggcattaacagtttcgacgcatgggctgcggtctttgccaagaagtccactgactatgagttttccatcaccaatgagattattcagaaggaacgcttcagaacctttattaaagtgcctgaacttgcctcgttctatgcggaagtatgggagtagaaagcagaaaatggcataaaactcatatctgactgaaatacagcggatattgcttgtttcttcttagggttgcatcataggaaacaggcagaaaagggagcgaaaaggagggagttcagttaccaaatcgttcgaaaaacgatgaaaggaaaaggacggctgaaagtggtaactaaaacggagttttctctttcattatcaatgttttgcatcgttcaaagttcctcaaagaagtgtaattttgcaagtaaaaaacaatggaaaaagaaaaattcaagctgcttttctacctcaagagaggtacgcaggacaaaaacggaaaaagtcccatcatgggacgcatcagcgcaggacgctctatggtacagttcagttgcaaatgctcgtgtactcctcgtttgtgggacagtcgcaaaaaccgactgctgggcaagagtgccgaagccgtatcggtaaacaaggaacttgaccgccttcaggtgagcatacacaaggtttatgagtctctttcgggtaaatccgatgctcccatcacggcagagcgagtacgggagcttgtattcggactgaacagtgagtcacaaggactgctgcatcatacagacgagtatatcgaccgcttccgtgagcgtgtgggcatagaccgcagcgaacgcagactaaaatgcctgttgctctttcacaagcatctggcaaacttcgtcaggtatcgctaccgtgtggaggatattcccgtgcagaaagccgacatcgcctttatcaaagacttggaggactacttcgccaaagaaaagggattcaagctcaacacttcggctggctatctctccatgctggcttccttgctcaaagacctgcataaacggcacatcattgacacctatcccttcatcaaccattccattcgttgggaagtgggcactccacgttacatcacgagggaggaggtaagccgtatcgcagccttgggagaagacgaactgcaaggctatgaaaaagtgtcgagggacatgttccttttctcctgcctgacggggctttcctataccgacgtgtatcacttgacggagcagcacgtctttcacgaagcgggaatgacttggatacgcaagccgagaataaagacgggcaacgtgtgccacatccccctacttcccgaagccactgccattatcgagcgttatcggggcattcacacgagggctttccgacacgaaccgcccaaggggtatctgctgcccatacccggatgcgacacggtaaacatacacctcaaaaagatagcacggctttgcggtattcagaaaacgctgacctatcacatggcacggcataccttcgcatctcagatgacactgtcggagggcgtgtccattgagagcgtttccaaaatgctcggacacagtcaaatcaaaaccacgcaagtgtatgcggagacatctcccgagcgtgtctttctggacatagagaaaatacttccacaactcgcacattatcaactgaccaactaaaaccgcagaacaatgaaaagtacatttgccatactattctacatagatagaagcaagaccaatgaagacggactatgcgtaatccgttgccgtatcacctgtaatggaacgtcctcatcgttttccacgcagttgcaaacttcccccgacgagtggcttgcccgaaaagggtgcatcaaggcgacaacaggtaattcaagcggcatcaatctgcaactgaactcaatagaagagtgcttgcattcactctatgaacgtacattaagggaagaaaactatatcacggcggaatacctcaaggagcgttatatgcagcaaagtcgccccatgccaacacttacggagctatatcaatccgtttgtgaatacaaggaggaattgcagggcagaacattaagcaaggcaactgtcagggcttttaaggacagctacaagagttttgttcatttcctgcaagtaagggacagggcagactgtatgcccacagaggtggacaagactttgcttgaggactatcgcctttttatgcttcgggacttgggaaacaaggaaagcagtgtcggcaaccgcctacgccacttgcatcaggtcattcgcaaggcattgcaggagcgatacgttcgtgaagacccttttgaactcatagacatagaaacgcctacctacgagcgcaatgcacttacggcggacgacctgcaaaaactcttggcttaccgtccgcaccgctcgacagataaccattgcagacttattttcctcttgggatgtttcacggggctggcattctcagacttaaagaaactccgaatggacgatgtttatacattcggggatgggcgtaggtacatatcgctctgtcgaacaaagacacagaacagaagtattgtcccgttgctgcccgttgccgagaaaatactcgccattgtgagccacggacgaagggaggggcttttctttcgagagtttcccagcaacagtaatttcaatagaactattcaggagatatgtattaaggcaggactgccaccgcatactcaagcgacctcgcacaccgcacggcacacctttgccacgaccatctgtctggagaacggacttccgatagagacggtgagcaagatgctggggcatcgcttcatctccacgaccgagatttatgcacgggtgaccaagagcaagattgccaaggaaatgcaacccctgatgggtagtgagcatacaagggtactgcgtaaagccttacggctgtgtccgtcaagaacaccgaaaaagtcaagtcccataattgggatgtaacagccgtaatgaatgattcaaaaaaaagaagtccaactttttaacaagaaaaacaatgaaacagaagaacaaaaaggaactttcctacttccgattgaagttaagaagttacatgagtgagcatcaccccgaaaagttgcaagatacggagtttatcactgcacgggcagatatggctctcacagtttactgcgatgctgtagcacaaggctttacacacattgaagcggagagcatggcaagcgaggcattgtatcaaggcttgcacttttccaagtacgatacgcttatatccgtgttggaaaacgagtttgaaagggaacttcctgcaccgctcccagagaaactcgtacctatactgttgtcgaacaaggctgttcaagccacattcgacaagttcggtttgacggacacattggcttctgacgagcaatacggccgtctttacaccgaactgacaggcacgatagtgctgctcatcgagagcaacaatctgccaacggtcagactgacggaggaagcaagcctgaaggcgttgtaggcaaaggcggcgcacgcaaagttcctgatgccgtttcttatcgtgcaaaggtacaacggcagcctgtctgccctgacaaggtcgagtcctgcggatggagagaagaatctccaccgcaggatttctctgtttcaaggtggtattgccattttctatatccatgcggtcgtattcatctctcccaaccttgcagggctgggctgccgtagagagtataggcacgacaagaatacggcatactcaggctctttggacgcaaggcgtaacaactaacaacagataggactgacgataatacggacaatctattgtttgtacaatttgttgtcatgactatctgttgtcaaaactatatatcgtcaaaataatctatcgataaaactatctatcgacacttcgacatctcgatttgtcgaactatcgaattatcgataaaacaacaagataataaaaggaacgagccggcacctcatctcattaccgcaataacacagacggatttcctttgtttttctattgctttctctctatttccctgcttatcctcatttcttgcagtggtgcttccgaggggttacttttgcacccgagaagtacggcaatggactgcataacagtttgtttgctgagtaacaataaagtaatcaaaacaaaattaaggcaatgaaactcattatcatcgaccgcaaagcgtgggagcgacatcgctccgaatttgcagactttatccatcgtgtggaaaaactcatcggtaatcctcccaagaccgagcaatggctcgacaacgaagccgtgtgcaagcgtttaggcatcagcaagcgtaccctacaatcataccgagatacgggcaaaatccctttctccatgattggacataagtgttattacaaacagaccgacatctgtgaaatgctgaatgcagtcaaggattgaaatcaaagaatgaatgaattatggcagagaatgaaatcattacgcgggaagaccctcagatgcagttgttttcacaactgatggaaggcactttgaagaagttggagcggtattgctctaccgcccgtccgatgctgaatggtgaggtttacctttcgggtgaggaggtttgcagccaattacggctcagcacacgcacgctccaagagtacagaaactcaggaacgcttcctttctacaaaatcggagggaagatactctacaagcagagcgacatacaagccatgcttgaaaaacactataacccgatacccaagaaattatggcaagaatagatgaaaaaaggaaacaacgcttggaacaagccattagagatatgggaaattatggcgttaagctccgcaagcccgaagagttacccgattttgaccagcccttcgattatgaagaggaaaagagaaggtttgagcctgttgataaagttgaggaacaaaatgacaaggagagtaacaaggatttttctcaaccgtcctatcaagaaacagcgttgtcgccaacagaaagggctacttctaccgaagaatttcatcaaagaatgggaaaaacaaaggacagaaagcaattatccgagtttcaggggaaatatctccagccctttcgcaacagccaccgcaaagccgtgtatgtatcagaggaaacccaacgaaagttagacttcgtggtgcggagaatcggtgagcatggagcgagcgtttcgggatatgtcgaacaggtactgcgggaacacctcgaccaatacaaggaagatgtggaaagatggaggaaactctgaattactgcattcctcgaatgcaagcctacgccgagttactgtattcaatgaatgcagtaacacagcaggggcttataatcccattttctacatcagcaaggtgtgtctttgtaccacaaattgccatttgtaccacaaagacccttgccccgaaaggggattaaatcactccaaagtcgtgattagaaagcaatgaagaagcaaaaacaaaagaagccagacggcagatgtgccacctgcccacgatgggacagatggcacatcagaatacctaattccgaagaccagcagaaacttatcagactctatcgcaagtcgggagcaaagacaaagagcgactttgtccgagcaaggcttcttggtgaatcttttaaggtcatcacccaagaccctgcaaaagaaccttacttggagaaactctcagaaatcgttgccttggctcataagataggagttctgtacaacgaagtcgtgaaagtcctcaatacttatcattctgttgccactgctcaacaactgctcggcaaactcgaaacctattcccaaattctcatcagactacaacagcaagcagtacaactgacaaaatcctttgggagtagagaagaatgaatgctgataaatcataacacccatactcgtatcgtaccgcgaatgtccaatccctctttggatgatacaaaagggtcactttgaacgattacataggaccagtttcaacgatttttccactctgccctaatactttatcttttggaaagtacattgataatcagataattatttcaataactcccgatttggagtattaccccacatttattatttttttattttgacaattcccgatttggggcattaccatgaccattaacaaacacaaagtctgtataatcccctataactaacgtatcttttgaaattttccgtattttgtaatcaacatatggatagagcttttccacaggatgtggaagtttccaataaataaaaactcgcatgccatcaacatcaaacactttagggaataaaatgtcctgttgggaagtaaattcttcatctcctttcttattataagctgaattcaacttgcaaatgcaacagaattctgattaataatttgtttaaatttttcgtttggcgtgaggtatccaagtcttttacgaggtcgattattgagtttattttcaatccacttaatctgtttgttggttacttcactaaagtccttaccctttgggatatactgcctgataagcccgttggtgttttcattggcaccacgttcccatgagtggtatggtttgcaaaaatagaattttatttccaatttttgcgcaatttcctcgtgctttgcaaactcctttccattgtcagccgtaattgtgtgtattaagtttttcactttccgcagtgcccatactgcaatcttagctaccgggatggcttcttttcccgacaacttgcgtatccagaccctgcttgttgctctgtcgttaatggtaagaatggcacctttgtggttcttaccaataattgtatctatctctaaatcaccaaatctctccttcagttccactatctcgggacgctcatcaatatccaccctgcctgggataaatcctcgccctgcatttttagaaccacgtttggcatacctgcgaccttgtctgcgaagatatttgtgcagtttgccaccccgccgcttatcctcccaaatccagcgatatatcgtttcgtgagataccatcgcaattccctccaagcggctcctgccgacaatctgctccgggctgaatcctttcttcaacagctttattatccgttttctcattgccggtgtaagcacttccttgcgatgtttttgctgcttgcgcctgtctgcttttcgctgggcaagctccatgctatagctaccacttcgggcgtcgcaattgcgctttatctccctgtaaacagtgcttttatctactccgatagcttccgctattgcttttttgctcatcggtatttgcaacatcatagaaaattgcatacctttgttcctcggttatatgtttgctcatctgcaacttttttttctttggacggacaattaaagcaaagatagcaaactttatccattcagagtgagagaaagggggacattgtctctctttcctctctgaaaaataaatgtttttattgcttattatccgcacccaaaaagttgcatttataagttgaactcaagaagtattcacctgtaagaagttactaatgacaaaaaagaaattgcccgttcgttttacgggtcagcactttactattgataaagtgctaataaaagatgcaataagacaagcaaatataagtaatcaggatacggttttagatattggggcaggcaaggggtttcttactgttcatttattaaaaatcgccaacaatgttgttgctattgaaaacgacacagctttggttgaacatttacgaaaattattttctgatgcccgaaatgttcaagttgtcggttgtgattttaggaattttgcagttccgaaatttcctttcaaagtggtgtcaaatattccttatggcattacttccgatattttcaaaatcctgatgtttgagagtcttggaaattttctgggaggttccattatccttcaattagaacctacacaaaagttattttcgaggaagctttacaatccatataccgttttctatcatactttttttgatttgaaacttgtctatgaggtaggtcctgaaagtttcttgccaccgccaactgtcaaatcagccctgttaaacattaaaagaaaacacttattttttgattttaagtttaaagccaaatacttagcatttatttcctgtctgttagagaaacctgatttatctgtaaaaacagctttaaagtcgattttcaggaaaagtcaggtcaggtcaatttcggaaaaattcggtttaaaccttaatgctcaaattgtttgtttgtctccaagtcaatggttaaactgttttttggaaatgctggaagttgtccctgaaaaatttcatccttcgtagttcaaagtcgggtggtctacatcaatgccactgtttatcttccattgcttacccttataatccattctcagggtgagttcctgcccacatatagatagtgtgttctcataacttaggctatctatgtatggtctattcggtatagtatagtcgtaagtgttgcttgtgtttctatcctcttcgtgatgcagtccgtaccctgtctgcaatttcaactgtttgccaaaaggatgggtatattgcaatgatattctgctttcgttgcgcagggtgggcagttgttggcaaagattgcgcaacagtagtgaatctccgcccacagcgttgcgcaggtggtggaatttcgtcagtgaaaggctggtattattagtttcattcgagttaccgccaagtgtcgccttcacggtaaatgatgccccagccttgccaatccgccgtgtgaggtcggcagatacatggtaattctttccattgctttttgtgttatttcgcagcgttcccgaggtcagcgtgtccgcagccgtattgcgctcatataggtatgttgtgttgtcagtcaggttgtctgaccgtccgaagtttccatttgcacttatattcagcaaagtctttttgtctatgttatactgcagatttatgtttgcggcattactgtgattcttgctcaaggaaagcagcattgattcccgatattttgttcccgatgaaagatattgctcatcatagtcatgattctcgcttccattgtggaaggcattgagtgagaggcttgcattgagcgtaattttcttaccaaatttcttcacgatattgcccgacaatatgttttggaaattgtttcccccaatgttcatattactaagattgtcagagcgcaaagtcagcgaggtgttttcgccatcggcattgaatagattgccctgtacctcatccctgcgtctgtcgcgattgccgtgttcagccgttagtgttcctgtcaggctgccattgtaggtagatttggtcttgatgtccagcacataattgtcggcaccatcatctactcccgtcattttctccaatgcgctgagcatgtcatacagtttcagtagttccactgcatcggttggcatattctccaacgctgcgataatgtcgttgcccataaaggtctcgccattgatgtttacgccgttcaatggctttcctttgaatgatagttgcctgttcgccttgtcgtattccatgcccggaatattcctgattaagtcttccaagttagcacctttccttactcgaaggcaatcagtattgataaacgtggtgtcttttcttatggaaaacaatttccgctgtccaataacttgaacttcatcgagttctatcgttttatgtaatgaagaaacatgttttcgagtagggtatatagtcatcccttaaaaactatatttcagcataaagcctgtactgacaagctttatgctgattctttttataaggtccaaaagaactctcatagctcttttgaagttatatgctgccgccgctaataagacattgatagcatctcctttcacacctttataaaagttgcgagataatcgatggtctgctttaagatgtcctatggttggctctataccagctcgtttacaaaatagtttgtgtttctttttcttttggtagtagctgtctttagctttaggagtgtctgggatgagtatctttgtctgcccaatctgctttatacctctataccctctatctcctgctaacttatcaacctgctttcctgtcatcctttgggtttgttccaacgtcttttcgatagtatgcccatcatattcattcctaaaagaacatgcacccaaaataagtcctgaccatgagcgaagaatagatactttattaccaaactcatattgcttatgttccttacctttgctcaggcaaaccacatctggttcgtgcagggaatatactttgttctttgactttcgattctgagaaaggactctataatatagctcaaacatcttttcatatcctttctttccctcaagattacgctctaattctcttactaatcttcctgctatggtccttagttgcctatctgccttaagagctttcttacgattcttgggatgattacgaaaacgttgggaacggtaaatccctttcaacgtacgcgtgtaactctgtcgtagaggaagacacttgtcatgaactatcttcagaacgtttttgattatctttttatgcaacttcgcatctgttggataggttatattcttctcctgcacggtagaatcaatgaaagccgtatcaaaatgatcttcgtcatcatggtcggtattaacacggatgctctctgctaatattaactccataccttcctcacctatacgatttctgaagtgaactaactcggaagcgtcgcagggttgtttgggcataaattcaagtccaccacaaaaatattgatagtaagcattctcactccattgagaaaccaccatttcatctgaaacattacgcaaatgttttaagattaaaagaccacacatcaggcgaataggatgagctgggcgaccattagtattgcaatacaatggagaaaaagcattttcaaaacactcccaattaatcttattactaagttggaaaaggggatgttgatgactaagcatgtcctctaaagaagagaacaaagagagctgtttggatgtacgtttaagcataaatatctgcaagaattataatgtaaaggtacaaaaacttgcagatataaacaaataatttgtagcataatatactgtgagtcagcggaatattagatttttaagggtggactacttatcccgaactggcattattagagggagcatccggtgctttgagcatctcggtgagcactcgtgcactggcaacaacaccctcgaagaggactttgaagaagtggaattgtgtgggggcttgaactgccgtatgaagttggagagaaagttctccaaagcattgctttgcttgtcgaacttcaggaaactctgttcatgctcggcggtggacgatactgtcttcagtccgcctttctcatctgtccctgagatggctttgagattctcgttcttggaatctttcaccaaaagggcttcttgatctttgattttttcgtccatcttacaatgtatttaatgacaccaatagcggtgtatgggcaaaggtaaatcaaagaaaccgtgcatgttagcagttggaaataactgcatacttgtggcgttgatatggatgaaagtggcaaaaagagaggtatggatcaaactccatacctccatatttttcattgattaggttattgcatagacagcaatttgcagtacattccgttttttgctgcaagttctgcatgcgtcccgttctctacaaggtgtcccttgtccatcacaataatttgattagcattacggatggtttgcaaatgatgggcaatgaccaagactgtgcgattttggataagggaagacattgcctgttgtatcttatattcattgacagggtcaacattgcttgttatctcgtccaaaagaatgatgggagcatctttgaggaacgcacgagcgattgaaagcctttgtttctgacctccggatagtcccaaaccgttttctcctatttttgtttcataaccttccggcagattgatgataaagtcgtgtatcatcgccctacgtgctgcttcttcgatttcttcctgcgtagcatgttgattgcctactttgatattattggcaatggtatctgaaaagagaataacattctgcatcaccacactgattttaccgagtaaataatcatagtccatttctcgaatgtctaaaccaccgatacggatactgccggtctgcggttcccagaaacggagtaacaggttggtaatggttgttttacctgaacctgacgagccaacaagtgccgttaccgttccttcgggaacatggaacgtgagatttttcatctcaaaaccttccttctcataatggaaattcactttgtcaaaggaaagattgaaatgggttgctgttttcggctgttcaggattggtgataacaggagcattcaataaatgggaaatgcgtccgtaactatcttttaccttgatataattcaaccaatgattctccatattgacaaaaggtttgtagaattcttttgagacgatgataaacattaaataagcgaaaagagaaagttccccctgctgtgtccaccaaagaccgattgtagccatcagagcgaaagccaattctatcagaaaagtgtatctgcccacacttacagcagccaaacgagaagtattcttactgctttctccaaattcaccaactgagtggtcgagtctgtcacggaacattccttttcctccaaatactttcaaaactgggatgcccttgacatattcaacaaagaggctgaccatatctgccagattatcctgtgattcctcctgtgctttcattcccgagcgaataccccgatacagagaaaatagggcaatggggagaatggctaccattgtcaatcccatgcgccaatccacgcaaaatagtccaataccgagtattagagctacaatgaagtcggcagacatccgtgtccatagatgtcctactaccatttccatattatcaacgtctttgtgaatgattgtacttatctctcccagacgctcattggtatagaaaccgagtgagaacattttcaatttcaatatgattttctcgcggatacgttccacaagatcaaatccagcaaaatgcttactcatatcggcaatggcattggatatggttttcaagaccagcagaccaccgagtacccatgctgccgaaatgaaagagatgctttctccttgtatatgacggtcgatgagaaacaagactgtgagcattatcgccgtgccacaaagggcataaaccacgaaaaacagtgcggagataattagatgccgaactccgctagcggtcaattcattcagtatattgcgtaccattcttattcctcctcttcttttaattgccatttacttacttgttcttgcgtttccgtcatattgcggtacagagaacagtctttcatcagttcttggtgtgttcccttcgacacgacctgccctttgtccatcacaacaatacgctccatatcctgaatagtattgagacggtgagcaatggtaatgacggtcttgttgcgctgcaattcatcaagagcttcttggattagtttctcattctctccgtccaatgcggcagtggcttcatcgagaataattattggagagtctttgagtaacattcgagcaatggaaatacgctgtttttctccgccagagaattttatgccggcttcgcctgccagcgtatcataaccattcggcaagcccatgataaaatcatgaatacgagcacgctctgctgccatttccacttccttttgtgtggcggtaggttttcctatacggatattgtcccgaatagttgtgttaaagagaaaaacctcctgctgtaccatcgaaaaataatcagtgatattacgttcggagagttccgtaatattctctcctcccagtcggatagtccctgtttgggggtgccagaaccccatcatcaaacttgccagtgtagtttttcctgatccggattcgccgacgatagctgtatgacttcctttcggaaattgaagacatacatctttcagcgcattgtcttccttgtttggataggaaaatgtaacatgctcgaaacaaacatccgtttgtgtcgtatccgttttcttgtcagcagtttcctttgtctgtacctctgtaatagactgtacttttgccaacgactgagcatagatgattcggaaatgttggaatgttgccaacttagcaaaagaggacgagaacaatccacccaatatcagggcaagaataaaatgggctacagttaattcgcccgaactcatcatccatagtccaataagggtcattaccacgataccaccttccaagaacatcgttatcaatgtcatgggaacggtaacgctaaacatgctccgctttacccaacggatgtagtcgcgcataccaccaagtacccgttccgttctgttttcctcgttactgaaggctttgattaccgatatggtagccacatattccaaaaggtcttccgacattttttgcgtactttccataaagtgttgaaagctctttccccaaagtgttttgacagccatttgcagaagaaatgccacaggtaaaagagaaatgagcgacagccccaaacgccagtctaacaccataatgattacccagagtaaggctggaaaaagagtagccgaaaggatttcgggtaatccatgtgctaaataaatttcaatttgttctacatcgtggttaataatattcaccaagtcgccaactttccgttcttgaaagaaaccgagcggcaagcgttgcaaatgacttatgatacgcaacctcaatcgtgtaagggcattgtaagccgaccagtgtgcgcgccaaatcgaggttccatagaatacgcctcgaagcattgcgaatagtatcattattcctccaataccccaaactattatgggagggagcgtgccatttatcaacttgtccacagcccacactacaagcagtatagggagtgtgcctaaaataaggtgcaatataaccacagcattggagagcagactacggctctcccgttcctcatcaagaggtctgttttttttgtttgatatttttttcatcctatatgttttgtttttataaatacactctttcaaaatgaatgtttttaatagggaaatctgtcgctatggaacatgaatatccattcaatattttttggaaagtataatatttttcatttgatatacttaccggattattgagtatattaattttattagcaggaaaccgaaaccctgttcctttcgctttcaacacgctttctttcaaggtccatattttaaaaaaagtcatgtatggatttgagaattctttcaaatgttctatttctgaaaaagaaaaaaactctactaactcatctatttctataagaaatgaacgatctattttctctacatctacaccaatgttacataaagcaactgcacaagcaacgcattgttcagaatgagaaatattaaattgtaatggatatatcgattttataaatggtttatgatatttatcccactctatttcagatattacacttggagaaatatctagttttgacaatgcatattgcaaaagaaatcttccaataaaagatctttttttgtcaattcttctttgtcttttctcgattcttagtatatcttgcgtagacatattgatttttgcttgataatcagaatacatcattaaattctcatctatataagtaaagaacacccaaacacatccttttttcataagcagtgacttattatatgagttatttcttttccataatttgataaataaaagtgaccgccttgaaaaaaatgaaagttacaaataccatttgtgtagtcattccatttaaaaatctgatcagatgtccaaacatcttcttttcctattaatacgctcaaattaaaatcaaatggtatgattgtatcaaagaccgcagtctctgctatttttaaatcatttctaagaataggcaaatagtactcttgcaattctggaaagagaaaaaaatcatcagttattccacctaatttctttagctcataaataaaatcctgatcatttagcatatgaatctttttatgctctcttgtatgaataggagctccttctccagaaacaaagaggtgaataggaagtgctttttcttttcttcgtattaaatcgcataattttattgttattagtgcccccaaactgtgcccaaataaataatatggtctgcaaaataagttgtctgcatccatttgagagaataaatctttcacaatatcatcaagatttttatagattgtaggttcagaagctctagctcctctccctgccaattcatatatacacatttctatgttgggaggcaagaattgtctccatctattataataagttgatgagccaccagcatatggtaaacatatcaatgcatactctttatttcccaatattttcatctatacctcttaaatcgttttaaaaactctttttatgtcatttattatctcatttcttgacatttctgattttataaagaaatgatttccgcaaagcatgcgacatttaaaatcgtttgttgtatatttctcccattctttgatatttctctctgttacaaattcatcctcatcccctccatagacataaatcggaatcggaatctgcgaattctcaggattgaaataccaatcatcaacgagctggaaatctccttttataataggtaacatctccaagatagtttcttctgtaaaacagaaatcttctggagcaaaattgattgactttaactcctgaagaagttcttcatcagataaagtatgaagatctcttctataaggaagatgtggtggattttctcctgaaataaagatcgcgataggcaactttccttttttcttaacaatataccgtacgacctcatgtgttatgaatccacccatacaatgaccaaatattacataaggtacatcattatacgaaagtatgacttctgctattaaagatactaactcttccatgactgtgattatattttcatgacttcgcgtggatcttccaggtagctgaacacaacaaacctctgttccttcgtcaaataaaaagcaccagttatgataaacctcagcagaaactgcggcataatgcaaacagaaaactctgttttttacagtagattggggattggggatatataaccatttctcccttattttttggattttttctttatttatatttctcattctgtttcttattagtgtatgaatttcagtgtatctttaattttattgcccattgtcagcatttcctctattgaataggttttggcatcataaagaaacttgatattcatatttttatttggccaaataaaaatatgaatcttgccaaaaggatgattgataaaattcgtttttgataaactaaaaggcaatgatgaatagtcaatttcttccataggcatattttcaaatgttattgtattatctatttctagaagactacgattcccaacaaaagaagatatttcctccaaagaagaagaaacatgagaaaagacttgatttaagtcattctgtagttgtttcgccatttctacaaaagaatgttcttttatatccaatttaattggtatttcattgatgtacaatcctactctattatggatattttttatggctaatgggcgatccgctatggttgtccggctatatactcgttttttgttttgtaattgcgccaaggctagcatatagcttaattgaaaaacacaattgagacttacacctatttttttcgcattttccctgatttcatgctctatgtctgataggtttatttctatcttttggaaatcaacaaaatgaaagtttttttgctttggtaaaataagattctctgatgcggacaaatattctctccaaaagattttatcctcacttttatccctatctctttggtagagaatatactgtttcattgaacttgattccaaaatcaccccaggattttttccagccaaaagtgatgagtaataatagattaaatctttgtataaaatagggacattccatccatccataagcaagatggggaaataccaacgaaaactgaattctttcgagtttttttggataagataaaatttaagtaagggggcaacttgtagatcaacgccccttttttcttgttcaattctcaaatttctacctaagacttcctgacgataggctgctattcctctccaattgacagaatctatttcaggggaacagttcttgtagattacttggaataattcatgtttttttgtctcataaaatacggttctcaacatcggatatttttccaaaaccaatttccatgattccgttaatatatccaaatcaatagtccccaaaaattcgaactctaaatccatcattagactcttcatatccttcctctctttgtaaaggttgtaataccattgttgcattgatgtggtattcaggatatcttctattttatcatttattatctttctcattattacgaacttatttagatattaattcattcaaatcttctttggagatttttaatcccttgaaatcgatagcatctatggtactcttttgctttaatatctcaaattcttcgagtaggattttttcaaatttcttttgtatctcatccgaagaagttgcactttcttcaataaaaatctttagatctaactgatcatttagaacgaaagcctcaatagttacatttgagtgagattccaaaaaatcatttttcaaattaacaatattataatatggagtatcacgacttatcatattaccataatacacaatctctatgctaggtacattttcagatatatggatatttgctgcttcctgcatatctaagttgattgacttaattaagatcattttcttcaactcattataattaacggatatatcgttcaatcgtaaagggagtgcatatgtcataagaaagttgccacaagtaccctccaaagaatactctaaaagactttcgtaatctcgtgggattgtatatctgacatcacacagattatcatttgtgtgctttaagtgtgacaccgcactttttatcagaaggcttatgatttcaatatcttcaatcttacgcaaacatacatctctcattcttactgagaatggtttgttctgcttctctattggaggctttggtgcaaatctgctgtcttgtaagatataaaggctcgcaatatcatttaaggatgctatctgttctgttatttccttagaaatgcccatgccatagtacatattattgaataaaagtttaagtagcaaatcaactgaatacaaatccaatattaatttattggatacaattagcaaataattcttagttttatgctttaatagacaaatccttaacaatggagtttcaccagaggaaaaatcacgaacaaattcgttggttatagattctatataatcatcgaatgacgtattctcaggtattttatccacaaaatcgatttcatagctacagtttggaataatatgcaactcccatttatctttacttttagagagttttccctttaaagtatcaaacaatgggcataatgtagacaccccttgatccaatttttctggatttatttgccctttcaactccaataagactacatggttttgggcaaatatctcgtctccatatttatttatcagaatttgttgatatgcggataattgcatagtgtcttttggtatgatcttttcatcattacctgtcacatatgcttccatgagatctctaatcgttggatgttcaaaaatcatcctaggagacaatattattccatattccttcaactttgatataattttaactcctaatatagagtcaccacccatcgaaaagaaattttggttgatgtctatcatagacctatcaacttccaacatttctgcaaaaatatcaattataatatcgtatttaatagaatcagtgttattaacctgcattctatttttactgttattatatgaagcagtttcttctgatagacgtttgcgatcaatttttccattggatgttaatgggaacgttgatacaatagagatttcttgtggaatcatatagtgaggaagaacaagacttaatttttctataatttcatttgtcgtaacattctctttactatctaattgtacaaaagccctaatcatttttggggatttggtcaaaaccacgacacatgcatttaccccttttatattggatatacacgcctctatttctccaagttcaattctataaccaccaattttcacttgtgaatcagctctaccgagaaattcaacatttccatcaggcaacatccttccaagatcaccagtcttatatattatatcatcacttccttttaatttgagaaaagatctttctgttttttctttgtctttgtgatagccattggctacccccatccccccaatataaatacttccagtagcatatattggacaaggttttaataattcatccaatattaaaattgtttgattggcaagaggttttccatagggaatactttgccattctttgcaaacacgatttatcgggaaataaattgaccatatagaagcttctgtagcacctcctagacttataatttccattttaggattaagatcttttaattttgttggtaaggacaagggtatccagtctccactcaaaagtgcaagcctaatacaaatattgtttgattctgatatattggctacatattcagcgtacatctccattaaggcaggaactgtattccaaatggatatgttatgttccattacaagtttatgccaactttcaggatcttttgccattcgagattcaggcatgacaatagttcctcctacagcaagcatgccaaatatatcgtagacggatagatcaaagcttaattcagacaaagcaagaatactatctgaagactttatggaaaaacggttattaatatcaagaatcgtatttacagctcctttatgagaaattacaacacctttgggctttcctgttgaacctgatgtatagataatataggcggtgtcgtttggtgaagatttgtgcgttgataaattaatcgttgaaatatctatatccgaatcttccacatacataatatccacttcctgataattctttaataattcacaatgttctgttttcgagattattagcttactttctgcttcattgataacatatttaaccctttcaacaggagtttctattgttaatggaaggtatgtatatccagcattcagaatagatagtactgctacgacctgctcccatcctttttccattagcacaacaataggcttatctttttgaatatttttttccttaattttgaaagagtaaaacaatactaattcacgcaatttatcataactaagatgcttttctttggatataatggctactttccctccaaagtttatgcaagaattaaagaatagttgatgaagagttgttgtgcaaatatgttcattggttgtgttatatttctttatgacttccaaatgactgcatgggatcagatcataataatgatgattccaatctattgtttgctcacataacgataatatcaactttatatatgcattgaacatttcatcaataacatctttttcaaaaatattatcaataaaatgccagctaagcatcaatccatgaacattctcaaaaactgcgtgatcaagccatacttgcggtgtttgagacaagacataattgtaatctccaaacactttatggaaaagattttctccactagcatcatgtacaattgtactagtgaaaacaataggtagaaccgaaccaacggtattgcctcgttctttagctatttttcgtaaaatggttgtcccatgaacatatctgttttccaaattattccaattctcttgttgcaatttcgaaacaagtgattcaaaatcaatatcatgtttgaaatcagcttcgatgggagcaaaagaagcaaattcaccgaccagtcgatttacgtgcggatgaaggggatgtctattaattatagtggtgttaatacaaaaacacttggtctgactccaacaagcaagtatctcactaaatccagccaataataccattgaaggcgaaattttttttcttccacaaatctctttgagcttttcccataacgctgtttctatggtatagctaagccttctgtaatgtggaacttctgataagtctcctttcttcaaaggtaattctggcctaccagataaagtttttatacgttcgtcccaataagcttcagatgtcttatatacatcgcaatccctaattttcttttccgcaagaacatagtccctaaattttaagtctattgtaggaagttcgcactccatacttgagtaaagtaaggcccattctttcatcaggattcgcagacttgccacatcacaaattatcaaatctaaactgaagtgtatccgtactttattttgtggtagaatggaacattgtatctcaaataatggccattgatcaacaggtcgcaccacgctatccattttagttcttatttcctgtagactactttctgcatccacattggatatgttgctgaaatcattgatttttattttatattccaagggtaatggaagaactttttgtgttccatcactcataatgatggttctcagcatttcgtgccgctcaataagtttctgccatgcttttgaaacggttattggacacaagtcgtaattctccacctcaaaatacaaatgtgcagcaactctacttgtgtcaaaggtttcaattcttcctaaccattgggcttcctgcatttcagtaagtggaaatggatcatataggcagtctggggcttccttaattggtggtaaacctaattccactatgtctgacgtttctatcctatccgaaagagctttaatagttggatattccatgaattctttaatatgtatttcacaggaaaactctttgttaatccttgatagaattcttgtggcaagtaatgaatgtcctcccatttcaaaaaaattatctgtgagccgaatatcttcaacccctaaaacagatgagaatatttttaatagtgtacgttgtttttctgataagaaatctacttttgatatattggatgtctctttattttcagaaagaacatcagcactcttgtatatggtttcagtcttttgttctgtttgttcggcagactgaatccaatacttttttttgttaaattgataagtcggcaatgaaacgaagtttctttcgtcaacagcaaataaagttttccaattaaccattataccccaactccaaatattgcctaatccagacaataaagtatattgcgagctcactttagaatttactgttggcaaaaggtttaccacatttatctgatgatcggttcgttttataaatgtttttaatgtaattcctggtccaacttcaacaaaagtatgatgagctaattctaatatggaagcaactgcatccttgaaacgaaccggtcttcggatctggttagtcaggtattctgcagatatgctttgacctatatgtattacctccccatttagagtagatgccacttttatttttgcaggattgaacgttacttgctttgctgtttcataaaaatcatctaagataggttccattaaacaagaatgaaaagccgctgatgtatgtaaatatctataggttattccattttcatctgcagctcgtagaaaattctccattgcctcttcattgccagatactactaataaatcattggtattgattgctgcaatagataaatctgcaggaagtaaggaggttataaattcttcctctgaatgaaccgagtacatcttacccttattaattgtatgcattaatgaagctcttttactgacaagaattacagcatcttcaacactgataataccagccagacaaaaagcagcaaactctccaatactatgaccgatcataatattcggaacaatgttccacgctatcaattgttttcccaatgcatactctataatgaatagaataggttgggcataaatcgtatcatttatgttttggagtttatcatgcccccataaaacattactgagattgacaccaagatattgttggaaaagatccattaactggtctacttcttctttaaaaactccctccttgtagtacaactcaatagccattccaacatattgagaaccttgtcctggaaacataaaagcaactccagcatcactagcaattgaagataaatctttttcttcttttagcaattctataagctctttagtggaagaacacgaataactacatctgtatttatatgcctttcgacaacaagccaaggtatatgaaatctttgatagttcgatgtcagcattgttctgaatatattccaaaagggcgtttttattttttaacaaagactctttggagtcggcagaaatatttatcggataataattttgtttgttgacttgtctgttttttttgcattcacttacatactcttccaaaattatatgtgcattagttcctccgattccaaaagaactcacaccacatcttcttgggtaattattatctgaattttcccaatattttgtttcggtattaatataaaatggactgttttctatatctatgaagggattgggagaagtgtagttcacagatggtactaatgtcttatttttcaaagatagaatcatttttattagcccagcaattcctgctgcattctccaaatgtcctatatttccctttaccgatccgatcccacatttttttttcacaccattgaagacagaagccaaagcgtcgaactctataggatcacccatttttgttcctgtgccatgtgcttcaatcgcagaaatggtgttaacaggaatattggcatcctcaatggcactttttaaaacagcttgttgaccagacagactcggagccgtatatcctactttattttgtccgtcattgtttattgcagatccttttattatacaaagaatattgtttccatcttttatcgcatcttccagtcttttcaacacaacaacccctgcaccgctcccaaaaacagttccattagcttctttatcgaaaggacaacaccttccatcatcggaaacaatcatttctggttcgtaaaaataaccttgtttttggggtagtcttagcgtaacacctccagccaaagcccagtcacattctttcaacagcaaacttttccgggcaaaatgaacggcaaccaaagatgttgaacaggccgtttgtatattaatacttggtccatgcaagtttagtttgtaggaaatccgagaagaaagatagtccttatcgtttgatgtctgtatgaaaaattcttcactattatctactatgcttcgaccctttaaaatattctttaacaaatattgattgtagccagaacccatgaatacaccaacattttgagtgtcatactcaccattataaccagcagcttccaaagcttcataagaaagctccaacataatccgctgttggggatctaaaagagcagcttctctaggagaatatttaaagaaacctgcatcaaaatattcaatatcacgaatatatgacgctgcacgtacataattatcttgattgtaaatagtctcagaaattccagataagccaagttcttcttctgaaagtggttttatactttgcttaccttcttttagattctcccaatatgcatttattgaatctgcgtctggaaatcggcatgacataccgactattgcaatgtctgttctcatatacttatgttttatttttttgtattttctaaatactgtgctaattttcgcaccgtagtatgttcaaaaacagaagttaggggaaattttagctgggatttatctgcgattcctctccagattttgacaatatttttggaatcaatgcctaattcaaagaaattagcatctaaatctatttcctttgttcctaatatctgcgagatttcattgactataatgtctttaaaagagagttcctgctgtattggcaaccgtaacagagttgattctgagcggagtgtctttttttgattgtaatgaaataaagaggaataatctactttaccattaggagtgagtggtatttcagataagatatgccagtttgaaggacacatataacctggaagttcggagagaatatattcttttaatactgtaagaatgtcttttacttcttcatgtctattgttattctcattcctttgctgagaacgtgtctcatccgtaaaatctactctccctgcaataaatgaatgaacaaggcgatatttttcattgggcaggttgaaatcctttataaaatcatagcttttataactaccaatctgacaaattccaattcctgtgtttactcctgcggtttccatgacttgtgtcatcaatccagcctcaataagacaaaaatcaaaagccttttctccgtataatggctctattgcgttcagatttgcaatcaaaaagacagagaaagctccttcttcgtaaatccccctattttcaatttcatggaaatttgtcagtgtagggaaatggtctgagatcttattcagactatgagataggggattatagtagtacaaaacattattctccaagtcgtttatacaattctcgtgttgagataagtagatttgtacgggatatgaactgccagcagaagcgtatcttcttcttaatgccccattgtgctcccagatgctcatacaggaaaggaattcaccaagtaacgacagctctataggagatttcataaaacgtcttgacgaagcccgcatgacataattttgatataaagcatgttgagactgatttaactcgatatttatttctcctaaagtgtctttacgtattccttgcaaggatagtttgaatttctttcgttcttccttgtttgttataatacccgaattactttcgttcttccttacgatgggagaggtaggtacaataaagcattctaacttttcatttcctatgctatctgcctttttgcaaacaatagcacgactaacagattcatgtctatttagaacgttttcaatttctcctatctcaattctgaaaccaccgattttaacctgaaaatcctctcgtcccaaaaattctatataaccatcgggcataaaacgtcccaaatctccagttttgtacaacttacatttctttataggatgttcaataaaaacttggttggttatttctttgttgttccaatattcacgtgccaatcccaagcctccaatatagatatgaccagttgtatattctggacagtcttctaactgttcatttagtacatataactgttggttagctaatggcatcccatatggtatacttttccagtgcttttcaacatggctaacaggataatatattgaccaaatagatgcctctgtagcacctcccaaactgattatctctaatgggtgaacaaaaagttttcgtaatacagtcggaagagttaagggaatccaatcaccgctcaaaaggcaaagccgaagtgttgagtcctgcatttcatttcctaaatagaatacatacatctccattaaggcaggaactgagttccatattgtcacatgatatttatcaactagatttttccaatgatctggattttttagctgagtgtgttctggaataacaatcgctccccctgcatccaacaagccaaaaatgtcataaacagacaagtcaaaactcaatgaagacaaagctaatacacggtctctttccgtaatagagaactttcggttaatatcacaaatcgtgttataagcactttcatgtgtaattactacccctttaggcgtaccagtagacccagatgtatatatcaaatatgcaggactttttatgtcccaacaatactctgatacaacattatgtcgttttttgctcaaataatctgctttacatacaacaatggtatatgtatttctctccaactctttaactaattcttcagaggttattataaaagagatattcgaatcattcaagataaattcttgtcttatagcgggcaaatttggatctatagcgacataagcacaacctacaatttgtattgctaaagcagcgacaatctgctcccatcctttgtgcgaataaatacctattctttgttcaggagtaacacctttttcttccataaggtttactattacggcaactgcattatgaaggtcctgataagtaataagtcgatctttatcaacaatcgctatattgttcggtctttttcggacattattcagaaatcccgaaaagagcatttgtggaataacttctgtacatgtagaattatagtccttgcgcaatttcctttgttcgttaggtagggtaaagctaacacacccttttttcaaatcaccgttagcgaactgaattatttcagaaagcagacaagagaacatatcgttcatcattttgcgtgggaatatttctttaatataatcccatgcaagaatcagttgattatcatcttcaaagatttgacaatctagccatacttgtggcgtttgggaataagaataagtcctttttccccatgaataagcataattgccaaattggtatttctccgaaggttttatagtatttgtaaacacaatgggggttaagttgcctgatgtagatatcattcgtgagatttcaataccattgaattggtggtaatctagattattagagattctatcgtgaatcaacttaatcaattcatctattttatgtccattgcaattcaacgatagaacttgtgtggaagtaaaatcacccacaacgtcattataatcttgctcacagaatgcacgtccatcaattgtaaggataatagagaatgctggcgatttgctccaaatagaaagtatacggcaaaagaaagctaaaaataaagtagtacttgttacattcattttttttgccattgtcttcaggtgagcacttgtttccctgtcaaaaaggtgttctatatgaacgatactactactcacaattgaggctggatcttgctgtatatataactctggagccttgtgaattgagtcaattgattgctggtaatattctttagctcggaaatattctggactttctttttgctttgccagttcatgtacataattggcaaaatgggttttcaagacaggtaattctttttctctttcataataaaagagaaaccaatctctcatcaacagttgtatgctagaagcgtctgcaataagtagactgatgcaaaaatgaataatttgtttgtcgtctgattccgataaacatactctgaaaagtggtgccttgttcagatcaaaatttgtcgtagagtatttctgtctagtttcatcaaaattgcaaatcagaaaaacaggaatttctattactggtaggtcattcaattgagtaactaaatgtccatcatcactaacagctgatattagcaaagggtggcgtaatacaagtttacgtaatgcttcggttagtttaccaacatttatcttattttggcactcaatttccacatatattaatgccgaattttctgataatgtatacttcccttgttgagagatccaatatgagtgttgcatgtccgttaactctattttttgagtcatattttttacttgcgcaatagaaggaatatccgttttctgcagctgtaatgattttcttccttttagctgtgaaaggagcttttcaagagtgaaatcattttgaaagaaatcgctgatattgtagtttgttccaaaagtgttgtttacgaaagaacaatacctcgcaatggataaggaatcaagacctattgctatcaaactcttattttgaatatttgagacgtcttctgtattggcaaattccattatcttttgcacaagaagaacatgattatcatctttcagagttactttatcatcaccaaactttgaagaattcaatgctattttgctatagactcttgtacaatcacctctattaattttccctaaattactcctcgaaaacgagttttgatcaaggaagataattttgtaaggagaaatacccttcgatttaactaaaaatgaacgaatgttgtcttttaaagactcatgcagttcttttgacaccaatatatgttcatgaacctccgacaaaagaatcagtttttcttctgaattaatggtagtagtcatagctacagaaacaagaatttcatctgaaaactcctgtctaacgagttgttctagctcgactaaattgtatttccgcccacgtataattattatgtctttttttctaccaacaatatacaattcaccattttgcataaatcccacatctcctgaatttatccattttgggaaatcagaattaaaagactcatacttttcatttttcttgattttctgaaccatttcgggagaaaggtatccaagtgatagaatttcaccagcgatgtatatatcgccaacttctccttctttgcagtctaatccggacttcttatttgctattcttatcttagtacggtctttaattcctccgttggaaacaattgcttttccgtaaggctctttttctatcgttttatagcgatttgtagaagatttatagccactgataactccacaagtttctgtcattccatatgcaggaataatggatgccgcattaagctgatagggtttgaagcattcgataaaattattcaaatcactatgatgagctaattcgccaccacatacgatagtttttagtgaagataggtcataggggtaatcagggtttcctttttgagtttccacaagaagtttaaacacaaaatttggaaatcccaaatgagtaatctgaaacttgggtataagagtcagaaagtaatgtggatactccataaaaatagatgaaggaataagatacactggaattccctgataaacacccattatcatatggatagtcaagcctaaaacatgttgtataggcgaccatgtcaacaccttggactcttgtgaatagtggaagatttctgtcgctctctcaatattgcagaagatattcctgttagtaattgctacagccttggggacatctgttgttccagaagaagatagaatacaagcgatgtcgttgttgttagtttttacttcaaatttaagatcgcctgtattattcaaaatatcttctatagcgaagaagttcacactagtgtttatggtcggatcttttgagagctcataaatgatgttagaattagacacaatacacttcgcttgtgtcatttttatgatacgtctcaagtcattagtaatatcttttcctttagtataatatacaggaaaaggaatctttccacattgtagacagccccaaaaagctttcacaccacagatcgattgttcaaacacctgtataacaatattgctttttgcttctcgattgagaaaaaaagcaattctgcaactttggcgatataattctttgtatgtaattgtatcaacaagctcatacctttctcccaacaatacaaatgcggtttcatttggtctcattctagcttgcctatctaagaatgaaaaaatagacaccttatttttttcctgtaatctcatctgtaagctatttaatctgaaatttttgtttttaggataagttttgcaattgttttcaagagaatatttgaagttccctcgtatatagttccaatcttggcatctctatacatcttttcaagaagagatgttttcatgtatccttcacctcccaatatctcaatgccctttgatgctatatattcagctgtttcagatgaatacagcttagccatacaagctattttaaaatatttaatgaaatcaccatcggactttaatttaatagctttttctaaaagcccttgagtagcttcaatacgtgtcgccattcttgcaagttcaaaatggattccttgataattggctattacttttccaaattgctttcttgtctgagcgtactcgtttgccatatgaaaaactcctcgtgccaaccctaacatttgtgcagcaatgccgactctaccatctgtaagaagttctaatataattcgtttccccgatccgacacctcctaatatgttctttttgggtacaaataaattgtctatttctatgtcacaagttgaagaagccctgatacccattttgtcagcggatggaagaatttttaagctttgggcgtcatctatgatgaatgcagtcaggtaagaacaagagtcttctattacatttgccaacaggataaataaacctgcctcacgagcattggttgtccaatgcttttttccagaaataatatatccgtcaccgtgcttacgtgcttcacatgataaagaatacgcatcacttccagcatgatgttctgtcaacgagaatgcaccgacaacattagttgccaatttaggtagatacagttgtttctgtaaatctgtaccccatttattgatagctcctatgaccaaagtattatgaacatcaacaaacacggcaattcctggatcaacctttgaaatttcttcaatagctgctattgtatgtgtaaaagaataccctaatcctccatattcaataggaatttcaatagacataatcttagaacgaaatagacttttcacaagacgaatgtctatctccgcttttttatccatttctgaaacaaggggaagtatttcttgtatcgaaaaatcggaaatttcttttgcaaactctgcacaacttacacaaacagagctatgactaactatcctcatatctttcggtattatttttgattactattgacaatgaaagtggataaatctcttttacttcataagatatattcaactgtttgtcaaataacttatatatctctttacgagtatagcctgcaagaataacaggaacatctctccagagacgagatgggatgagatgtacccaccagactcgtctgaaatccataataaagatgatacccccaggatttaagtaattttgcaaattaccaatgatcttgacaggatctttccaatagtttaacgagaatgatgaatatattgcatcaaactttttgttggggaaattaatatcttctcctttacaatgaatgtaatctattcttttttccaatcctttttgtttaatggctttgcgaccaagttttaccatatccgcagaaatatctgttgcaacaatagagacattgttagctttttgagcaatgatacttgccaatgtcgctccacctgcgccaatttcaagaaaatctccttctttctttaatgccaaaattttatctgcaatagatccgtagattttctgaaatttttgatgatctcttacataagaatctgctgtaatagttttttgacctattaagaattttccttggaatgcttcgcatttatgaggttttcgtgccatacttttatagtttaattgttttatactatgataaaatatacgattattcaattgcaactaaacttgaaggtactcctatggtggtaacaactggtctttgcgagcattcccccgttttggtattgtaagtatagtatcctgtgccttctttgcacgtcataccaaagactataaaatctttgtatcgtgtacaagcaaaagctcccatgcttgtggtcaatggaagatcgagtttttcgatggttttattccaaagattgattttaactggttgatagttgaaatcaagaattgatgattgcatagggtcattgtgttgagtgtaagcagggatgttaatacaagcatatgctattccacctcctgcataatagaacggaaggatataggcagcatcagtgtctatacctgttacttttgttttggataattggaagtaataatccttatcccattcatcagttcctttttttatacgtaagaatccgtctttcaaaggattcatcccatctatgcctatactatagaagtagatgtctccatgttcgtccttgatagccgaggaatgacgaaaaagtccaacagatgcagttcgattgtctttaattaccttttctaccgtgtttgttttcaagtcaatgatggctacctctgctcccgttccgggccatgaggtgtgaggtgaatttttctgattaagagagacgtaaagttttccgtcacggattacattgcatcccgggtcgggattattgtcattcgttgcatattttgcaagatcaatctcatttttttgctgcattgtttgaggattgaatatgccaatcttccctcgtttactgagcgatacataggctgtttcattattgaagaaagcaatttctcccggacgagagtcctgcccaaaagtcattgtctgacctttcaccaaatgtcctttggaatctctggtgaattgatgaattttatcgccccacactccttcggcaatcaatactatattgccatggacaaagggataagtaccgaagccgaactcgtatgtatttttattgttgacctctttctgcgagagatccgagaatgtccccaaatagtcggtcttttggtcaatctgattgataaaaacaaaatgctgctgcacctcttgaggagtaggcgtaggttcatcatttttgttacaagatgtcagccctatgaagccgaccagcatagcagaaaaagctatacgattgaaaattgttgtattcatctttttatatttgttaaattagaaaattccttttgagaagacatatctgaatttgaggtgaaatgttcgtcctgccaatggttggcggaattgatcccaaacttctttgttcattatattatggcattccaaggctacggaatatttgcttttgtaggtcaacaatagccccatgtcattgacgaaactgcggggaatacgtcgtttctgtaattcggtaagttcccagaagtagaagaactcctcagtaaatttgccgtcccagaaagccttgacataccaattcttaaataatcggttgctgtgatactccgccccgaagttggcgaacaaatagggaatgttcggtagtcgcaatccttttgtcggattgggggcttgggtgccaggtaaatagtttaagacatcacgcacatcctgataagttagatttccgtaggcatagaccgttggcgatatgtccaattttatttcggtttctatacctttaatatgtaccttttctgcgtttacatatccagctgccatgtgttgtttcatcagttttatcatatcgcttacctgcatataaaagctgttcacttcaaactgcaatcgcgataatccgaggacatcatttttgtctattaagaaccccagattgaagttgtggcttttctctggtctcaatccggctgcaggaaaggtgatgataccatcaccgaatagttcttgtgaattgggaaggcgtattgcccgctggtaagatgctttcaagtggaaacctctgaagggctcgtattttattgcctctatccagcctatttgtgaggtcgtattgttctttttcttcggagcctcaatcatctcgtatgaagtcaaatcttctatctcggaatggaggtggaaatactttgcggagagcatattcgtcagtttcttatcaaagagttttgactcccaagtcaaccccgaaatgacactggtctttttgctgggaaatcctccgataacaaaaccagcatgctgacttgcaatgttatcgctcggttgtcgtctggcgtagttaataagtgtgttcagattcaaactgtgattggcggacaacttgtaatcaaaattaatacgttcattgatttccaatcctttgtcattcgagttgtgaggaacatcccctgtttctccatgtccattcggactcggatatatgtttccttcgaaatcgtgattaactcgtgccgtatccacaaaattgtttgttgtatgtgaaagggagaaatgggactcaaagttaaggcggtcgttcagcattccgctttttatcaatttgttttccaacataaacattcctgattggttttcggcatgttgtatgttttttaagataccttggatttcattgaaacgattgtaatacccgaactcggtactaatctcatcgaaccaaagtctcgtgaaagcaatttttcccttcaacatatacgaatgaaaatgatcatggtcacgtcttaccaacagattttctctctcgggaactctgaaagagtagtcattctttgcagatgtataataacctcccgcaccgagtagaatgccactctttggaaaattcttgcgagagaagacacttactttgtgtgtttggtaagatccgaattcatacgaggcatctaaataatccgtactaaactctttagttacgatattgacggctccccccaatccatcacatccgaaacgggcgggtatgatactcttatagacttctattctttctataatgtctatcggaatttcatcaagagaaaaagccccgtcagaagtactcattggtattccgtcccataaaatttgaatgcggtttccttccaatccatgaataataattctcgaactgcttcccaaaccgccggtctgtccaactttcaaacctatggttttatttaaaacggtttctaacgaaatagatctgccttgaagttctttcgcatttattacagaaactgcttcaggcgactctctgagaacttgtgcttttgtttttccgaaaaccactacttctgccaacttcgttgattctggatgtagttttaaagtatgccgtttcccatctgtagtaatcgtgtcgttaatcgtctgataatctacataacatactctgagcacaagtgtttgacgggtaggtgtagttaatttcaccactccttttctgtcagtggtcgttccgttcttgtatgttaaatcgcctagacatttccattgaacagcggcaaattcgatgttgcctccattctctgcgtctataacttttatttcagttgtttgagcaaaagaagaggatgaacatatcattaaaagaacgaaagccaacaacgatataagcaatcttcttcggtcacaaaataatggtatctttttatacattgaaactccttgttttttgtagcaaaggtacggagaaaccttgcatgattctacccgtaaaaggtaaaactttacccttattccgtattaaccatttcttttctttatagaacgaagatagtcgcttggattaatgttgaattcattaaagaatgcttttgaaaaatgacttaaatttgaatatcctaattggtagcctatttcagagacagatttaaattctgacgacaatagtctttgtgccatcttcattttttcatgtaatgcaaactgtgaaatgctatctccaaaaacttgtttgaaacatttctggagtttagacacgctcatatttgcatcttttgccaattcgcttaacaatggaggagaacttatattatcaataatcttctctctgaccttaagtaacatctctatatctgaaggatgtaattttctatttgattcaggatattgtcttaaattcaattgttttaaatactgataaaataaaagaagagattttccatatattggtaaataccggagaggatccgtttcaaattccatgcactttatcagttcttcagtcaattctaatatatgtgcattaaaagattcaaatatgtagaaagaagctctgcttaaaagaagttctagtatatatgtgttacccatattctccaagtctttaacaagctgctctctattaaaggttaaggccaaagttatattccatttattatttgcgggaatagtccattttgtatctatctctggagagtgcatatatatgccattccgttctgttttacctacactaaatttctcatctcctataagctgctcaaatttatcgatgtaaaatacaataggaataaggttggtatttctccttcccaaacgatgaatgtgcataggttcataaactttgatttttgagtacgatatggtaagccattcgcatgggtaatattgtttgaaaacaccctgcccaaacattacaggcagatggacttcattatttattacggtcgtagataattgttcggcaatcatttgcaaccaatacttgggagaactaattgcatgaaattctattgacattggatttttttttgcaaaggtcgtaaaaagccatcgtgcatccaatacctaaaatcagtgattttttgccgataaaaacctgttaagggtatttgtatgtctattaagggttggtttatccttatcacaaccactacctttgcctgaaaaaacaaaaacatcaggcaataaaaataatgacatttaagtttcagttttttgctcgagtaacaaatttatcattgttttctggtatttgtgtttatgcgcaatctccgaatgaaacggactctctccagacagaagaaatctcataggataaccgcattaaactcaatgactatctccgtgttggcattttcgggggagaaaatgaaatacgcaattactacggagagggtgtcttgaaattaggtgttcccgtcgccataagtgcttctgccttttcggaagtccgttacagagccaatagcaacaacaatcataagtttgacatccgtgaggcttatctaaatcttaatcttggcaagtttgattttcgtgtaggtgagcaaatcgttcttttggggggcatacagatggattcaatccaaccaacaacgttactcccccaagattttcgtgcaccccacctgtcttgtgaccgactctactttaagctggctctgactgcgaagtgtagcgagatcagtcagtgccaatgcttcactctcatagtctttacagccaacggctttcagagacacgccctctttctctgtaagggcggatattttccaatagggtacggaagagaaatcacgattttctatgtaccgacggcagaccatagcaagtgtcggggtctgtacccgtcccaaagaatagcctcccttgcgggcgatggacaatgcacgacttgcattgatacccatgagccagtcggcttcgcttcttgccttggcggagtaatagagattgtcgtaatggcttcctggcttaagattggaaagtcctttacgaatggctttgtccgtcaatgatgaaattcaaagacggtcgaaaggctttctgcaaccaagatgttgatagatgtagcgaaagatgagttcaccctcacgccctgcatcggtggctacgatgatgcggtctgctttgtcaaaacaggagcgtatcactttgagttgtttgagtgccgcaggatcggatatataccccttgtccttacgtacttgacgtaccactaactgaaaaggattgggacgaatgggcagatcttcagctttgtaggcagaaaaaccgtaggcttcaggcatggcaagggcgacgaggtgtcccattacccaagtaacaaggtaactgttgtactccatatatccgtcttgcttactatttgcacctacgatgcgggcaatatctctggcaaccgagggcttctcggcgataatacaagttgtcatagttgataataggattaagggttacatcttacgtccacgggacttcttctgtttgttttcgtcctgcttttgcttctgctcggcagtaggctgtgtctgtcccgttttgagtggttctttcacgttcttggtggcttcattctatcgtaggacagatcccctccgtgcttgtttgctatggcattactgccattggagtagtcttgatttgcctttttgcaatcgcctacttcctgccctataagcaagtttactcgggaacggctaccatacatgaaataacaatcgcaccaaccgatagtacggatataaccattctgcttaggtttgagaacaaacgccccggcaatgtaaatggacaaatgctttatctgcaggcgtccaatggtacgtctgtggggacagtacgagaactttttactgttcgtgatactttggagcggcaagaaaccttgtgtcgcttcaagacgacggacatccaaccattggaaaatcaaactgtagacttcagattggttcaatcttcctgcaatctccttcaaaagctactcggagacattggattatagcgcatctattccttaatcaggtgtttcagtgttgggtctgtcttgatgcgttccgtctctgcatccacaagagaaagcacctcttgttttacacgcttatagttggcttcgatagtctctttgagattgtcggagccatcttcgtttatgaagtctgcgattatggggatgggttggtatactttcatctcggcagagatcttagtactatccacaacaatctcagcgtggaagatcttttgttcgatacgttcgtcgaagttgtcggatacagcacctacaaacataccttgtgtaaggttactgattttcgatgcagggataaggctgtccatctgggtagagattgaggtggacttatcgttgcgattgatggtcatggactgccgttgctgaagcactttgccaaaacgctcggaaagcgtcttagccgtttctcccacgacttgtccgctaaagacattacccacagtgttctgtatcaccttgctttccttgtcgccataatcacgggtaagctgtgaaaagtcttgaaaaccaagacacactgccaccttgttgcttcgggcggtagcaataaggttgtccagcccacggaaatagatagtcggcagctcgtcaataatcacagaacttttgagctgtttcttcttgttgatgagtttcacaatacgactattatagagtccaagagcagcggagtagatattctgacggtcgggattgttacctacaaccaacactttcggctcattagggttattgatgtcaagcgagaaatcatcgcctgtcatcacccaatagagggcaggtgaaatcatacgtgatagcggtatcttggcactggcgatctgtccctgcaactggtcctgcgctccaccttcccaagcgtccatgaaaggagaaagataattggcaagttcatcgtaggaagtgagtatcggaaatatttgcgcatagggacggttcaggaactctatagcatgggggaatgtgcaatactttccgttctcatagattttgagaaaccaaatgatggcagccagcaagataatcggcgactccacaaagaaatctccctgcttctgtatccacgagcgattcaaattgagcatgatggtataggcactctcgtaagcgtccgatatatccgtcataaaggcaggattgatgggattgcaccgatgcgactttctcggatcatcgaaatttatcacgaagaactgcggctttactttgtaggcgtccaaatgatgaagcaagtgattgtaggctatctccgacaagtcggggaacttgtagtcatagatatacatcgcaaagcctttctctatctgctgcttgatgtaattgttcacgatagcgtaagacttacccgaccccggtgtgccgagtaccattgaagcacggaatggattgaccacattgatccagcccttgttccacttcttcttatagtaaaaacgtgtagggagattgaccgagtattcattctccatcagccttgtttcctgcataaaactctcgttctccgtattgaaaacatcgtccatcagattgtttttgagcaatcggctcatccatacgccacccatcagcaggcagatataacctacggagagtgtgaagatgtagagcgaagccgccccaatctttccgatgggcaatgctaagagccaccagttgagaaagaagaacacaaaaccggagaaaagcaccgtccaaatctttggccatgtgattttctcctccttcacgccctttgtcccaaggcaggacagtgcaaggaataccacacaaaagagtttcgtccaaagtatggacgagaacaagcccgccgtgcgttggaaattcatcagaatcttgtccactatagctattgtaaagtgccatgtatggaaagcctcatagcagaaccaataacagttaatcaagaggaatatcaccgatatacctcgcataaagtccataactttacccaatgcccttaaatcatcttcttgtgccataatcgtattgttttgggaagcctcccccgtcccctccaagggaggggagatagaaatgctcgtttatttattgttttcttcgtctaagttttaccttactctgcctgcggagcttacgctgccatgccgcttccttccagtcatcgttgcctgtagatgtgaatgagctatccaccatatcctcgatgagttcatcgacgagattatcgccttcttccgtattctgttgcgaaggttgaacggttggcgattgttccaaatggacagacggactaccatacagcgcttcatccaagaatggattgtgtgttggattggatagatacgcattgaatacattagcagcatatcccttgcctaatcgagaaccattgagcgcaattccctctttatcgtcaataaaggtaatgccatagatacgaccgctttcgttctttcggataaccacccgcaagccctgttcctccaatctttgccgaagttcttcctccgtctggggagaggtacgcattgtttgcaaaaccttgtttctgatagcaggtatcaatggcttaatagcttgtttcgacttctgcatcctgttctgtacggcagtatagcccacaccccggccaatatccgaggcatggatgggtgtgcttattttgcctcccttgtcattagtcggaacatagacaagtccatcgtaattctttccccgaaactccgtctttacttcttctacggcaaggttatatttgcccaaaatggcgtttagttcgcccaatgaacagaaatgataatgtttcagcaccatgcggaaaacgcttgccacctgctccttgatatttcctctggtggtgtcaatcttaggtgtttcattcatcaccttgtcagcgatctttgagcttgggataagattgtatttcctttccaaggtatcagtaatcttcttgcttcttcgcttctcaaatttgtcgttgattttctttccctctccgttcacccgaagcgacacgatatgtatatgctcgcgagcaatgtcactatgcttgaacacgatgtagggttgcttgccatagccgagtgcttccatatactccttggcaatctgtgcgagtatttcatcggatagtttttcgtccgggtgtggattgagcgagcaatggaacaccgttttcttcgttcggcatttctttggtatcagagcctccatatcggcaaatacctctgccatcgtatatgttccctctttgttttgatacaagttttgggcaaaaagaatgcttgcttcctctttctctacctttttgaagttatagccgagtgctcctccaaggttctccgtacttgaaatctttgctatcatttttggactaaattttcaacacttttcttcctataatcaatggtcaaaccgatagtctgctcctgcaaggcaataatctgagccgagagtttctccaatttttcaagtaaaatctgtgcagtcctgaccgagtgatagctgttgatggcacgcacagtttggttgtacagcacaccaatcttatggatttgtgccgtcaattcagaaagttttcggtagtattctacggcagatttatccaccgtaatcaccttgaaactatctccaagaatacgcccacgcacaaaatccgacttcgtttctgctcctgaacgctgaaacaagtcaatcgctttttgctggtctttgagattgggaagacgtacatgccagttgtcccaacgtggcttttccgccttttttctctctgaacgagatttctcttccttatccatagctttacttttctttaatcacgactttggagtgatttaatccccttcggggcaagggtctttgtggtacaactgtaagtttgtgttacaaagacacaccttgccaatatcaagagttgatacgattgaagtatccacccttgtggggtgtctgcttcgggatattacctccatgtattattctcgcctgcaaagttacggcggattttcaaatatctcattatcaatggtattcactctttttcctcgcatttccctgcacttcatcggtgtcatataatcagccaaaatatcatttattttgcaatcagaacgagcgaacaatggtatgatgatacaagtaaaagatacatcgtattaccgttggcttacactaaagatgataagaaggaacgaaacatattcataacaatttgttgtcatgacaaactattgtcagtacaacagatagcaagaactataaatcgtcctttcagactatcgcacgaaccatacgcagccagaacaaactgtctgctgatacttctcaagaatgagagaacgtccaaacatcaaatagacaagtaatatgaactaagaaattatcgttatggagaacaaacaacaacgccccatctttctggggttctcctcgcaaaagggaggagtcggaaaaagcacgcttgccgaaatcgtaagcagcatattgtactacgaacagagcatcaacctcttcgtggtggactgcgacctgtctcaggattccttttacaagctgagagaacgtgagaagagtgtcattcagggaagcgaggagctttccaagtctatgcaggcattctttcagcacctcggaaaaaaggcatacagaatttacaagtccagcccaaaagaagccgtcaagacagcacaaagtaagattgacgctatcagcaatgagaagtaccagttggttgtgttcgactttcccggtcatgcaggaacaacggagttgatggaactgtcccttcagatggactatatcctgtctccacttgaagccgacatacagtcactcgtctcctgcatggcatacgccaagaccatcacggatattggtgtttctatgtccgactcacggataaaggacattatcctgttctggaacaaggtggacagaagggtgaggaacgtcatcattgacgaatacacaaagcttatccaaggacacgaactcacactcctgcccagctatgtatatgccacgcaccgcttctctcacgaactttccacatacgggctgcgtggtgtgttccgttccacctatcagcctcctgcaaagggactgcgaacgggtacggggctggatgaactcgtctccgagataattcaacgtttcaaactaaaaacaaaaacagaacatggcaacgattgaggaaagaaaacagcaactggaaaagaagctaaagaaaatggcagaggacaatgtagtggtgaaacctgtcacggtccccaaccccttcgatccatccgaggacatcgagccttccctcgcaacatcacgagaggaagacaaaggttcggaagaaatgaagacggcaaaagaagaacgaacagacgaaacaggaggagaggaaatcgggaacacggaaccgaaaagagaaagaaaaccgagaatagaaaaacctggcaggtcgtccctttccatagaggaataccgttccctatactttcatcccgtacgttcgcaaatgcggacggctttctccatcaatttggagacattaaagaacctgcgcaatgtgctacaagacttaggagaaagggtatctattgcttcctatattgataatatcctccgggagcatctgcgggaacatcaggaacttctcaataatgcagcagcaaagcaaagacgtaagacaacaataacactatgatggaaacaatacttttcagttttatactggtactcatcatcatttggatgatgcttggtatcctgtatttctatatgcggtatgtatctccgtatgacttcattatcaagaaaaacggaaagagcgatgaagatagcaagaagaaagaagcaacgaagaaaaaagacggacagaaaggaaaaggaacaatagagcaagccgagtttgtactgattggaaaaagccgttccacttccccgattatcccacaaattccctctgtttcatcatctgaaaattcggagcagaataataataattttgcaccgcagaactccgaaaaggaggaagaaatgaaagaggacaacgaaatggacattgatttcgagatggagagagtggacgaagatgagattgtccgtgaggaattaaacctatccatcgagcccacatcgggcgaagccgaaatttcggagcagtccgtcctcgcacgtgacttagtccgcctgcaaaagtgggcaaagaacagtgaggaggctgatgaggaagaagtcaaagagacagttcggcagcttcaagactctgagctattggataagtacaaggagaacatcgccaagatgcagggagaacagtctgcactgttggagaaaatccgtaaggcggaagaaaaggaagatcagagtgctcaaccagcaatgccttcatcacaaaacccaacacctcctgtttctggcatatctgacacagcagtgggcgatgctgacgacagaccgctgtcctattatctgtaaaaatggtttcttgattttcatatttcggaggaacgcaggggtggctcaaaagtaaaataatcagccaatatctatcatacgataaaaccgagccacccttgacacctccacaagaagacaatttgtttaacaacttaaaataaacagcaaaatgaacaacaaaaaaatcacaatgatgctgctcctgacggcactgaccaccgcagcagcgtatgcacagggaaatggtatggcaggtatcaacgaagccacgaagatggtaacctcctacttcgacccgggtacgaaactcatctatgccatcggtgccgtagtgggtcttatcggaggaataaaagtatacaacaagttctcaagtggcgaccccgatacgagcaagacagccgcttcttggttcggtgcgtgtatcttcctcattgtggcagccactatcttgagaagtttcttcctataaggcgatggcagcatttgaaatcaacaaaggtgtaggtcggacggtggagttcaagggtttgaaggcgcaatacctcttcctctttgcgggaggcttgcttgccgtcttcatcctcgtggtcattctttatctctgtggagtgagccagatagcctgtctggtcataggcatagtgggtgccaccctcgtggtgtggcaaacgttctccatgaaccgtaagtacgggcagtatgggctgatgaagcagggagcggtgcgtatgcacccacgatacctcttgaaccgccgaacggtctgccaccttatccgtaaccttcaaccaaagaaagcgaagaaatgagaaataaaagcaagataacgacccttgaatcaaagtttccgctgctctccgtagagcagggctgcatggtgagcaaagatgctgacatcacggtggctttccgtgtggagctgcccgaactctttaccgtcacctctacagaatacgaggcaatgcactcggcatggcacaaggcaatcaaggtgctgcccaactataccatcgtgcataagcaggactggtttatcaaggaacgttaccaaccaaagatggcagaaagcggacttagtttcctctcacgtgcatctaaccgacattttaacgagcgtcctttcctgcaccactcagtctatctctttctaaccaagaccaacaagcagcgtatgcagcgacagagcaatttttcctcgctctgccgtgggcacttgctccccaaggagattaccgacaaggaggaagtggtcaagtttatggaagccgtagaccagttcgagcgcattattaacgacacggagcaaattcgactcagccgtatgacggaggaggatttggtggggacagctgagaagggcggactcttagaccgctacttctccctttctgaagaaggacacgcttctttggaagacatacgattaggagcagaccttgtgcgtataggggataatcgcctttgcctacatacgctgtcagacacggacgacctgcctacaagtgtttccacagacacacgctatgagcgactatcaacggacagaagcgactgccgactgtcctttgccgctcccgttggcttgttgctgccctgcaatcatatctataaccagtacctctttatcgaggatagtgatgtcaacttggaacgcttcgagaagcaggcaagaaacatgcactcgctggcacgctacagccgtagcaaccaaatcaacgaggagtggatacaggagtatctcaatattgcccactcacagggactgacctccatccgtgcccacttcaacgtgctggcatggagtagcgacaaagaagaacttcgccagattaagaatgacgtgggctctgcccttgccttgatggagtgccaccctcgccacaacaccattgatgcggcaacgctctactgggcgggtatacccggcaatgcggcagactttcctgcagaagagtcattctatacttttatcgagcctgccctctgtttctttacggcagagacaaactacaaggattcgctctctcccttcggtatcaagatggctgaccgactttcgggcaagcccatccacttggacatttctgacctaccaatgaagaaaggtatcattaccaatcgcaacaagttcattctcggtccgtcgggcagtggcaagtctttcttcaccaatcacatggtacgccagtattacgagcaaggggcgcacgtgctcttggtcgatacgggtaacagctatcaaggcttgtgcgagcttatccaccgcaagaccaagggcgaggacggtgtttatttcacctataccgatgagcatcctatctcttttaatcctttcttcaccgatgattacttctttgacgtggagaaaagagaaagtatctgcaccttattgcttacgctttggaagagtgccgatgaacatattaccaagacagaagcgggcgaacttggttctgccgtcaatgcttacattgaacttatcaggacggatcacaccatcgttccctgcttcaacaccttctatgagtacctgcgtgatgtgtatcgggaggacatggagcaccgggacatcaaagtaacgctctctgacttcaatatcaataacctcctaacgacactcaagcagtattataaaggtggcaggtatgacttcctgctgaactcggataagaatatcgacctactctcgaaacgtttcatcgtctttgaaattgatcaagtgaaggacaacaaggatttgtttcctgtcgtaacgattatcatcatggaagctttcattaacaagatgcgccgattaaaaggcatccgcaagatgattctcatcgaggaagcatggaaggcgattgcatccgctaatatggcagactatataaaatatttatataagacggtcagaaagtatttcggggaagccatcgtcgtgacacaggaggtggacgacatcattcagtcgcccattgtcaaagagagtatcatcaacaactccgactgcaaaatcctgcttgaccagcgcaagtacatgaccaagtttgacggcatacaagccatgctcggactctccgaaaaggagaagagtcagatactttccatcaaccagaacaacgataccaaccgactatataaagaggtgtggataggtttaggcggtatgcagagtgccgtctatgccacggaggtgagcatggaggaataccttacctataccaccgaggagacggaaaaggtggaggtgatgcaacgtgcggaacagctgggtggcgacatcgaaacggctatcaggcagttggcaagtgaaaaacgggagaaaagaaagtaatttttcaacaacttaaatatgacaacaacaatgaaaaaacaagtttttatgctacttaccgctttgactttattctgcggtggtcaggcacacgcacaatgggtagtaaccgacccgggcaactttgcgggtaacatcgccaattccgtcaaggaaatcgccaccgcctcgaagacggtgaagaacaccttggacggcttcaaagaggtagagaaactctacaacgacacgaagaagtattacgacgatttgcgtaagatcaagaacttaatcggtgatgcctataaagtaaaagaatgtatcctgatggtgggcgacatctcggagatttacgttacctcgtacaagaagatgctctcagacaagaacttccgtccttcggaacttgctgcaatggcttccggctataccaagttattggaattgagcggcgagagcctgaaagaactcaaatcggttgccaaaagcaatgtgttctcgatgaacgaccacgaacgtatgcagcagatagaccatatctataccacgctgcgtgaatatcgttcgctggtatcttactatacccgtaagaacatatcggtgagcttcgtgcgtgccagagagaagggagaactgagcgaggtaaaatccctctacggtaatacggcaagccgctattggtaatcaagtaaggaaaggacaaacttatggattttgccagtttacacgatttgctccgctcgacctatgacgagatgatgccgctttgttcggatatgacaggtgtggcaaaggggattgcgggcttgggcgcgctcttctatatcgcactgagggtatgggcttcgcttgcccgtgccgaggcaatcgacgtgtttccgctcctacgtccctttgtgattggtttttgcattatgtttttccctacgatagtgcttggcacaatgaatggcgtactctccccaatcgtcaagggtacggaaatgatggtggacaagcaggaggggacgcttgccaaacttatagcacaaagggataagttgcaggaggaagcctatctgcgcaaccccgaaacggcatttttggtatcgaatgaagcctttgaccaaaagattgaagagatgggcatcgtcggtccggaggatgccataaccattgcgggaatgtatgcggaacgctctgcctaccaaatgaaacaatggattttaaagtgtgttcacgacatcatggaaatactcttccacgctgcgggattgattattgacacgctgcgcactttcattctgattgtgctctccattcttggacccgtcgttttcggcattgccgtatgggacggactgtcggggtcgatgacggcttggttttctcgctatatatcggtgtatctatggttaccggtgagcagcatcttgaccgcccttctgacaaagatacaagtgctgatggtgcagaaagatattgaaacccttagcgacccgaatttcctccccgatgcgggcagttggtatcacatcgtcttcttcctcatcggtatcgtgggctacttctgtgtgcctacggtagcaggctggattatcgaagcgggtggcggcatcggctcttacggtcgcaacgtcaaccagacggctcagcgtggagcgcagggcgcatacaccggaggcaagtatttggcaggtggagccggagccgttgcaggcaatgccatcggacgtatcaagggtgcattactcaaaggtaaataacaaaaaacgaaaaaaacaatggaattcaaatcactcaccaatatcgagacctcattccgtcagatcaggctctatgcctttgtctttgccatcgtctgcgtggcggtcagcggctatgccgtctatgcctcgtatggctttgccaaggagcaacgggagaaaatctatgtgcttgaccaaggaaaatccttgatgctcgcactgagtcaggatgcaagcaagaaccgacctgtggaagcgagggaacacgtccgccgtttccatgaactgttcttcaccatcgcgcccgataaggatgccatcgagaagaacatggagcgtgcctttgtgctgtgtgacaagtcggctttcaattattacaaggacttggcggaaaagggttattacaaccgtgccatttcgggcaatgtcaatcagcgtatcgaggtggactctatccgctgcaactttgaggtctatccctacgaggtaacgacctacgcccgtcagttcatcgtgcgaccgagtaacatcacggagcgtaacctgattacgacctgcaccttgcagaactccgtccgctcggacaacaatccgcagggcttcctcatggagcagtttatggtgcgacagaatcaagacctccaaacctataaacgatagcacgatgaaaagaacaaggggattttcattcgcacggcactatttgagggcgcacttgtggcttcgccatcggtgcgacaggctcacggcaaagcagcgcaagctgattgtattcggattaagttttgtctatctcgtctgttccttagtgatgatagcgcagtttttcctgcctcacgaggaggaaaggctgcctatccccaaaggaaaaataatagacagcgacatccatacagatagcgtatttatacgactttatcaacaatattcaactaacagcaatgaaaatggataataaacagaaagaacaactgaaaaaaggactagtcttcggtgggctgggactgcttttcgccctctcgatgtggttcatctttgccccttcggacaaggacaagagtgcggcacagcagggactgaacgacagcataccgcaggcgactaccgaacagctgacgggaaacaaactcaaagcctacgaattgggcgacaagagccgtcaggacgaacagacacgcgaggagatgggcaggctctcggattactttgatagtaataccgctccctcggaaagcgagcgtgcggaagcagccgcttcgacggcaaagattgaaagctcgatgcaccgctatgaggagaacaaccgcctgctgaactctttttatgcgcccgaccctaatgagcaggagcgagaggcactgcgctcggagttggataacctcaaaaaggagttggcagcgaagaacgagagtgaggatgcggaggagaagcgacagctcgccttgatggaaaagagttaccaaatggcggcaaagtatctgccacagtcttcttcgactaccaatgctgcccacgcttttacgcccgcaaaggaaaaaggtactttggaaacatcggcaacaaaacaagcgtcctcaaccagttctcttcccgtaatggaggtattggcagaacgtaaacaggtggtgtcttcgctcaaccagccgatgacagatgctgactttgttcagcaatacggcacgaagccacgtaatatgggctttcattcgctcacgagtgcggttgctgccgtgtcccgcaacacgcttagcgtggtggtggacaggacggcaacactgaaggagggcgacaatgtggcattgcgcctgctcgaaactgcccaagtgcaaggcttgcgcattccccgacaaagccgactcattgcgagagctaagattgagggcaaccgcctgcacctgctcgttaagagcattgaagtgaagggacggattattgctgtgaagctatcggcatacgacaccgacggacaggagggagtgttcattccgggttcggaggacatcaacgcccttaaagaggtgggtgcgaacatcggcggttcgatgggaacttccttcacctttgcttcctctgccaaagaccagattatctcggaggcggctcgtggggtgatgcagggcgcaagtcagctgctccaaaagaagctccgcaccgtcaaggtaacactcaaaggaggctaccgcctgttcttagttcagtcaaaataagcatatcaatcaataaaaatagcaataacaaaataacaacaacaatgaaaaaatggattttttcggctgtcctgcttgccacgatgggagcgtcagccactgcacagacaacaacttcaacgctcacgcccgaccatccgctctcatcgggagaactctttcaaggtatgagcaaggcgatcccaaacggacgcatcgtcctgccatacggcttggaggttacttttgaaaagacggtgcatctgattttccctgcgcctgtccgctatgtggatttgggttcacagaacattattgccggcaaggcggaggatgcggagaacgtactgcgtgtaaaggctgccgtcaaggactttgagacggagaccaacatgagcgtgatttgcgaggacggctcattctacgcttttaacgtgaagtatgccgatgagccagagaagctgagcgtggagatgaaggactttctgtcgcccgtcgagggacatttgccgagcaatcgtgcggacatctacttcaaggaactcggcaacgagtcgcccgtactcgtcaagctgatgatgaagaccatttatcaaaatgataaacgtgtatttaggcatatcggcgcccaaatgttcggtatgaaattcctgcttaggggattgtatgcgcacaatggcttgctatattttcatacccgaatagacaatatgactaatatgccgtattcggtggactttatcaccttcaaggttgtggataagaaagtagctaaacgcactgccattcaggagagagtgcaacaaccactccgtgcctatcatcaggtgaactatatcaagggaaagcacaccgaaagttcagtgtttgccttggaacagttctcactatcagaggataaacagcttgaagtgacgctttatgagcataatggtggacgaacgcttaccttctatgtcgagccgcaagatttacttttggctcagaagattgataacctcaaacttaaatggtaatgaagaagtatcttttccttcttatgtgtgcggtggccattgcgctgcccacacaggcacaacggctgattccaaagcaaaaaggcttggaaatagtaggtaacgtgccaattatcaaaggcgagaatttgtttgccaaagacaattttggcataggtattttgctcactcgctatctgaagcgtgagaattattcatttcttacggtagaatatgagcaacaaaatatgccgtatcgcagctatgatgtgaaactcaaagatgccttcgtgcatttgggttatatgcagcctattgtttctgacaatggtaaaaatgtatttgcctatgctggaatatccgctttgggtggctatgaggaacttaacgaagataagaaactacttcttgatggcgcaaaactactcgatgactctcacttcgtctatggtggagcggtgcatctatccatagaatgtttcttatcggacaatgtgctgttgctactcaaaggacagggacgcatactctttggtacggatgttcatcattttcgccctgctgtatcggcaggaatcaggtttaatctataaatgtagggaacaatgaaaaagaaaatttttaatagtatatgggtaatgggagtacttgcccttgccgtgttttgtttatctgcttgtgatagggagttggatgttcagcagtcttacccgttcactgtcgagacgatgcccgttcagaaggacatcgtcaagggacagatggcagaaatcaggtgtacactcaaacgtgaaggcgactttgccgacactcgctacaccatcagatatttccagctggacgggaaaggaacgctaagaatggacaatgggacggctttcaagcccaacgaccgctatccgctcacaaaagaattgttccgactctactacacctccgcttcgacagaccgacaaaccattgatgtgtatgtggaggacaacttcgggcaaatcgccaaactgtcgttcaacttcaataacgaaaaaacggaggaaaagggaaagtccatcgcagtagtaaccaaagccttgaacgatgcgaacagctaaacgctttgctttattctgtataatatgtttgttctgtcaatcactcccggctcagcgtggggtgcgattggcagacttatcaccttttgagcgtgtcgtagtggtcgtaaaatacttcgagggactacatagaaaggattgttatccctatgtaggatacggtcatcggttgcagccacacgagcatttttctcctaatatgtcagagcggcaggcagactctctcctgcgtgccgacctttggaaatgctttgaacacttcaaaggatatggtaaggatgcactactacttactttgcttgcctacaatgtaggagtaggtcgtttgctcggttatggtaatcatcccaaaagccgactaatacgaaagatagagtcgggcgacaggaactattatcgtgaatttgtctctttctgccgatacaaaggaaaggtgctacgaggacttgtcaaacgacgaaatgtggagtttgtcctgttttatataccctgattatcaaatacaccccttgcgacatttttatgcttcgcaaggggcgttttcttgtcgttttagtcgccttcttcgttatgattgagtaactttgcaaaaaatggaaattgtcagactttttgtacgtaattaaattataatgcaattattgcgactttcttttgcttcttttctttggtcgcctgctcgttcaaagaaaaagaaaagaagccacgcaattttttaaggttgcgtggctcattgtgttagggattttcggttgtttcaattatccgctcttcggggtgggtatcgaaagcccagttgatttgttcatcgggcagcgtgctgtgtattcctctgcccatcaccattccacaatcttcaaggattttgcgctcggcttcttctcggtctgtggctacaacctcaaacacaccttcaaaaacgtattgggtgcatactctgtaaactttcctttccatattttcaaaactcagcgattagtaatctgtgttccattggttcaccattcgatagccaacggtgggttagccaaaaatgatgtgcaccgtaaccatagacaaaaaacttgtcaagttccgtttcttgggagatttggaggagtgcggtctgcaactcctccttgttctcggctatgcttatggcattgataactctcatgatgatgttgggaatttcgtctgcccaactgcgaataatgccttctatctgtactttcatattgttgtcgtttataggttgatgtttttatttactctctgcaaataagggtgcagtcctctacctcggtgggtagtccaaaggctggcacgtgggtaaaataaggttgcatattcccctctatgtctgtgtggggcgatataacctccgctttggtgtccttactccattggtctgcgagtgcgatttcttcgtctgtcagtcctgtactatctccattgataaggtagcctaaactccacgttggaattttctctattgtcttgtatgtcgccataatcgttgttattataggattgttatgcggttgctctctgtgctatcattctcatattcttctgcatcaaggcgagtatctgctcgtggtactcggtgttcttattgcacactccacgactttgtaccactttcatcgtttccaatgatacctcaatggtttcgatgcgctctccgtcctttgtggcagagaaaataagcgactgcggtttgctgtaatagcgtgcgtcatatacgcaatggtgcattgccgtgccttcctctaaatgctcctgcacactctccaaaacgtggatgcggataatgccgtcagtaaactctatgccaaagaattttgctttgagttgcttgtatgcttgttcggcttccatcgcttccttgcgcttcttgataatgttctcacgctctctcatcgctctgcgcttggcttggtaatggtcgtgcgctgctctaaggtcggtggggcaaacatacttggcattgtgaatatccttgcctaattgattgagcatatccaccatatcacaccatagacttccgtcctctatatggtagccgtttcgcaaacagatgcggatagatgcccaatagctatcaatgcttcttcgaccattgtgcatgaagaatttgagtagcgggatttgccccgacttcaacaaggtttccacacggctatcggaaagcagtgccggtataagttcggtaggcactatattgtggaagtttccctcaaaaccatttctgcggagtgtgtccgtaaccttgaacttgggatatatcggtgaatacgatatatggcggtaggcttcgttgtcgttgcgtactgccattggcgaacagaaagaaaaggtgtcaatgtatctgcctaatgttcgttgaacggcaataatcgtttttctcccttgtgcgttccaccaatactgacctatttcaaaggtatatgaagaagccttgcaacctttctccatttccacagaaaggaggaacattcttagtatttggtattctccgcaagtggtaagtatcgtgaaatattgcttttgtcttatcttgcgttcaaaggtttccttgacctgcaaccttgccccgcaatgggggcagatgcaagtgtccgtaggcttttctattgtccaactatgcccacaatccatacacgttgtgcgacctttgggcagtcggtaggcgaaatggtctatacattcacggaatgcccatttgctctgtgtcttggttatcgggcgaaggtgcttactctcggcaaggactgccttctcatatttgtttcttggtttcataggcttaaaaatcaaatagtgacggttgtgtttggggtgctgcgctttcggttttcttcactcgtgcgttacggctctgtatcttggcgagttcctcacgttggtactgcttgatggcttcttgccttgcttcagctttctcctcctctgtgagttccacaatatgatttactgccactctgcaagtgatttcctttcctacttcaatttcatcctcgtcatagtagtgtactgccattgagtagatttcatcgtcctcaaatccattgcagccattcgcctgcacttggttcaagatgtaggttacacattcctcgatgctcttgttaggcttcatcaagttgggtgcaaacaaagagtctgtcgctgcacgttggttgagatactcggctattgctctcgtaaaatgttctgtacctttcatatcgcttagtatttagggatttctacaatttggtttatctgtccgcaaaggaaacttcttaggctggtgcggtcgggtgcgtaatactctgcccaatgtccgtattgattgaccaaatacttcttcaatacgtccataaagtcaaaccgataacccataaggggtacggctgtacggaagtaggtgtttgtgttcaccgcttcggcaagccaattcttttcctcacggctcattcgctcaccacgattgagtttcacacggagaagatacaccttgctattacaaaggctctccaacggttcaacttcccactgcacaaacttagttgccaacacttgctcactttcatcaaccaccgaacttatgcggtaatgagaggaggagctatatccttttttcttcatcgaagatgtgatatttactttctgctgttccataatgacattttttttatgcgtccaaagatcggagtatgctgattcctttttgtagcaagaacaaggtagggggcgcagccggcacaaggttttgcaggaaaatactacccggaatgaaatgtaggtgtggagattttccgtacaaaccaaaggcacagaccttgtgcaagccgtagcccttactacctttgcgaataaaaagaaatcagcaccgacttatggcacatcaaagtggaatagatggacttaagaagcgaaagtgcaacgccggtatggaaaatgaaaaaggtggctacctcaaccgagataaccacccataaagaagaatgaatcgaagaatatctttccttgtgccttagagtacacagagcaggattgccaagatgacggcaagccagaacagccaacgcaggattgtaaaggttacttgcagaataactttaacaatgaagcgtagtatcaggaaaccgagaataatcgaaacggcggttacgacttgcggcgtaactatcttcgagataaggtaaactgcaccgataacgatggaaagcagaacggcgagttcgatgaagcgtgtccaaccgaagcggcggacttgcttgggagaagtcggcggctgcctgttcctctcggttttatacgatgcgtctgccttgatgaaggcgggctgatgaatatcttgattcatgatgattgttttcataatcggggcttttaatagttcaagagcgataacaagatgctctaacgacccaaagacaagtgtttggaaaactcttgacgtgtggagtggagcgtttatcttggctcttgacactacaaaagcccccgatggtgaagtatcaagccatgttctcaccgcctatcgttggcagaccattgaccttaatgagcagcacgattgtaccagtcagctcggtgtacagtttgtcgtattctgtacctgccgcaaagtcgtccgtgagttcgtacttggcaaataccgcttgaattgccttgttgttcagcaaaattagtgctaacctttcgggaagcggacttggcagttccttctcaaactcctgctccagtacggaaacaagggtatcatactttgagaagtgtaggttgtggtacagcacctcgcttgccatcgtctctgcttctgggtaggagaaaccttgcgccacggcatcgcagtaagccgtcagagcctcgtctgctcgagcggttataaacgcattgtcattcactctctctggaaaatgctctccgagatacgcttccaacttcagacggaagtaggaaagttctttctttgtcgttgtcataaattcaaaattttagggttatatacattatttgggggaaatgcctaatgccgtattgaaagtacccaacttgtcggccagttcatccatatcgtgttctatctttttattggtaatacgggcatagatttgcgttgtcttgatgttggtgtgtcctaacatcttacttacggattcgatgggaactcccttggatagggacatcgtggcaaatgtgtgccttgcgaggtggaaggtcaggttcttcttgataccgcaaatatcggcaatttctttcagataactgttcagtttttgattcgtcagcatggggaaaagtttgccatcacgataggtcttgccactatattttgcaatgatgctcttgggtatatcgagtaaaagaacgttggtctccacgctcgtcttctgccgcttggtcattatccactgcttgccgttgagcgtgacgatgttttccggagcgaggttgtacacgtctatgtacgcaagtcccgtgaagcacgaaaacacgaacacgtcccttacaagttccaaacgaccgatgccgaaatccttgttggcaattttaaggatttcctcatctgtgaggaatccacgattgactggttccatgtgaaaacggatgttgaggaacggatcatggtgcaggacaccaagtttcctgcccagaatggtaatcgtcttgaaggttttcatcatcctcgtggctgtgttgggattctgcccgacaaccgttcgaagataaatgtcgaagtcgtgtatcacgatatagccgagttcggacaggcggatgtcagaccgaccgtatttatcacgaaggaaatttgagaagtgtttcttgcagacgttgtatttctgtaaggttgcagcttcgaccgacacgcctacctgccgtgcaacgtcactgttgtgcttgttgaagaggctcattagggtgtccacatcctcctttttgccaagatactccgacttgatacgttccaaggacacctcgtccgtcatctctactttcttaaagatggtctggagaccgctctgaatgttgtcaagttcgaggttggtggaaagtgcttcagttgtccttcccttcaaccgttccttctccctgtcccattgggactgttggacagcaatgcccgttgagccgatggaaaggcgttcgttgttgagatagattctcagcatgacgggggtcttgccctccttgttcacataattgcttctgagatagaagactgctctgaaaatagctttcatacattttactgcttttagttgtagcctgaacagaagtcttgtcctaacacctgccatctgtagccgtagcttgtcggacacattgttgcccgaagtggtgtatggtaacaaaaacacctctgtaatcacgctgcaaagttcaacatatttgtttgaatagcagtaatttacgcatactccttatgtactctgtatgtactcttggctacatttttattttgccttgaaaatgtgtagcctgattgtagcctttttagagcattttgggagtttctgccccctccgtgcatactctgaaaattaggatggggataaaagaaaagtatcataactacttgtagctatgatacttacgattttcttagggtctcctctgatgttcatttcagagtacctaaagcggagagagagggattcgaacccccggcacctctcagtgcgacggttttcaagaccgttgtaatcgaccactctaccatctctccttcacatgattatgtgactttaattgtaaagcgagtgcaaaggtaaatgttttcatagaaacaaaagaataaatacagaaaagaattgatagattaatattcgttaacattataacgtggatattggaattgaacaataaatgtaaagcttattttttgtgattagactgtttcttggtttgaaaactcgtttctttttggtgtatattcagattttatatctgttgaatatttaatattcgatatgaggatgacagttgttctcccttactggggaatagggagtcgggaacaaagtcgaatgcttactttccgactcccaaaccttgttcttacattttgtcattgatactgaacaaacatagcaaaacttcttttactactcttaagccttatttgaggttgaatgccacaccatgcacttacagctgaatatcagttttccacacctaagtggttaaataaggttaataaataaaagatttatagtactatgctttgcaaggtacttgtattttgcatacatttgcatcatcaactataaattgatgattatgaatgtagacaatgtgaaatcgcaaatgcgcaagggaatgttggaatactgcattttgttgttgctggaaaaacaggcagcctacacgtctgacatcattcagcggctcaaggaggccgaactgctggtggtggagggaacgctgtatccgctgcttacacgactgaaaaacgatcacttgctgagttataactggcaggaaagtacgcagggacctccccgaaaatactatatgctcaccgacaaaggggcagtcttcctccgcgaattggacaaggcgtggggtgagattgctgccaccgtcaattttctgaaacaatctaaataagttattcattattaaccagtcattatgaaaaaaaatattaccatcaatatgttaggcaggctttacgccattgatgaagacgcctacggactgttgcaacaatatatcgacactttgcgcagctattttgcgcataagcccgatggaaaagagattgccgacgatattgaggctcgtattgctgaactgtttgacgaccttaaggcacagggagttgaggctattaacattcagcacgtgcaggacatcattacgcgaatcggagatcccaaagagatggatgaggatgagccgaaagacgaggagactgtagagcaagatgcggaacagtcggaggagacgagtacggtcaaccgactgaaggaagaagttgtcgcttattttgatcgattgagaaaatcgggcaaacgcctttatcgcgacccctccgataaaaagatcactggattgctggctggatgcgcccgctactttggtggcgaccctttgtggtggcggttagcttgtgtgctgcttgtctttatcactttcaatacgtctttgtcttctggcatgttcttccacgtaacgccgtttacatggacaccgctttggctggtgctcatctatttcatgatttcaatcatcacaccagtggcacaaaatcccgaagaccgactgaaaatgaaaggaaaggatgtgacgccacaaagcttggcgcaggaagtgaccgaagaacacgtacaggcagatattcctcaaactcggcagagtggggcgataggatgcgtaggaggttttttcaaaattatcctgctggtgatgaagggcttcttaattcttgtctgcatttttgccggattgggattggttactttattggcagccctcattgtgctgctgaccatgcccgatctgtttggcgacattgaatttgcgacgctctattcaaatgcggttagtccaacattgagtgtggtatgtgttgtcagtatggcaggtgtgcttttcattcccctttattgcggcatccactcaatacttagcaacaccaagaaactcctgccgatgggcactcctcaacgcttgatgtgggcaggtgtgtggactgcgagtctcattgtagcgattgtcagtggcatcgccattggtgcaagaatttccattgctgaagagaaacaggatgacatgaggcacgaggcgtacatcaaggagaatacacacaatggcgtattcattaacgaaacggattgggatttcctgaatcaaggcggatggtatttgttggttgctccgtcaaatcgtgagaatcactacacctcaaatggagaatattacactggcaaccagaatgtgcggtatttggacggttactcagactggggactgaactatcaagtggagcgtgagaaaaccgatgtcgcacccggcacatacactttgagtgtggtcgctcgtaccaatggcaaaggagcctatgtatatgccattgccgatggacacaaatatatggtggagataccagccaatggcaatacagctgggaatatctgggcagaggcgaaacgtaggttgagcatcgcagactcgctctcatccgatccggacaggacctattatcagaatatcgttgaggctaacgatggcaatggatatggatggaaccgcatagagctcaaggatatacgcagcaccaaaggctccgttcgctacggtgtttccaccaaaacgagcttcacaggcaccactttcgctgggcaatgggtatcggcagccgacttcaacttgaaatagacagggcaatcaagtttacttttgcaaacaatagtgtggatgttagtgtgaaagtggcttatattgactatttactcagagttgatgaagaatcatgattattaggtattgtattatttttattcatttaatacttttgcaaaataatttagcgttcatcaaaaacattaaaatgaatcgcttaatatagtatttacaaatattatttcaaatgaagaaaaaaaattacttaattcttagtatgattattacgacgtatgcatttggtaatgccaaagagcatattaagacggattcaacgtatcttttaaaggaagtcgttataaacactacacgtatccctgaaataaagtctaatgctgctgcaacagtaacaattatagatcaaaagcaaattgcagcaatgagtaaagctgaacctgatttatctcaccttttaggtttactcactccaagcatggcgttagcaagcaatacaacaagttcacgctcacaaactcttcgaggcaggggtgctctcatattaatagacgggattccacaatccactccattaagatctacagaccgagatatacgttctatagatgtttctgctattgatcacattgaaatagtaaagggttcgactgcattatacggaaatggtgctatcggtggtgtgataaacattatcacaaaaaagaatacaaagaacaaaaaaaatgccggtgagtcttctctctcaggttcaacttataatttctatcatggaacacaaggaatgggctatcgtgtcaaccaacaactttatggttctatagataagttaaactatcttgttagtggttctcttgtaaaaacaggtagtagtattgatggttctggtgaatatatctctccacgctatgggttaggtgatacttatacgtcaaatgctcttattaaattaggctacgcattatcagccaaaaataaaatagaatttatgtataatttctatcggagcttgcagcatactgctcttgttcaaaaaaaaggagaatatctaaagagtccagctataggtatcttcggtgaaaaagacccacaggctgtcgatgaaggtacaccatataatcataatgcgtatctaaaattttcctctcgtaaattattttcaaatacagattttgaagcgtccatatatggtacaagtttatatacaatatttgatttcagaaaacataacccgaaaaaaccgcgctgggaagaaaaaagtggacaagctaccatcaaagatcaaaagattggtttccgttctcaatttaatacattcttgtcaatatctgacaatctcttcactcgtcttacttatggatatgattatcttttagataaaacctctcagccacttgtagatggacgttattgggttcctaatcttcagagtagtaatcatgctccattcttgcaaacaaagacaactctttggcaatgtcttaatgtaaaattaggaggacgttatgaccttatagatgtcaatgtacctgattatgatatattgcgtacaaaacttagcagtcctgaagtacatgttaagggaggaaaactaaaatatgataatttctcatttaatgcaggtatatctttcaataagttgtcgatatttcaacctttcgttgctttttcgcaaggtttttctatttttgatttagggcggacgctgcgtgcagctaaagaagacgttttatccaagattattactgagccagtaaagacaaataacttcgaattaggggtatactctgatatcaatcataggttacagctaaatggatctgttttttatacttattcaaagttgggaagcgaccttaagattgatgaagcaggtttttgggtagtcaatcgtacacctcaaaaggtatatggaatggaattgaacgcagatgcgcaaatattaaataatttaaaagcaggtgccaatttcacatggtttgaggggaagctcaagtctacttcagacaaatgggatacctatatgtctaacatatctatccctgcagccaagtttgctatgtatattgattatgctcccattaagaatatgtatatgcagctacattacgttcatacaggagaccgtaaccgctttgataccacaggtaaaggtacatataacgagggtgaaggaaaagttagtagtataaatttactcaacttttcaacaggaataagtttaaaggattgggaacttaatttaggtatctcaaacttgcttaataatacttattatacgccagcttctatgttgatggcaagagatgcagagtatgcgcatgctgatggacgtaagataacattaactgctacatttaagtattagaaactgaggtcataatgatgaccagcattaaatatgtattgggagttctacaacaatgttctcaaataacatgtttaaaaagctcattttttgatacaaattagaggaatataattcttaaaaatttcgtactgataatattaaaataatgagtcaagagggtgtgtcaatgctccattgcaataagtacgaatttataatattgaaacaaaccctctcttaaaagatagaaagagccatatcaacactcgaacacagagtttgatatggcttttttaatatgctcgtaagaatccgatattagtttctttagtgtgggttagctattgaaacttgagtggaatgatacgttcagctttgtttttatagccatatgaaaatcaataaaacaatcactgataaaagttgaccaagtgagctggttttgcaactttataaaaaaaacaaataattagggtctgctaattgttcaatcaaatccatattctgcattatattcaataaaattgcgtatttttgtattccttttataacctatcaatcattgaaatggatattaattgcgttaaagtagtgctgacagaaaagaaaaagacaaataactggctggttgaacaatgaggttaggtccaaacaaccatgtagaaatggtgcatcactttaatttagcctgacttgaattggttcaaatagctcaaatatgagatgtggaactgattggcttggtgtggttcgaagaattcaaaccaagctttgaaaaaaaataaaatataactcgcaaatgaataaaaagcaattaataagagaggttgcaagaagaacagggttttcaattcgtctttcttcaagagttgtaaaatgctgcttgcatactataatttcggaattagaacaaggacatagaatttccttgaaagattttggcgcattttgtgttgttaaaaggaacggaaggacttatcgtgattttcgagataaaaaaattaagaaatcaccagcaaggaattctgtaaaatttgtaccatacaagaattttaagaaactgttgcgtttcaatgttgttgatattcattctataaatgacggttcattggggaataatatcacattagaaccttgcgtattcacaaatttacagcctaaatacaggataacaaattccaacaattcaagtcgcaagtatggaaaacagaatatagggaaaagaacttttcataagcaagatttgtcagcggctgtttttacatttaatggaaaatttctttatgaccagtaccaaggagagcatgaccatgctaattatccatctataatgataccacgatataatacttctattctcgtccctcaaactgataaaacaggagcgacaataggtattatggaacctgtattgttaagtagtttgcgcgagatgtgcaaagaatttagtagtattaaaattattgacaatgtaaaattaccgatattgaatagaaattattcgtatcgcccagatatgtgtctttattgggaagaaaagtgtttatatatagatattgaagtagatgaaccttatgatattgtaagtcgaaccccaatacattacaaagggaatggagacaatttgcgtgatagatattttattagaaatgggtggtgcgtgatacgttttacggagcaacaagtacacgataatatagaaggtgtaatcaactatattaaaagaatgctaagatggctgactaatgatgaacgtataaactacgatgaggattcattaagttctgtagatagatggtcttatgatcaagcagaacaaatggcatatgaaaacgcaagggaggattaccttggtttgccagattatgtttctactaaacacacgccaacaaacagtatttctaattcttcaattacagataatttggttttcataaaaccagctgaagatattttgccccccaataaaaaatcgaaatgggtatcgctcatcaatgaaatggcaaaatcaaaatgtagttattgtaaaattattaaaacagatggatatcaatggatctatgataaacacatgaatattatttccaaaaatggtaatgagtttataacaggaaagagtccatttgaatacgagcttgaaattccattagacaaaatatcagatttagtaccattggagaccctgttttctgatcaaaaatgggagtatcgttctgatatgcaaatagtcgactttcgtaacatgagagaaatactctttgatgctattgcaaatggcaaaccaatatgggtcgcatatcgttctaaaagctcacgatatagcacgcgtttcttatctaatttgacttgttgttggttgtatgaaagtgatctacaatatcctcatataggattaggacgttgtacaaaacatggcatgaacgcattgtctcatttttatgcgtattgttctaatcgaaagaaaatcagaatgtttgctgctgataacaggatcgaagaactaaaagtgctaaactgtgatcatgtatacttatatcccggagtatacgaaagaagttttgcaaaattaataatgtctatatatgaaaatttttatggaaatggattttttgagaacgcagataaaatcatagaaatcatgccaaagaaagaacaagaatccataattacccaagttaatttggctgattatcatgtactaaaaggcagtattagtaaggccgtaaaattgtatcaacaaaatccctatggatatttccttacaccttcttgcacttggggagaggcatgcattgctgatattaagttttttataaacttatttaaggaacatcagaacgataagcatgaatattatgaaattaatgctaaatttttattgcataactttgaggaggttttagaacggttagtgcaatctaattggatgcgaataaataaaacaaaaaacattacttaggcagggtctgctaaataaatataactatctgacaattaactatttatgttgtataaaatttggtcaattcgcccaaaatgattatctttggatgttaaaacattcaagaattgagatgaaatactactcacaatatcgcagtcatgacctgtttgaacttcaggagtcactttcgggattgagcaaatccaaccgttaggtcaagcaggccgcccaccttccctgggacaggatagagaaggaatacaacaaacgtctgaggaacagtcacaacggtgccggcaacaagcccgcccgcatggtggtgggagcgctaatcgtgaagcatgtggaaaaactgagcgatgagaaaaccatccaagccattcaggagaacctctacatgcagtacctgcttgggcttgagaagtttacggaaaagccggaattcgtttccgagttgttcgtccttgtccgcaagcgactcgaccatgactttttaaacatgctgaccctgatgctggcggaaacagacgggagcaagccgaagaaggaacacaccgacgaggacggcaacgatcacggcggtacgatgaagattgatgctacatgctgcgacgccgaggtacgctatccaacggattccaacctgttggaggagggcagcaggctgatagaccgcctgcttgacaagttctgcgcacgccacaaggtgaagaagccgcagactcaccgcacggaagcccgccaagccttcatcggactgattaagaagaaacgcaaggggaagaaactcattgacaggacaaaactgatccagatacgatgtctgcaggcagactttcagctgtttcttgatttcctgggcaaacagtcaagcacacttcttgcttgcttcagccgccatgactacaaatgtcttcaggctgcgttcaagatgtatgaacagcaaaaaatgatgttcgagcagaacgtccgcagatgtgccgaccgcatcatcagcatctaccagccgcatctccgtcccattgtcaggggcaaggcgaagaccacggttgagttcgaggcgaaaatcggtgccagcatcgtgagcggttacacctatgtgggtcatgtcagctgggatgcctataacgaatcatccgacctcagtatgcagctggaactctacaaaaaacgtttcggcatgctgcccaaggagattcaagccgacaagctctatctggggaaagagaataggaagcacatcaagtcctgccatgtcaattgctacaaccgtccattgggcagacctcccaaggaagagaacgacacacacgcagaggataagaagagagccatcggtgagcgaaatgagatagaaggcacgtttggaacaaccaagagagattaccgagccaacgacatccgagcgaagcttgaccaaacggctgacacttggataggagcttgcgtcttcgctaagaatatcatgaagttcctaaggggacttctttgtctcattttcgaaaaatcgggcttgaagaccttccaaaagagaattatgagcatttttgacagcatggaggttgtattacccacaccacaaggttgtgtgaaagaaataaattagcagaccctaattacaatattacttttttaacaatactttaacagggcttagtcacaaatgttaccagaccttaattcttataccgatacctttgcatcagaaatttaaataaaaacattatgacagaaaataagatgttttgtttccagtgtcaggaaactgcaaagggaacaggttgcaccattaagggtgtatgcggtaaagaggctgaaacctcaaagtggcaagatttgttgctcagcgttgtacgtggtgtgggaaccatccaacatacgctggggaaaaatgcatcaaaagaagttgccgacttcctcgtagacgcattgttctcaacgattactaatgcgaactttgatgaccagagtatattaaataaggtggacacgggcattgctctgaaaaaacaattgcttgagacagctttaagcaagaacattactttccctaactatcaagaagttcactggggtggcgagaagtctgactactctgcggaaggcgaacgtgaaggagtgcttcgcaacgagaatgccgacctccgttcactgaaggaactcaccgttcttggtcttaaaggtatagccgcttattatgaccatgcggttcgtttaggcgaaacgaatgaagagattattgcttttatatgtaaggctcttgccacaattacagctccagacgcagatatggaaacacttcttggcatcgtactcgaaacaggtaaatatggtgtagacgtaatggcattgctcgataaagccaacacagaaacatacggtaatcctgaactcacaagggttaatatcggtgttggcaagaagcctggtattctcatttcaggacacgaccttaaggatattgaagacttgcttattcagacagaaggcacaggcatcgacgtttatacccacggcgagatgttgccagcgcattactatccacaactaaagaaatacaagcatcttgtgggcaactacggcaatgcgtggtggaagcagaaggaagagtttgcaagtttcaatggtcctatcgtatttactacaaactgtatcgtaccgcctgcaaagaatgcaaactatgctgagagagtattcacaaccaactctactggtttcccaggttggaagcacatcgcaacaggcgaagatggtaagaaagatttcgctgaagttatcgcattggctaagacttgcgacgctccacaggaaatagaatctggcgagattgtaggcggatttgcacacgctcaagtatttgcgcttgccgaccaagtagtagaagctgtgaagagtggtgctatccgcaagtttgtcgtgatgagcggttgcgacggtcgtatgaagagccgcaactattacgaagagtttgccaaggctctgccaaaagacgttgtaatcctcaccagtggctgtgcgaagtataaatacaacaagttaaaccttggagatattaatggtattccgcgtgttctcgatgctggccagtgcaacgactcttattcttggggagtggtggcactcaaactgaaagagatttttggtgcaaacgacatcaacgacctgcctattttcttcaacatcgcatggtacgagcagaaggcagtcatcgttctgcttgcccttctgtaccttggcgtgaagaatatacatatcggtcctacccttccagctttcgtttctgaaggcgtactacaagtgttggttgacaatttcggacttgcaggcaactctacagtagaagaagacattcagaaatatattctctgacatacacgtccctcgataaacaactatcgagggattttctttttacatacaataagaaagaataaagtgtgttattcttaaaagcaaacaaaaatggaagcatcaatgtacgaaatactaacaaatagtcctttcttcaatggactaaccactaaggaaattaaagaactattacaaacagtgaactataaaatagtggagtatcctgccaaagagatatatacgcttgctggtatgccttgcaagtatgccgacttcattctcaaaggcgaactgatttctcgtatgactggtttgtcgggtaagcaagtgcagatagaccgtctgaaagcttgcgtcttgatagctccagcgtttatttttgcaaagaacaacgctatgcccgtaagtgtagaaaccgcacagcacactaccatcatgcgtatgatgtcatcggaacttaaacatctgatagataccaatgagcgcatacgcatgaacttcattcagcttctttcgtctattgatgtcttcctcacccagaaacttcgtatgctatccctcttcactgtccgcgaaaaggtggcttacttcttaatgaaagcagccaaagaacaacaaagccgcacaataaaactcagtaatagccgtcaggagatagccgacacattcggtattcagaagttctcgctattgcgatgcctttccgaatttgaagataatggtgccattaaaatagatggaaaacagataactattctcaattcagataaaatgaaataggggaaacaaaagttataattgcaacgactaagtccgtttatagtacttgtggcaattacagtctatgatagctatgctatatgccaacaacaaatcagtcgactgtttttgaaaatcagtcgagtatttttgaaaattagtcgactgttttcttgcattctaacgattgattttatagttttgcagtagtgataaaacacagaataccgacagagggcatgcgctcctaacctctgaaggactaacctatataatcggcaagacgaaataaagtcgtcttcaaaaacgaaatgaaatatttattattattatacacaaaaacgaaatggaataaatgtagcacgcgcgcacacctaaaatacaacgttagcaccctaccattttcctgacttcaagaaaatggtagggtatttaaacccaaatcggtcattagaaaaagtttcttgtcattttctaatgaccgatttgggataaaggaactgaagaatgatttctccattgatgattttgtcacacataacttctgggcaacagaggcatgcgggagtttcattgtaatggcatataactttatgtcgttgttcagacatgcgctgattaattccaacaagaagaaatttctgaagacaattcggtacgaattgctatcaacgccagcctacctggggagaacaaaagacaagcatatcctatatttggccagatcactaaaaacacgacaatcattcttgtccatatggaaaaaattaaaggatttctctttgccgtacgacacagagaaatcctaatgaccgatttgggtttaagaattcacatatccccatttcacaccttaaatgtcccgtttttaccttcccatctcacataaagtttttccctttttacccttatacttttttacctttgtatatattccttgagcgcctcaacgtattcttcaaaggctttaataccttcggcggtgagcttgcaggtggttcgggggcgctttccctgaaaacccttctccacttcgatgtaaccggcggtggaaagcttgtctatctgcacactcagattgcccgccgtggcgccggtctgttcacgaagatagacgaaatcggcctcgtctacgcccatcaacagcgacatcacggctaatcggagttcactatgaagcaatggattcaatggtttcaacataccgtcacacctccttctgcttgataatccaagctggcaagatcagtcccacggcactaacaccggccaataccagcatctccgtagggccaggcatcaccagtgctaacatacaccccaccataccggctataaaaccgcaataggtaataatcttactgtcgagtatcttgccactagtcatacccgcaatacccatcaacaaaataataatggctgtaataggaacataataggtatgaacttgcgatgcagcgtcgggcactaaaactggcacatgaatctggaagaaagctatcattcccaatacaaaacctaatgtacctgccatcacacccattgaaccccatacatatcctaaggtcttgctcacgaaagtttcggacagtttgggcttatttcggttagcccatcgctcaccaagactcaccaatcccagggctccccacagcccgttggcaccaggccccatagaggaatgcgcccaaaaatggccaaccaccagggcaatcaccatcacactgatgccccagagcatcatactcttccagctacctcgggtaattgtccggcgactttcctccaatgtacgactgataatctccagactgcgctcggcagtcaattcatttttctcgcttgcagcttccatattcacaattcattaaatggttttacaatacagtttacttgtgatcacaatgcaaatataaataagtttatattataaatcaaataagtttagaaaataaaccgatgttttaatattaattaacgtaagtttaacgaattgtaactgttcagcaatcatagacattgaatatcagcaacttgcagacttactattatagtagaatactcaaaaatgatactatttgccaaaattctcatgtatttattcttgtaactcgctgattctcaacattactcaataaatattgattgctgaatagttacaacgaatttagaataaagtgagctgtgtatcgaatgtcctttgtacattgatgcacggcttctttgggaataagcaatatgcagcaacagctcccaatatattgatgatgaaattgtcgaagcatctatgtctggtgtgttctacttgggcaatgttcttgagctcatcgttcaccgtttcaatgatagctctctttctgagaagaagtttgtcggaaacgctctcctttctcattgcaaatccgatgcggtttgaatccgaagaaccaacccattgagcactttcctctttgagctatgcctttgaataccttgtgaatgtgtattctctggtttctgcagacacgcagtggtgtgctgtcaacaaagctgattcccgtgcattttcctaacaagactttcttgataaacaaagcgagtggaatgacaacctccctttccaattctactatacggttgtatgagacaactttaggaaacaaatgacgcagatgcttgcacactttttcaagatagaaatgtttaaagcagcgataaccagagtcgtgaaaaagaatcattattagcatgacttttgcctttgacatcgtggcatctcgatgatactttctttttccagtaggctttagcgtatattttgccaccattgcatcaaaaaacttacaggaatcatctgccatacaaaatatttcagtaactttgtcctcggtgattatagcgttttttttgtttgtaattgtttgtaaaacaacaccttaaggttacaacaagtttcgctagtcatcaaatttatagacacttataattcgtcgaactcacgttaattagctgaaattccctacataatgcctaaataataagtatatggtagcaacgagatattattataaagacactatatctgactttattgcaaaggacgatatggaaatcgtaggcaagctaactattgcttacgtacatgacataaatgaagaaacaaaaaagtcgtgggtcagcgagattgacaccatgaaaactgtattgcgtccatatgctgaaagaggtagcgtatattttgagtacaatattccccgtatggggcgacgtgcagatgtcatagtcctgattgatggtatagtgttcgtattggaattcaaaacagcaaatcaagagttttctcaagaagcgatggtgcaagtttgggactatgcccttgatttgaagaactttcaggaaggtagtcttgaccgtgtgttattgcccatacaggttgtgccaaacgaaaaagaccgaaattgtaccatagaatcgaagcattttgaggacaatgtttatgaaccaatacaggtaaatacgcaaaagcttggtgaagcaattaagcattttctggcaaatgtaacacacgtaccttgctctcgtgaggacgatgacttatgggcaaagagcggttatgaaccgacaccgacaataatagaagctgctgtcgccttatttgaagagaatactgttgaagatatcaccaagcatgatggtgatatagatctgactgccaaatgtcttgaacagattatttgtgaatgtcgtgagaagaggcagaaagccatatgtttcataacaggtgtccctggcgcaggtaagacactaattggcttgcagaccgctatcagccaatttgaacaaggagaaaaagccgtatatctttctgggaactatccattggtagaagttctacaagaagcgttaactcgtgattatgtgcgtcgtagcaaagaaaactacaaatcgggcaagaccgatgagaagccttgtaccaaagcggaagcaaaaagtaaggtgaaggcttttatccaaatgattcaccattatcgagatttgtatcttgaaggtacagaagtgaaaggtaacaagatagtcccaatagaaagttatttcatatcgcatacagacaaggcatacattcctacagagcatgtcgctatatttgacgaggcacaacgtgcatggacaaaggctgaattgaagcgatttatgaaggagaaaaagggaattgaaaacttcccatacagtgaacctgaatatcttatgtcctgtatggatagacagactgattgggggcttgtcgtgtgtctgataggtggcggacaggaaatcaacaaaggggaggctggtatatcggaatggatagaatcactcaaccgtagttttccaagctggcatgtttacgtgagtaacaaactacaagaaaaagaatatgcagacggaaaggtcttgagttctatcaaatttgatgcttcgcaaatacatattgagccatcattgcatttgtccgtcagtacgcgctctttccgtgctgagaaagtaagcctttttgtacatcaacttcttgaattgaacaaggaggaagctaaagttacatttgcagaacttgacacttacccaatagtattgactcgatcgcttgacaatgcaaagaaatggctaaagaggcatgctcgtggaagtgagagatacggattacttgcaagtagcaaggcagaacggttaaaagcaatcagtatcaacgtacgctatcagccagactttgtacattggttcttggaagataacaaagacattcgctcatccaacgctcttgaagatacactcacagaatttaaggttcaaggtttggaaatagattgggcatgtgttgcatgggatgcagaccttcgcttaaacaaagatcataccaaatgggagcattatcagttacgcagtggaaccaaatggcaaaacatcaataagccagtcaatcaaatataccagataaatgcttacagagtgttgctaactcgtgctcgtcaaggtatggttatagtggttcctaatggagataatggagtgccacctgatgaaactcgaaatcctgagtggtatgatggcatttataactatctcaaagagattggtataccagaaatattatgaaatgatagaattggagtattacatagggaattagctgaaattccttatgtaatggtactgataacgtattgcgcagacaaacaattagttagaatcttactgaatatccgcacgagctttttctttctttaaaaaggtcgttagttgttcaacaatattactcttcaatacaagatctgtgggcatacatcacaattttagtatgcagggtttgcacacggaaaagacgggctgaaagcccaataagcgtatagctcagggcaacgccctgaggttgcggtgcattgaagtaactgcgtcctgtaaggacaaaagcaattggctgtcagtatattagatttgcttttgcccctgtagggcgtaaaccttctcacacgtttacccaaggcgttgccttgggctgtaggcttttggggctttgccccgccattgctcgtaaccgttgctgctgcataatgtcctgaactatcatcctgttgaagtttttccctgccattgcgcataaccgtggctgttgtataatatcttgaactatcatccagttgaagtttcgttccacaatgccagtaacatcgggtgctattctataccataggactatgcgcctatgtctcgtttgtaacatttgttgctcaacaattctattcttcccaaaaagagcatggcgatgcaaggacgaaatcgtttttgtcctaaaaaatgacaaaaaaatgggggttgaaaaagtgggaaatagagagaaaataagcatgccatgtgtaaaaagcggatgtttgatgctcttgaaagagtgaaaaaacggagtttttcagttaaaacattgaaataaggctgctgtgaacagtagtttgtacgactattcacatggagtaaggggactaaagcatgtagataagggcataaagttaatgctttagcgcttagaaagtttgactgatggatgttaatttgcgacacattgttgtaacaagctgtgagacaaatagatacaaaagtcgctcatttctcgcatatttgtgacgaaggtgcaacttggttgtaaatatgcgaattatgaggaggttgttgtaaagatatttcacatctttttgggagcgaatgtttggttttgttaagcgtttttccaatcgttggcttgtccaaaaaatgctgcatttccacagaaaaaacgacatattttgtggttgtaaacagcgtagaagaaatgaacaacgaaatcagcggaaaacacaaaaatatgcgtgcgatatcaagaaaccaaagaacgtagacgttctaacgaaaagcacgaaaagaaatgagcagcagcctctcttcaatctttcgtcaaatgtgaaagtctgcaacgatgttttttgtttttttagatagaacgtgacgttcttccgtgagttgtttgtcggcaacgtatttagtttcttatgcgtctttcgttgttaaacagcattgccataaagtgagattttgaggttgtaaacagcgttgaagaaatgaacaacgaaatcaacagaaaacacgaaaatatgggtgcgaaatcaagaagcaaaagaacgtagacgtgctgttgaaaagaaagtgtctttgcatggcttgaatgtaggctggttctataaattaccaccgtatattgtgagcaaattttatgatatacgttttattatcttttggcttattttcggttcaaaatgaaagttagctcagtcgtgtagctcgctacactccttcactcacttacattttgacctcaaaaataagtccaaaatctaacaaagctaatttatagaaccagcctataatgaacgctaacgttcaccgaacgaaactgatttggcaacgacacacagcgtgttgatgtcggcagagctgtttctttcgaagaacgttagcgttcattgattccaactgtcggattcgtattcgatgttcagttggttagggcattgcctgcaacttagttgagaattgtaaattctgcacaagtagcaaagtcctgcccatcgtgtgaatgaagtgcggtgaagcggagataacgtgctttgacgggtttgttaaacattactcgctgaagtgcttttgtttttgggaatgttccgtcactccctatttgcgtccacgtctttccgtcttggcttacttcgacacgatagtcctttacaagtccattccacgaatcatggcgaggcaggtaggtaaagccagtcattgtcttgacggctcctccatccaattcaaaccagtgcggatagtttgctacagtgacgctgtacatggtgtgccagtaggtatttggattaccatctatgagatgttctgcgtctccctcaccgctttctacgctggatgcaaacttcaatgtcacaggaacgtttttcattttctcaaacttctgtgtatatcgaagtgcagaaccgctttgccatgcagtgacttgtcctccttggggtagggcaaaggcgtttttatattttagggctttcccttttccgttgagttggtaatagatagtagtggggtgttgactattaatggttaccattcccgtattgttgcgcaccatggtcagtggcaattctgatgatgaacggatgagtcccatggcatttaagtgttccttgttcatatcttgaatgggacgtatcacgtaaccaaatgtgtgcgtaccagccttcactctgtctttctccaatggtccaccttgtccacagctatttcctcccagtcctgtgatagcgacatcgagatgtagatagataccgtcagaagtgggtagttcgtgtggatgatttgccattgccagttgttgagcagagtagggaagggcagagaagaccatgccttgctcgttggtacttgcaaagagtacaccttgtccgtcttcgttctgcagagcaacccagcgagtatctaagtggttcgccatatcctgtggtttcgggaagctaaccatttcgttgtttacatccggttgggtatatataccgatgtgctgtgaggtcttgcggtcgggataattgcccacaggtccgcgcccattgtacatcattttacggaaacttgaaggcagttttagcacatatcccaatcgtggaagtgtgagttgtgggcgattggaagagatgctgctttgactttcaatgcttccgtctggatagatggtatatatcacatcagtcgtaaatttgaaatcaggttgtttctccttttctacgagcttcttccagttcttgtcagcaccctccagttttgcacaatgtgcgccttggctctctatattgaaatagagggatatggtagcatctttatgttttaccatcttatagcttaacgccttgtgctgtaaatcgtggagaccattctcataccatgcctgataagcccagttgtcattgttcacccatgcacggaacgcatccaactgaggtccgttgtcctccttgataatgggcttgccttggtaggacaaacggcaaatggagcctttggctttgtcgaatgttacagagaagttcttgcctgtgacggtaatttggttagcttgttcgtttacttttggtgcttgttgaggcacaccaatggtagaagttaagagcggacgttgctgtgctttttgaacttctaactgttggtcggcttgaatatatccagccttagcccatggcatgtcttctttcaattgaaagcgcacgatgagttgataattcttgttggcgtccaacgactctcgaagtcctggaagctgtactaattgatggtgacgtggttgtaccttgcccaagttgatgacgccatgtttcacttctatgccgtcctcatatagcgtccatccaacattgtaggacgacaaatcatcggaataataattcttgttgaagatatccaacacgtcagtctgaccctctgcccatgtaattccaacgttttggtacacttttttgacctcaaaatattgtggcttaggtttcatatctccgaagatgataccattcatcacaaattgtccgtcgttgggcgtgtctccaaagtcgccaccataagccaaatagcgttgaccgtccttggtatagttgtacatactttggtcaatccagtcccagatagcgcctcccatgaagtaatttgacgattcgatagcgtcccaataatcttgcaaattgcccactgcattacccatggagtgtgcatattccgagatatggaaggggtatttgatgttcatctttcccttcacagctgttcgaacccagtcaatagaggggtattgattcgaccccatgtctacaatgtcattattgcgctcgtactgtacagggcgagtttggtcaacgctcttcagtgcttggtatgctgccacaaagtttttccctggtcctgcttcgttccctaaactccaaatagcaatgctgggttcgttgataaacgattgtaccatctccataactcttgccacatgcgccttgcgccattcctttggatgagaaagcgactcttttccataaaaatactcatggctttcgatgttcgcttcgctttcgagaacgataccatatttattgcatagataataaaaataagggtcgttgggatagtgcgatgttctcacgtggttgatgttggctcgcttcatcatcatgatttcctgaaacatctgttcgcgtggaatagcatgacccgttgtagggttggtgtcatggcgatttacccccttcaacttcagtggttggtcattgatataaaagtatcgcccagccatattaaattcgtcttcactggcgggtgtgtccttgatttctacggtgcggaagcctgtctgtacactcacaacctctgctaccttattttttttgtccttcagtactgccaccaaaacatagacattgggttcttcgggtgtccatggcttgatgttattgaactcaaaatcatcgttcaccgacatacaagtgccactctttaggttcattggctggctcgacaacatggtggaaaccaatttgttttcatcaccaaacaacttgttttcgtacaattgatacgaaatattgtagttcttggcagctttcttgttcaagttttctaccgttgttacaatgtttaatgctcccttgccatttttgaaagttggcttcaccaccaaattctggatatgaacttttggcgttgcatatacggcgacactgcggaatatgcccggtaagcgaaacatgtcttgagcttcaaggaacgatccatcactggagcgatatacttcaacggcaatatcgttctttccagcatgtacataaggagagatgtcaaagcgagctgcatcacgtgagttctttgagaaccccacatattgcccatttatccacagataaaagaagctgtctacaccgtcaaacgacacaaacacctcgcgcccatcccagtgagtgggaatggtaaacgtgcgcttatacgagcccacctcattgcgatatttgtacgtggtatagttcttgggcggctctcgcatcacgccaagacgccagtcgtcaacagcgatgttgtatttgaaaatcacccactggttcacataaatgggcacaccgtatttcaaacttccatctttttggagaccttgcatattccaagagcctggaactttgatattatcccagttttgtgtagaatgactcgttttataaaagtcgactgggcgttcgtctggatttttagaaaaatgaaatttccattctccatccaagctcattctataagaagaattttctggaagaaacttacgagcttcttctatggtggcgaaagaggcaaaattggcacgcggttgcaacttattatagctcaattgctctggcgattgccattccttccccgttggtgaagacgcatttccatattcaaagccttcaagcagctggttgtctgccatggaagaaagccccaaagatgcgaataaacacaaaatgatagttctcaatttcatcataaagtaggttttaattatcaacgtttggttattggaactacaatattacaaagaaaaattgagaaaaaggaagcataatgaaatattcaacaataaaatgtacacttttactcctatttcgtgaacaaggagagtcattaaggataatattcccgttttttagttctctttcacgtatatattgtaacttttacgtaattttgtgcgctgaaacgaacaaaaacacttcttaagtgacaactcaatgcagatgatgaaaagtatattccgtggtgtgggacaagtcatgtttcaaggcaatgcgctgtcgggcgcactgatgcttgcaggtattgcttgcaactccctccttatgtgcttgtttgctttggctggaagttccattggcacatgtacggctgtagcccttcgatatgatgcggggcgcattcgcgacggcttgtatggcttcaacgctgcgctggtgggtatcgccgtaccctgtttcatgcccattcatgcaggttcggttctgctcatggtggtggcatgtgtgctgtcaacgctggtgacgcgactgtttgagcggcaacggtttgtccctacgctcaccgcacccttcgtactcatcacctgggtaatgctgctgttgagtcacgtttttccccaattacaactgccagcaacgacagctgccgatactgcggaaagtttctcgctggttcgggctgcctcactgagctttggacaaatcatgcttcagggcaacaacctgctcacgggcttgttgtttcttcttgccatttgtgtcaattcgctcaagatgagcgtggagtcgcttgtcgcctgtgcgctgtgtctcgccgtggtgtgtgtgctgggtgtcagtaccacctcggtgaacaacggtatgtatggctacaatgccatacttgctgttttggcagttgccaatattcttggcattggctcatgtacttacgtcaaggcattgatagccctgctactctcgttgctgatgcagtatgcaggtttgcacatgggttttgtcacgctcaccgcacctttcgtgttgtcggtgtggttagtggttttgtatcagactttcatagttaaaaccaaacaagattaaaaaaatgaaaattaaaagatggttaagccccaccttatggggctttgtgcttaccacgacggtgagcattcccaccttgggcaagatagtaacagtggacaagtcgataaatattgcccgcaaatatgtcaatgtgagcctttcggaacgccatgctacgagggcttcgcatggtacgccaccttattatatttacaacgaccgccacggacgtggtttcgttgtggtggcaggcgatgatgacatgggacaagtgttgggctattcgcacacaggaacgctcgacacgttgcgtgcaagcggtgaacttaaattcctgctgagtgcttatcgtgacgcctttcatcaattgcaaaggcaacccagcacaagagctaccgttaccactacgccccctaaccgaaaggaggtggctccgttgctcacaacggcatggaatcaagacgacccttacagtcgtcttacggggtacaactacacgggatgcgtggctacggcggtggcgcaaatcatgtattatcaccgctggccaaagcggggagagggcagctactcgtatgtagagcgctctgacaaccgcacgatgagcgtggattttagtaagtcggtatacccatgggacaagatgttgcccaaatacaacacacgcatggcacttgccaatgcggaggcttgcgatgctgtggcgctgctcatgcgtgatgtgggtgtgtcggtgaacatgcagtacacctcttcatccagcggtgcacaaactttcatggctgccaaggcactgaaaacgtacttcaattattccacctccatgctcaacaagtctgatgagggcgcagctgctttcacccagatattgcgcaaggagatagaaaacggcttccctgtgtacatcagcggcagcgtgaagtcgggcggtagcggacacgcatgggtggtagacggtatagataaaaataatctctttcacatgaactttggttggggaggcggtggcgacggctacttctccgttacagcactgaatctttccactacaggacaggagtttggaggaaaacctctctcctttaacaagcaggtgcagatagttttggtgcatcccaacaaaccgggaagcgcacccattgatgccgaacttgccgatgatgcccccaacttgtgtttcaactcggagggcaatatgaccgtagttggcggcatgcccaccaacaaacagcaacccatgacggttagttatcaccactttaagaaccaagctgacggaacgtttgccggagatattggcttgggcgtgtacaacgaacagggcaagcaagttaaagtggtgccatcggcatggcacgacaaaggcggatacaccgcagagcgcggcaagtataacggtggcgtgctgcaatcgggacagctgattgacgatgcttgcacgtttacggtgaatcttgaagagcttgcagatggacgctactatttgcaggctgtatgcgccagtctcaaggataaggacacctacggggcatggtgcaagatgaaaacggcaccacgcatagcctttcaggtgcaaggcaacgacgtgtgcctatttgagaaacccgatgacaaggcacctttcgcattggcatcacatccgtatacgctcaaaccgtgtacagctggcaacaaagccacgctgtgcctaagcatacgcaaactcacgggtacgcctttcgatggcacggtgagggcgtcgctcgtggatgatgacaatcatgtggtggctactggacaaaccgcagaggcggtggattttgagatgtttgccgatacagaagtgagggtggacatgcacttgcccgaccatctgcagcccaaggaatacaaactgaagatagaggtacttaagcaatatgatgccgacaacattgctacggtgggtatggtgtacggcaacgaaccgtctacgttgcaagtggaggcagctaagccaagcgacaagcttttcgtaaaactccaaggaatggtgcaagacgacagtggatcatctatatctcccacggacgtaaaccttagtggcaatccacttaagataggagtggtgatgacgctcgcacctcaagccacctacaacggcaaattgacgctttgcctgattgatacgaaaacccagcgacgcatatctttgggcggtaatgctcaaaaacaatatgacttgtctggaggggatgttgaaatatttatttctggatggctgaagaacaaagataacttatgcgtcatcaacaaccgtacctacagattggcgttgatggggatgatagacggtgaggagtgcgatttgtggaacgagaactgcgctccctttgaagtgtcgttcgtgaacagtatttacaatgtttatccaggtgagaccacgcatatagacacaacacaaggctcgctacgcatgatgcgaagtggtaactggattgacgtgcagggcgaggacatggcacatgtgcaggtgttcgcactcgatggaaccctgattgccgccgctggtgctcacggtcaacatgcggtgaggttgcacgttcctaccacgcaagtggttgttgtgcgggtgaaaactctttatggcagcaccttgacgaagaagttaggataaaagcattgaaaataaaaaataggagataaaaattccatacattggatcttttatctcctattttattatgtgccaatttcttttatcatcgtatctacaatattacgaacggtgattgatgtttctctctctatgtggttatttgtgaaagcatgcaatagagtggggggggggatttgctttcttttgtgtcagcgtgttacgatttctttgcgcacgcgtccatcgccatatttcacgatattgattcctttttgcggcgcttgaatacgacggccatcgagtgtgtagcgtgctgtctctgtgttgttgccgtgttcttcagtcacggtagatatgcccgtcgtgcctgcatcggtgatggtgcatttggctgcattttctattctctttgtattatggttaatcagcaggacgcagattttcagttttgatttgtcttgcagcagacggttgtaggcgatgttaaacacatgttggaaactttgcgtttggtctacttctatcggagtctttacgaagtcttccagccctggcgtgtaaataccttgcacttcgccttctctcgccgggatgtaaaccccttccgctgcgattgccgtaaagttgttgagaattcctcttaccacagatggcgagttgacgaacttgtccatttcaggagacttgccgagaacgctgttgtcccccgaatagcgattgttttgtacccattcgggctttgtcattccgtcttctgtcagcacgtatgccacactgtatttcgtgtctttgggaacaacacgaaaggtaacgctcggtgttacggtgatgcgttctttcttttcatcccattgggcagagacgttcacatccatgtcagcgcccatggctctttcctcctcaaactctgtcgtagccgtaaaattggaaagcaggcgacttctgttcatgtcaagatgtggtgtgccttttgcttctaagctgttccaagcataatcaggacaggatagagggtcaggacggcgatgaatggcaatgccgatgaaatcatcgggatagttcttttccaagttctccatgacggcaatgccgcgtggacagtattggcaccacatgcctgtgtattcttccacgacgaccctgcggtgaggcacttgtgtgacagtggctctgataagaccggcataaggataagaggctctgttgggctcaccgttcactttcgttatctctacctgtaattctgtttccgagagctggtcatgaggtggcacgtcaatttccgcatgcgtgccccacatgtgtttcagcagttccttcaagacgtattttccctccaacagcacttttccttcaaaagtaaccttgtaatcaaaatctttcacctcatccctgccataattggtaatcagcagttgggctttcgcactcttggcatggataggtacatacacctttcgtccagtggagggagccagactgtagtcgcccgccctaagattgtttggataacaaaggatggcgatgagcgccaatagttgaatatggattctttttatcatcttgtaacgagtgttgttgtgggatgttcgttaggaaataatgtactttcgagtgaatataactccttgattgcttctgtacttaacgatatatgtgcctttaggaagtgttgaaagtgaggtgagctgtcgaaagagcaaaacgccacaggtgtcatagacatcgtagataccacctgctggtatcggtgaggatgcaatgccggcggtctcaggaatgaagttgatggtaagcttcggcccgttcttttctgtcatcttgccgtttccctcatcttccatgatgatgatttgcagaacaatcttgccacttccttttgtggcgaacgtatgtttaatggaaagctcctcccggccagcggctgccatatcctttgattctaattgataagtgccagtttcttcatgagaattgcaagattcaaatgcgcatacctccaacagtccttcttgcatttctatgttataagagagtttcactttctgtgttttgcttgagcggttggagatgaatagttccgtatgcatttgtttctgcccaggcgtaaaaatgtcgtcctccaccttatcaatagtaagcgtggcgtcaggtgcaatcgcttctcctttggcgttgacaaaaacaacgtcattcgaacttgtctgtgcttgcacgcctgcgaatgtgcatgcgagcatacctaaaaaaccaagtagtcgtaatttcatatttttatttttatttttatcatttgtttacgggttggaaatcttatgccgaacaacctgttgcacaccgttatcgttatagaagaaagccactatccatgctttatcagacaagatgccactgggaagcgtgtaggtggtttcctctttgtgcgaacgttcgggagagagtgttagttctgtaccccattctccgttgacggccgccctgaacacatggtggtgtatgtggttcttttctaacttgttgtttgggaagagctgtggcgcaataacatcgtcttccaccaaccatagctgcagctggcctttcaccgctgtcgtcaaggtactcaagtcggtttctatctccacatggcgagtgtcggcgtcatattgacatttaagttctatgtttacgttcgtagttttggtaaactcatcatagacttttcctgcccaagcgtcttttgacagtacgccgccccgacgattgatgatggctttgggtacgtttggaatcgcccaatgcttgtaatacgcatcccctgcatcggtgcgcaatcccacaatggtggatgttgttttgatggcgagctgtcctgcgtgtactgcgaccgcaatcagtttgtcagcgccataagtggcttgcagctttgcgatggtttctgcggcttcggggcagaagatgcaccgctgccctgtaaagtcttctatcagcacgttccgctgaatggtggcggcaggcacttcgacgagacgcttgtcagcgtcaatggggtcgcagctcgttaagagcgaaatgcccgtcaaaagaaggatgtataaagatttcatttttatcagaagttatagttgtaggaaagtgtcagacctttggtggcagggatgtaccggcatacccctcccgaacagttgaaacctgcacgggtgcgaccatagcccaattgtaacctgtgcgctccaccgctgtatgtcacaaagccttgatagtagtgcacgtgggtgttgccaaggttgtaaaggtcgctcaaggtaaacatccagtgtggtgccagtgacagttccgccagtgcgaatgcccagtctttgtcaccatctttcgagaagagatactgtccttcaccacgcagtgttgtttttcgtgccagtttttgcttcacgtctgccacgaatatatgcgagttcaccatacctccatgtccctcaatcactgtttggttgtaacgctgattcatgtacatcaagttgagctttgtgtctttgcggaggcgtttctccacctgcacgtcaatgtcttgataataggtggatgctccccaacgccaaaacgaacttccatagccatcggttcccctgccgccatcctcatttttggaaatggaatgaacgtgcgagaaattcattttcaccagcgttccatacttgccacccagcatagaacctttggggaaggtataggctcccgccgcctgatatgcccattctccgtcgggacgtgtggcgtagggatagagcgcgggcaacgtgtaggtgtgttctacggtgaaggcaggcaggtgattgatgaaagaagaggtgccttccatacccctgctgctgcgcagcgtcatgttcgtgctgcgcttggcttgcagaagcaggctcatgccacgtttggagtatgagcctgagagcattgccacgtaaccgttgcgatagatatagccattgtcattggaagggtcttgcgttttcatcgccatctctgccagcacattcaacgaacggtgttgcacgcgcatgcgaacgtcgaatgcgttgacgtagcggggaaggcgtagccgatgtgtagggtctgtcatgaccacattctctttctcgtatttgttgatgtaagaaaaaccaatcatcgcataggtctcgtgcctttgcagtactttgagccactcgtcgacattccactcgatgtcgcctcctgtcagccaactgtcgttgtgcttccaatacctgcgctggcgtcccgtgagtattttcactgccacaccgtcccaaggacgataagacaagcgcgcaccttgcagagagttgtctattccaagactgcgttcctcgtatgtacgaaagatgaagcccgacccaaactgctcataaaaactgcccaatgtcaattcggcattcttatagcgacctttcacatagaaatgaggcaatccccagcctttgatgtcgttttcaaatccgggaagaggatgtttcaaatattctactcttgccccagcctctatataacggcttgtggctttcaggtcaagataagtgtttgtcaggaaatggccgtcatcagcgctcgctcccgttgtcttgtctatctctggaaacagaatgtcactctgaagacttcccgacagacgtaacttgtccgactgctcttgtgcgcaaagccatgtgcttgccatgccgaagagccatccaaacatcatcatccgtttattcataagtctacttgcttgcaatttcctttatcttttcgtaaagctccagttctgcgccatcggtgtaaccgttgtgtcgataaacaatgtttccctgtccatcgagcaacaccgtgtagggaatcagttgaatgcccagcgcatggcgcaactcactgttggggtccagcaacacatcgtaacgccatccgttctggtcaactaaaggctttactttattgatgttctgtgcctgatccaccgatacagcaataagtcgcatgcctgtctcttgctgccattcatcgtagagttcggcaatggctttcagctcacggttgcaaggtttgcaccatgtcgcgaagaaagcgagcagcaagggcttgccgttgttggctatcgtgtctgtctgcacggttctgccttccatgtctttgagaaatgccttgggcagccgttcttgtgcgtggcttcccaaactcaccaataataaagcgagggataaaagcattttccttacaggtgctacccacaccgaagactttgctgcacaacagatgggaagcaacgatgttttaatgatataatgctggaacatatttctatttatacttccataaaatgaacttttatgttcatcgaaatggatacttaaataactagatgcaaatttactgattttttagataaaaaagctaattagctattctaaaataaaatgcggcttcattaccaacaaattaccaaccaaatctgcaaagtcaaccagcaagtgtaaaattaaaaacgtgcgtgaagaattcgtacttcggtgtaggacagtttaattttttctcgctctttgcttatctcctacttgtgtagtacgttcatgctaagcgcagaacaaaaaaaaagagcggcttaaagaccgctctcatatcaaacataactatcaataagttcatcaaaaatcattcaacggaaaaatcgaagccaaaaggagctgtcttaaaatactgattgttgagtccgttcttatagaagaaaacgtattctcctggttccaatggttgagggaaagacacttcaaaggttgtgttgttaattgtcttaatggtgaaatctaccattactctggaacttgcgttacttccctcaaagcccattactgtgtagctcatattatcagggaatatccttctgccacctttctttttggctttcaccgtcatctttacacattggaactcgttgggactcataatatcgttcattacaagctcataaaaattgccgccattctgcttaaaactatcatcagaattatgattaaaatagaatctaaatacaggttgtgtggatgtcgttgtcttggctttagtgccaggcaacatcaacttcttgatatccttagcagatgtcataagaatacttgtccctgcagctacagcagcagcctctcctccgcttggaatgtgtcctccaaaaaccgatccagcaacataggtgccaagtgctgcagcgcctatcgcaccaaaattaactcctttcgattctttttcaaaatttgtacgatagagtttttcgggcttgccattagtagcattccagagatacactccctcgtaccccatatctttcttggctatcttttgaagatatgtcgtcagagtagcatcagcacctgcagctttcagctggcgcataaaattgatatcgaaggtaatagtgcgagttgagctgttgtcaatagcaccgataatctcttcagaggaaaaaccttcttttaacaaatcaagtacggtctggttggtaacggtttcattctgtgcatgtagaccaatggacattagcatcagataagtaagaagtaatacttttttcattgttgactttgtttttttataattgtagaaatctttaataactcacattaaaatattcagttctagcatcaattaaaattatatgaaaatataaaacactgccagcaagtgaattgtttattcgtaatcaaggtgaatgtttttttcagccaaattaagctgcactttgggggttatagtttcataatgcgtatatttttttactacctcttccaattctctcttagtaacttttctgcgaactaaccattcactaaaagaatctttttctgctaaaataaactcccaaccttttagttccagataattaagaccatccatcatgttatcaaagatgatacttcttccgtcatcagttttcatgatagttggtttctgtttcttgccaagtcctggagattccaatataacaaaacatggatcaccattagctttattggctccacgcacctgtatccatgaatacatataataatcatgtgcatcattgactttcgtctgtgcgctgcctgttgttgccaaacacatcatgatggcaataataaataatttcagttgcttcattgtatttataaataaagtgatgagtacactggttaaagcgtactcactaaaataattttattaaaacaattttttgtggttatcgtgcgaccaccccatagcatccttatagttgttatttttctttcctctctttctgcccgtatcaccaccgactattgctttcaaacccactcccatgattagggctgaagctatcaaatctaacatagtacgttccctttctttttatttacgttttatttattgatttttatattttcatactgtcacattccactcattgattagagtttcatagtcagtaaaagatgtcacaaaccgcatctgtatacaccctgcattgaaatataccgaagtggcaattatgtcagtgattgtctttattcgcaacaaagatatgaagatattcccaaaacgcaaaacgaacaatcaataaaatactgtgtaaaacaacgtagcactgcatctcaaattttaacggactattgacttaaattcaggaattttatctaaatttgcattcattctctacacgtggcttatttccctcatgtttagaaaacttgatttgaaagcgaacaagaacatcaatcatgcaactcttgaaacagattagattagcgacatattttgcgatattcattttgataaccagttgttcctcaacacgttttgtaccacaaaatgaatatttgctggaagaggtgcaaatcaaatccgatcaaaagggatttgatgcagtttcgttggagccatatattcgccagaaagccaactccaagtggttctctcttttcaaaattccaatgggaacttatgcgctttcgggtcgagataccacgaaatgggtgaacaggacattacaaaagattggtgaaaaacctgttatttttgacaccttacaggcacgtctgtctcaaaaagatttgaagacggcactgcaaaatgcgggttatatgcatgcagaagtgtcttttgatgtgaaaaccaagggcaagtcgctaacggctatttacacgcttcatcctgggaaaccttattatatcaacagtgtaacctatgacattcaagaccaacaaattcagcgagttttggcattggacagacccgagaatgctgcgttgggtctaaaagctggttcgcgctttactgtcgatcgtttagacgaagaacgtgagcgaatcaccaaactgttattggatagtgggttctataaatttcataaagactttatcgtgtttgaggcagattccactcgtcagcgaacaggagtgaatctgatagtcaagctgttaaaatatcgtgccaatagtgatgcccctatcaccaatcatccacgctacaccattagaacgattcactatacctcgaaagacagcacaaaaatcaatctgcgcccttctgtcttaatgtataatacagccctcattgaaggagaaccgttctctgcgagcaagcttcagcaaacctatctaaacttcgcaaagcttcaagctatccaatataccaatataagatttcgggaattacccgatacaaccttgcttgactgtgacattcagttaagtcaacaaaagccaagaaccatctcttttcagcctgaaggtaccaacacggcaggtgatttgggagccgctgtgctgttcacttacgagaatagaaacctttttcgtgggagtgaggtgttgagtttacagttacgaggagcctttgaggccatcacgggcttagaaggttacaatgatcaagattatcaagaatataatgcagaggcaaaaattctgttcccacgatttttggcaccattcctttcccattcttttcgtcggcaacggagtgcttcttccgaaatttcgttgagttataacttgcagaatcgaccagagtttcatcggcgtgtcttttcttctgcctttaggtatcgttggagtgagcctcatcatcacttgtcctatcgtttagatttgatagatttgaactatgtccacatgccttggatttcggaaactttcaagcgagactatttggacagcgtgagcaatcgaaatgccattttgagatataattatgaaaatctgcttctcatgaagataggttttggggtcacctataatgatggtcagcatgctgtcattgccaatattgagacggtgggtaacatcttaggcggagtggcaaagcccttggggttcaaaaagaatgaggagggacaatacaagctgtttaataccgcctttgcgcaatttgtcaaaggcgacattgcttatactcgtttgatagcattcgaccccaacaattcgttagcattgcatgtaggtctcggcattgcttatccttatggcaattcaaaagtattgcctttcgagaagcgatatttttctggaggtgccaactcggtgagagggtggagtgttcgcgagcttggtcccggaagttttagaggaactgacggtcgaattgatttcattaaccagactggtgacatgaagttggatatgaatgcagagtttcgcaccaagctgttttggaaactgaatggcgctgcctttattgatgcaggcaacatttggactttgcgagcctatgaggagcagcctggggggcagttcaaattagatcaattttataaacagatagcagtggcttatggtttgggacttcgactgaatttcggttatttcatccttcgatttgacatgggcatgaaagccatcaatccagcttatacaaacaatgaggagcattatgctcttttgcaccctaatcttaaacgcgacttcgccttccactttgcggttggtttgccattctaatcatgttcttgtgtcttctcaagaggctatcatttaaactgctatttctacacaagaaacatccatatatccaagctgctaaaagctaaccgaaaaagtagtcatgagcgcaggaagtagaaaagactccaaccgcatcaattcttttatagctcaacctcgtcaatgtgtaaagtgatagtaccagctggcacacgtaccgttacctcatctccttgcttcttgtctaacaaagcttgggcaatgggagagtgaatagatatcttcccttctcgcatattggcttcgtgtgcgcttacaatgcgataggtcatcttggctttgtttcctaaatttgttatcgtcactttgcttagtaatcctactttatcggctgacaaacgagaggtgtcaatcacacgagcaaactccaagactttctgcttaaatctaattcggctcagcaaacgaccttgttcgcgtttggcagcatgatattcgaagttttcgctcaagtcgcctttgtctcgcgcctctgctatggcgtctctaactcgtggtagttctatcgtttcaagttgttttaattcagccactaacttgtcgtagccttcttgcgacatatattccatgatgtgctctcgttttaatttttcatctttatttaatagtaagacgcccctccatgaggttgcatataaaacgcaggaaagcgtcttttagtattattgctgtccgctaaaacttatctatagccttctttgtaagaaaagaagccttccatggactgtctacacagtataagtcagttaattactacctctttttggacagaatcaggtatgcggaagattttaacaatgagaggaagtctgcaagctgtttgtgacttttatataaatttatcggcaaaaaaattggcattgtttactaattcgttatctttgtgacaaataagatgagaaataatgctcaaacgagaatatatcaggcaaaacgaattatgaataaatattttaagaatcagcaggatttcctgcatgaatgaagaataaatgaaacaacttgagaatggacatgctgatgtgaaactttcacgttattccgcatcttcgctggtttaggcaaaacgagtttctttgtctattctttaatgaattggaagggcgagtaggatttcctttccctacttatatttgaaagtacggcactaattttattggcttaaataatatgactaacaactatacacctttacaggaagaagataattccagcttcgtttcagactctcaacataattggggcggtccttggacagaggagaaattggatgcctttgagaagtatgtcaatgcctatcttacgattatgaataaatatcgtgacaagttcaattggaaattactttattttgatggctttgccggtagcggaacaagaaataccaaccatgaatctgactctgaactgatgatggagttgtttaaggaacaagatatttctctcgaacaaatcaacgtctatcaaggtgcggcagagagagtggtgagcataaagcagcaaggattcgattattattattttgtagatttagacaagtcagcaaatgatgaactgaaagagaaactgcgaccatattcagaccagggaaagaaacttatcttcagaaatagagatgccaacagcattgttaaagaaatggggaaataccttgccgatcacaaaaacaagtttaaaggacttgttcttttggatcctttcggtatgaatttggattgggaagccatcgcatccttaaaagatgcctccatagacctttggatattggttccctctggagttatcattaatcgcctccttgaacgtgattgcacactaagacatattgaaaaacttaaacaatactttgggttaaccaaggcggaaattgaaaataggttctacacaatgagaaaagatcaaactcttttcggagagattgaaaagaaggaaaaggtaaaagaaccgataaagacaatcgcagagctttatgttgaaagactcaacacgctttttccttatgtgacgcccgatcctctcgttatgacaaacaggctgggtgtgcccatcttccattttgtatttgcctctcacaacaagacggcaatgaatattgcacaacaaatcatttcaaagaaatcaaaatgagaacaacaaagatagaatggaccgacaagacttggaatcctataacaggttgcaccaagaagtcggcaggctgcgcacactgttatgcggagaccatggcaaaccgaatcaggaacatggggcttgacaaatatagaaacggctttgaattgacattgcatgaaagtgcattggaggagccattgaattggaagaagggacataacattttcgtttgttccatgagtgacatctttcatgaagaggttccatttgagtttgtggacaagatgatggcaactatccgaaaaacccctcagcatagataccagattctcacaaagcgtgctgaaagaatgaaagaatatttttcctcacgagagatcctgcagaatgtatggcttggtgtaactgttgagtgcaaagctacaaagttcaggatggactttctcagagaccttcatgccagcgtcaaatttctgtcgtgtgaacccttgcttgaagatttgggagagatggatctgaaaggaattgattgggtgattgttggaggagaaagtggaccgaaagcacgcccgatgaaattggcatgggtaaccaacatcatgcgccaagtagaatcgcaagatggtgcattcttcttcaaacaatggggcacatggggaagcgatggtgtgaagagaaataagcataagaacggtaaattgattgatggcagagtgatacaggaaatgccattgacaaagacagtttagcttgtagaattccatctcaacaagtagaatttatgggaaatacgaaatagtgaaaaagcagaaagcctcgcaaggaatgatcgacaacgagaagggggggcttatagagttgcttcagtatcataaaaaatatagacttgtatgggagcgtaagttcgaaaccgtggagacagaactcgacttccccgaacaatataaataaggaggacgcactatggaatacagcaaggaagaaaaattggaatggacgatgattttcattcatgagtttggcaagcgctttggtctgacgatgaaacaggctttcggctatctgagccgtttcaagggtattgacttcatcgacaagcactacggttttgtacacacgcagtcgtttgaaagtatggtggacgacatcgctggattatgcaaaagaatgggaggacatttggaatgagactctatcatggcacaaatgtggattttgacaaaatcgacctgacgaaatcaagacctaacaaggactttgggcagggtttctacttgtcggataacagatggcaggcagaagaattggcagccgcacgggtggagctgacaggaggtgaagctatcattcttcaatatgactttgacgaagcgttgcttgatagtggtgcgctacgagtaaaacgctttgacaactaattgtagtttttgtcctattattttaccaaaaaacgaccatctaaaatcttcaaaatagaaaaaaaataataggcaaatgatggacaaaaatgcgctgatttgaacaaaatagacggctctcgaggctggaacattgagtttacggtcttggaaacatgtattagaggtgttattcacatgtttcaaccccgttaaagcatgcaaataggaggtttatctcaatgctttaaccgtcaaaaaacggtgaaaataggaaagaaaagtagcgataaaagcgtaacaccgtaaataccaactgattataaaccttgctcatttctcgcgtatttgcgaccaactttgctgttggtgatttacacgcgagttatcagaggaactttgtaaagaaaattcagcattgataagcctctcatatcgtgtgctacttattctaccaatgttgccttttgaatgtgattagtagtgcaaacacacagctcattcgtttgaggggaaaattgttgaacaacaaatcaaaccaataaaacaaataacctcagcaagaccatgaacgcaagcgttcttcgaatgacacaaatttgccaacaataatctgttgtgtgttttcactaaatttgtttcattgggtgaacgctggcgttcattgaatccaacaataggattcgttttattggttaaattcgttgttggtacaaaatatcatgattgtttttgacatcaaacgaccatgttaatgaaacacttgtggcgcaaacatctttctccaaaaaatgactcttgggcaatagcaggcagctgtgcaattgatagcgtgtagtgagggagagggatttgcggttgaagactaatattgccaacgcactcctatttgcaagttgaattgtagtggcttgtctttccagtacgtgttgagtggttgatgttgcggaatgtaatatttaagtcctggctccaagtaggctccaagatgaggcgtaacgttgtattgtatgccaagagctgcttgcgatgaccattgctgggcggttttctttatatcttgtgtcaccccctctttggtgttttgtgccttcacgttgaagtcaacctgtccaccagccatgacataagtgcgaagatgcttgttttgccaaaacgcataactgatattcacgggcacgcctacgtaatggagcgtctgttgcgtcgtgaagcaagttgtccccattgtctgaataaagtcagattgcagtttggtatataccactcctgtagagactgacaaacgagagtgcaacggaatgctgaatgaaagtcctaacgaaatgggttgatgatgtactacttcctcatgcgtttggttcagaatgggcgatacatcatccgcaaaaagcgtggtagcttttgacatgaaatagtcattgtacatcatcacgggttgggctgcatgaatgggattactggtagaatagctcatgagcgcattgctggcatacaaattcatggataaagtggagttgtgtcctgaagttgttgtatggtgatgcgttgcgtacgtgcgtgaacgctgtgctgcttgcttgtccgttgcttgggcagttggcgtggtggtggcactctgtgcctgcttatttggctgctgcgtggcaggttcagcggaggaaaatgtctcgatagagggttgggaggtgtccctattgtcagccgaggcaacatcttttgagacgttggcgagtaaggtttcctcgcattgtgcttgctgcttggcttgtgatgcagcaacagaagactggcttgtgcttgtgccggtcgttgctatcaatggcgttaaagcagttgtagattgctgttcttgtgccatagaagttgctttaggctccatgtaggtttgttgattggcacttgcggacggttgttgagatgtttgtaccgcaagtgaaggtgtggaggtttgctgatgaaacagcacataagcggctccacccaatagggcaatacagatgacagctgcggcagcatatcgacgccacaggctgatgtgggttgcgtgtttggtatatggcgggttggtgagctgtttttcgatgccagtccacaagtcggtctcaacaggttcttggtgttgagccatgcgcttttgtaagtcgtcaatccagttatcgtgtttcataagttactctttctcttgtaatcgttaatcatgcgagccaacatgttttttgctcgaaaaaactgtgaggctgacgaattttccttgatacccaaggtatgggctatttcttgatgacttttttgttcaaagacaaataaattgaataccgttcgatacccatcgggcaattgttgtatcatttttagcagcacatctatgggaagctgtcgtgtatctacctcatcttcgcgttcatcatcgggcacgtctatcaagtcgttggtaagctgtaaccgctggttctcacgcagataggtcagcgactggtttgccacaatgcgcatgagccacgctttgagagagccttcgccccgatacttaaaccgctggatggcagaaaaggctttgacaaaactgtcttgcagcacatcttgcaccgcatcacggtcggggatgtatcttagtgcaacggtcatggcatagccacaataatgctcgtacaactgtcgcatggcttgctggttgccgttgagaatggctgtcagaagttgtttttcagtttccacccgtggcacttttcttgagagtatgaaattgaacggcttgaggctttttgtagttgatgatggtactgttgtccactttgaccgcctctatgtaaaataccgatgagaaagtctcgttttgttcgttataggcactcgctgcattccctttttggatgatgatttgaatggagtggttcttgccattcgccgtgaaggaataagtgaaatcgctgggtaatgccaccatataaatggtggttgccgaataacctgtctcttgatagagtacatggtaggcgttagtgggtacgacttgaagcgtggtgagtcccaatttgcgcatgatagccactttggcatcaggcaaaagaggaatgtaatcgtagctttgttgtacacctaattctaattgggctgtgcctatttgcttcccttgataagtccaaatgccctgatatttcccgaaataggacggtatttgtctgttagagctatataaggattcgcttaacgcgtcgtcgttgtatgaggtacatgccgtcaacaatatccctatgaaaagatagaagagtggtctcatttgcaaaatcgttttatactctaataacgttaaaataaaaaaatcttgcatgcgaaatgcaagatttttactttttcttcattataaacacagtaaggcattcaaaataataaaaataaataccaaaaaagatgtttagatatttagtcacgatgttactactcatggggattcggttgggcgtacaagcgcaagaggcccctcaaaaagggtatccctacgagcgtactgagctttcagtgggcatcgctttgcacaatagttatggaaatgactatgatagtaattatccctcacctttattaaatcgagaaaccccaatggacgattatcatgcaggaaaattttatatcgatgaaatgaaatcgagtccaacggtttgggtaaacatttttcatcatatcagcaaacattgggctgttggtctacagggttgttacggatatagtatgtgtcaacgatatcgatcgctgacagcgcaaaaagacggaaagttagatttgcatgacttcattgcattgtggagtttgcgctactattattgcatacaccaaaaatatagcttttatagcggcatatcgttaggcttcaacaaacagttgtataagcattatgatgcttccgagtacaccgcaaaaacatatatgatagaagatgccaccatttttggtttcttggtaggtacaaaattttatggattcagtgaaataacaacgaatgtccgtggattagtaagggcaggtgttggatatcgctggtaataagataaacgaaaacagtacatccttgggaaaaaacaagaggcacttcatggttaggaaaatgtaatacaaccacatacaaaataaacaatacacagatgaagacaaaactatttataagcatacttatggtaatggcaactatcttggcaggatgccaaagggaggaagaagactatgaccaatggcataagacgaaggcaggtagaactgcttatctatatatggaaacaaatatgaaaagtttgacgaatattattgcctatacacaaatgttcaggcaatatataaggcaaaccactgttgagggtcgagactctgtcaatgcgctttactttagaaatattaaaatattaagggaacgtgacctaccgcacaatcagtttttttataatatgttggtaaaaaatgaatatggacagaatctctatatcatctcttttttcaacacctcttcgactgattggaaaattgatgctgctgtttcaagtggtgatggcaaactgtattatcatttacaagtaaaggatgttgattctaatcagtggacgattgaaaagagttggagtgatgcaaaggagtcaacagtagtaaaaagtgatagtacagacgcaaccaatgtttgtaatcgcctttctcgtaaggctttcttcatgaaaaataaaccgttgacagtaacatggagtagttactcggattatccacactttgcattaaaaggagagggagagttggagagttgcgcaactcctcaactaaaattgctgtattctatcactcagccattcgaagttctcaccttgcccaagtaccttgatgcaaagaatttaaggagcagagatgcaagtcagacctatgtatcgagttatgaaggtgatttgaggcttattgccatagacgcaattgaccgaacgacagacacctatgatattacgttgacgtatgatggcatttatatcaagatgaatgatataaaagagagttggcaacggtaaagagagataaggtgttttttcagcctttcaacagtgtttggtgatccttttcgaacactttgggatacttagcttgcaggcataagttgaccaagctatttgctaccagttcaatatcactgagatcaaccccacgttcacgagacacgtcttttcctaaacatacttcccaagtggcattgaaacaagtatcttcggctccaacgtacgagtgattggcagtgtcgcctggtaatatcttgtaacgaatggcttttttcgatgctactggctgcatagatagtagcaaatcgtaggcgtgcttgagttcgggacgaaacttactggtgccaggaaacatgtcattgataacgggcatgagttcgtcaaaatcgtaagcttgaagcaattggtatagtttcatgatagggtagggttggtaagaggttgtttgtgggtggattgataagcccatgaacacaatcatggtatgggcttatcaaacataatttgtgcgttaaaacttcgccatcttgatagctactaccgcacactcgtcgcctttgtttcctaattttccgccacttctatctttggcttgttgcaaatcgttagtggtgagcagaccaaagataataggaatctcgcttttactatttaaggtagctatcccattggtgactccttggcagatataatcgaagtggggcgtttcgcctcgaatgacgcatcctaagataatcacggcatcgtagccgccattgagtaccatttggtgtgcgccatacaccaactcgtaactgcccggtaccgtcttcacatggatgttctcgggcaacgttccatgcttttcaagcgtggaaaccgctccatcaagtaatgctcctgtgatttcgggattccactcggataccacgatgccaatacacatgttactggcatcgggtactttgctggcgtcatagtcggataaatgatgtaatgtagtcgacataagcttatctggacgcacgttcaatgtacttatctatctcggaactttgtacgactgccgagttgatatactttttcttgatgtcttgataaatcttgagtgcctcttctttcttgttttgactttctaaaatctctgctgcttgcatcataaaggttggtgaaagactgtaatttacctttccttcagctttgctgtcggctttttctgcagctttcttgagggtgctaacggctttgtctaattggttgacgtgtgcataggcattgcctaatgcagctaacgcagcaggactaatcatggcatcgtcttttccattgaacttgtcaagatactgtactgcttcgttccatttgtccatattggcataacacaagccagcatagaggttggctaagtttcctgcatcggtgctactgtaatcgcttgcgattttaacaaagccagtataattaactttatcaccattcaatgctttttcaaaatcgcctgcattgaagtattgttgacctttccccaattcggtacttgctttttcagcacgtggtttctgtacataagcactgtacaagaaaataccaacaataataactacaattgctgcagcagaaatgataatagcttttttgttcttaacgaagaaagcttgtgatttggtgagagcttcattcgtttcttctactcccttcacttgtttgtttgccattttatgataatatttatatttattttttcggttttcattctttggcatgaaacgtgctaagatgacatcccaagccatgatgcgttgcaaaattaaagtatttatccgatatattgaaatttattacttacttttttcgtttttgactatcaaataaggtaactttgcaaaacttatcgattcatcagcttttcgatttataaatgcttgttcatgcttttaaagaagatttcaatccttaattacaaaaatatagaagtggcagatttggagttctcctccaagttgaattgtctcataggacataatggagaaggaaagactaacttattagatgctatctattatttatcgttttgtcggagtgcttttaatcccattgattcgcaattaattcttcatgggcgagatttcttttctttgcagggaacttatctgcgagacgacggggacgaggaactgattcattgtggattgaagcgtggaacaaggaagcgatttaagcgcaatgacaaggattataagcgactttcggagcatattggattgataccgctgatttttgtgtcgccttcggacacgatattgatagagggtgggagcgaagagcgcagacgctttttggatatggtcatctcgcaattaaatcgaacgtatatagaacatttgagcagatataataaagctttagctcaacgtaatgcgcttttgaagaaagaggatgctcccgatttgtctctcttggaaattcttgagcaagaaatggctgttcaaggcgaggcaatctttgcaataaggcaatcgtttatcaaagagtttattcctgtttttcaatctatctatgacagcatctctggacattatgaagaggtgtcattgcagtatatatcgcacgcacaaaggggaccgctattggatgttattcagcgtgaccgtatgaaggacagagcggtgggttattcgctgcatggtgttcatcgtgatgaccttcaaatgatgataggggattatcagatgaagcgtgaagggagtcagggacaaaacaaaacttatgtcttagcgctgaagcttgcccagtttgatttcttgcagcgtacgtcttctgccacccaaccattattgttgttagatgatatctttgataagttggatgcagagagggtagagcgtattgtggatttagtgaccagtacgacttacggacaaattttcatgaccgataccaatcgggctcatttagatagtatattaagcagtcattcgtttgattataaattgtttgtggtgaataatggggatattgtcgaaaataggggaagtaaatagtgttcagaaatagatttcaaggaatagctcgcagtgattatttattttcctccatatactcaagcacaaacttgtgatggtttgatgaagaaacttcactttttaagtaaaatatgtttaagcgtcaggtacaaactttagatgaaatattgcaaaaggcattgcgtgagggtggacttgaaaccccacttcgccaacgacgactcattgatgcgtggtcagaagttgttggacagaatgtcaatgcttatactggcgagaaatttattcgtaaccagacgttgtttgtaaaaataaaaaatcctgcactaaggcaggatctttctatgatgcgctcgcagctggtgaagagactcaatgctgctgtaggagcttttgtcatcagcgatgtaaaggtgtactgaggttagttgacgagttcacgagtttacaaggtgacgagtttgtaagttcttgagtctttgagtttttaagtttttgagttgacaagttcatcagttgacgagttgacaagttcaccagttttcgagtctttaagttctcaagttgacattatcagaatgttacgcaacctaagtttctgtctaccaacatgccatcgatggcttttagattgaacgtaccagccctctttgctttcaacttgatgacaaacaattctacatcgccttcgtccaataagaagttgttgccacgattgacgaatgttggcgttagttctttttgtccattggtgtgcaaacggtcgtaggtaaggttcaccatatctttcatgttcagtaattgtgtacctacgtattcgtattcattggtgttgtagggtagggcaaagctcaatgcgttgacgtaatgtaagcctttgcctacgactttaacttcaatgatatcaccagcttggaatcttttcttgttgggaactaacatcaattttccgtttaccttgtcgttagagttgcgcactcctccgtccagttccgtagctacgcacgaaatgtcgtaagcgtcaatgagtccgttgccgttgatgtcgccaatcttgatgtagtcaaaatcgctatcacccttgcgtagtcccgtgtagttcatgtacgacgtgaggtcgttttcatcaatgaacttgtcgcgattgatgtcgccttgcaatgtactttctgtgccaggtaccttaaacacgtacatttcttttcctgaagcgaagttgccaacagctttagtgaggtgtagtttaagatatcgagcctgcggtgtttctttgaatgtgaatgttttacattctccgtcttgtttccattcaaaggctgtgggattgctccagctctgtcggttggtggcgtaagcgatagtgccttgtaacaacgttccattacctgcatcctcgcgtggcaggtattctaatttgtcaagggtgttcacagactttaagtcgatgataagatcggcaggtatggcttcgccctttccccacttggagtgccatgtggttttctcatcaaagtcaaacagtttatccgttccttgtcctggttgattggcgcaggttgcttgtgccttgatgcccttgatggcaaattgcagcggatcggcttttgttttccctatgaagtcctgccattcagattgattgtccttgttgatagctctaattttgaacgagtaggtttgttcgggttgcaatccgttgaaagtaaactggttttgacgaatcgttgagtaagtcattccattgaacagaatctcgtaatagtctgcattggctgtcttttcccatgttggtgtaagtgagaaggcaccaattgatttttgtgctatttgtgggagaggagcctttagggaaccagtgtgttgagccagtgcgggtaaggtgatgttaaaatcaaatcctttaactttcaccaccatcttattttggcttacattagtcttggcaatctttaccaatagttgtggattctttgtcatttgcacgtgttgcatttgactacctgctgtggagaactggttcagattgggttcttttaggtagagacaagcattgtcgctggtatcgaattcttgaagattatttacccatttcagctttatttttctgttattcacctttgctgataccttctttggttgctggctcacattgatacgcaacagtgtttgtttattgggttcgtatcctttgaatgcgcccttgctgggttccatggtgatggtaaggttttgtttgccgtcagtctctgcatgaatgtcagtggtgacatattcaccgcatttgtatgcctgtgtattgccatcatcatcgtactcttcaaagtggctttcgttgttgggcgttgcatatatttcataaatgcgcaagtccttctttatttgagttgggttgttgttggcattggtcatgggaatgatagcgttggcttttacaaatactggcagcttccaaatgggtgactcaaagttattgataatgcaccctccttggtaagtgtggcctgtaaagtagtctacccattttccttcaggcaaataaattcggttacgaatgtcatttccctccttgtccatttgcgtatctttataaataggtgcaacgagcaatgaaggaccatacataaattgatactctgtgctggtgccgagcgtgtaagggttcgggtcatccaagaacatagcacgtatcattggcttaccatcaatggcttgatgagctatggaataggtgtagggcatgagttggcttttccatttcaggtaatgtctgttgatacttgtcgctggttcaccaagtgcatcaggatatttaggattgctaccccaaccgtccatattgagtcccataggattgaacgtcttccattgaaattcgcggatgttcacaatagggttctttcctccgaagataccgtcgagatcggaggtaatattgggctgtcctgacaatccagagccaatgaaagtaggaatgtgaaaacgaatgtactcccaatcacctcctgtttggtcaccgctccatatcgtagcgtaacgctgtgttccagcccaaccatcgagtgaaatgatgaaagggcgtgcattatttccgtagtaaggcatgatgtgagcgacatcagccacaccattgagaccaaatgagtagccgttgcccacccatgctacatcagtcttgagtacacgtaccccagcatttcgcacttcttttacgatgtcacgttgcaacaaaggctcaatgccaggttttggatgcaagtcgctttgtgtccatagtcctatctgtacgccatttgcttttgcatagtcgccaaattttcgcaagttctcaatatttccatcaagcgtattggtttgtccgtagcctgctccgtatccatcgttgggtaagaaccaacctaagggcatatcattcttcacatatctatctatggcagcgcgtgccgagaattggtagtttcctttctcaccgttgaggctttccttgatgcctccgttgtctttttggctttctttgtatgttttgccatcgggcataaggatgtttcccttggggtcttctttccaatagtcgcggttgtatgcgttgagatgtccctcgtaaaatccaaacttaggcattagtactgggtgtcctgttagttgatagaagtcattgagcagtgccacaggtgtttcgtctaccatcacaaacatgtcgaggtaggcttcttgatgatgtagtttcacttgttgtggttgttctgcagcaaaatcgtatcgcccgggtttgaaggtatgccatagtacgccataacctttgttactccaatagaaaggtgtcggcgatgctactcctccgtcaacccaattgttggtgttttctatggcgatacttcgacctctgtgtgagaagcgtccattttgaacacctccgccaaagaagtattcatctgtatgcgccttcatcgtaacagtggtaccttgtgcgttgatatctgccaccatgaggtcttcgagtgcattctttccgttgaggttgttggtaacgttcatcctaccatcttttttgtcaatgctaagtgtgacgttacgtgtagagatgatgatgctgttttccttgtcttttaaggtaaaatcggtaaggggaagacgcggattgttcaccaatatatccgcaggtggtgtagcttgtgggttacgaacaacggggttcgtgtcgtctctaaaaagacgaaagatgttgttagcgtaaaaatcaatggtgatgtgcttaccgtttgtatcatagacttctaccgtcgttggatttatctgtacggctcgagaaataattgcatttttgttggtagacacatttgtttgcgcttgcggtgctgttagtggtttgtttcctgcgcaaatggtattgtctttacttccagtgatgagcaacgctattgctaaggagtatcctaataagtgctttttgttctttagaatattcatattttatttttaataagtcctgttttggaggttagatattatttgtagatacaacgacttcgtccatgcggatgtcattttcgtcagcgggaacctcggttacctgttgaaatggaaagcatacacctattttatataggtggggcacggtactcaaaaaacgatcgtagtagccttttccacgtcccaatcgatttccttgcttgtcgaatgccatgccaggaatgagtgccacatcaatttcatcaaatgctgtaaaggcatctgcctgcggttccatgatgccaaacggtccttgagcaacttgagaagatggtttgtaagggcatattttcaagtcatgatcaccaaccacaacaggcagcagaatgtttttcccctgtgccagtagctgttccatcaggcaatgggtgtcaacttcgtctggcaatgatgcatatagcaaaatggtgttggctgcttttatgcgaggatgttcgagcaaagttgctgtaatgggtgtcgacatttcgcacaattgttcgggtgtgaatgtgcgtttcaattgccgtatttgttttcttagcgtttgtttatccataaccatcatgattttttagccagttttacatacaggaagactttgtgtcatctgttatgcttgatatatttgtggcagttgtcttatctcaggctggcgttgcagcattgttgctttggctactcgttttgctggagcctttgggaaggctgcattgtttctgaaagtctttagtgcctcacgtatggttgcgtcatcttcattgacatactccagccaagcttgttcgtcaagcatgttatagatgatgcgactattgataaatctgtcgagcaaataatgagatttgcgtatcatgaggttgcgccgtttcaatccattgtcgtttgcataggtggcaaacttgtcaacaagattttgttttttaagatagtctgccaattccatcatctccttgaagttgttcagttttggacgattatcatcagtgtaggtaaatgcgaattgtaagatgagaccactcatcgtggcttgtttataatacgaagtaaagcctgtggtgtcttctggaacgaagatgtctggcgtaatacctcctccgccataaactacacgtccgttactggtatgatatttgggacccgtgtgcttgatagagtcttgtgagaagaactctccgtgctcgtatcggctcatcaaatcttgtgcataatcatctgtttcaccatgtacatagggcttttggatacatcttcctgaaggagtataatagcgtgcaatcgtgagtcgaaccatactaccatccgaaaactctatttgtttttgaactaatcctttaccaaacgagcgacgtccaatgactgtagctcggtcgttgtcctgcattgcacctgcaaatatttcacttgctgaggctgaaccttcattaatcagtactaccaatggcgtttgtttgtaactgccacgaccatccgaacgaaaatcttgtcgaggagatttgcgtccttcggtgtacacaatcagtttgtttttaggtaaaaactcattcgccatttgtactgccgattgtaaatagccgccagtgttatcacgcaagtcgatgattaagttctgaaagcctgactctccaagctttgctaatgccaccaacagctctgcgtaggttgtttctccaaagctttttatacggatatagcccgttttgtcgtcaatcatataagtggcagatacgctcttaatagggatgtcaccacgcgttacgacaaacgattgcggcttgctgtgcccatatcgcagcactccaatctttacttttgtgttctttggtcccttgagtcgcctcattgcttcttggttggtaaccgcttttccaacaaaagtatggtcgtctaccattacaatcttgtcgccagccaaaataccagcacgttcagcaggtccgttctgaatgacattttgtacatgaatagtatcttgtcgtatcacaaactgaatgccaacgccagagaaagaaccttgcaagtcttgattggctgcttctacatctttcgcactgatgtacacactatgcgggtcgagttcggttaatatctttggcattgcgtcctctaccaaggaatccagattaaccttatctacatactgatcgtcgatgatgtgcagtaagttgttgatacggttggttcccgtattgatgatgctcaatcgattgccagaaaaatggttggagtagaatgagccaacgataattccaatgaccacacagagtgccatcatgagcggcataaaacgatttgacttcttattattcattggtgagttgatgagttattaagttattgagttaatgagttgacttcttgagttcttgagttgagttgatgagttaatgagttgttgagttttttagttattaagttattattccaaatactcaactttaatattggctttcttcagtaagttaagaccatcatctaaacggtatttctctccgtagacaactcgtttgatgcctgcttggataatgagctttgcacactcaatgcagggagaggcagtgacataaagagttgctccgtcactgttgttcgaactgcgcgccaacttggtaatggcgttggcttcagcgtgtagcacataaggatgggtaacgccttgtttgtcttcacattgattttcaaaaccactgggggtgccgttatatccgtcgctgataatgcgttggtcctttactaccaatgcacccacttgtcgtctctgacagtaagagttctctgcccaaatacgtgccatgcgtaaatagcgttgatctaattggtgttgcttgtcttttgtgatcatcagattttatatcgcctgtcgcaagagtcgcatctctatcacgattcttgcaaagattgttttgttgttctgtttatttcttgataccgttgcgctctaagagtgcatcaatggtcggctcttgtcctctaaatcgcttgtaaagtgtcatcggatgttccgtgcctccttttgaaaggatgttttgacggaaactttctgccgtcttgtggtcaaagatgccgtttttcttgaacacgctgaaagcgtcagcatccagcacttctgcccatttataactgtaatatccagccgcataaccgcctgccatgatatgtgagaattgggttgtcatgcaggtgtttggtaactgcttgccaagtatcgccttcttccaagcttccttttcaaaggggatgatatcctcgtggaagtctttacgctgcgtgtaataagccatatccaacagcccaaagctcacttgccgcaagcatgccatgcctaccatgaagttgcgactctttcgtattcgttcaatgagctcgtgaggtatcacttcgcctgtctcgtaatggaaagcaaaggtctgtaaaaactcgggttctaccgcataattttccatgaattgcgagggaagttctacgaagtcccaccacacattggtgccagacaaactttcaaagcgtgtgttggcaaacatgccatgcagtgcatgaccgaactcgtgcaagaatgtctctacttcacccaaggtgagtagggcaggtttcgtagcggtaggcttggtaaggttcatgacaatcgaagcatgtggccgcacgttcttccctttgcggtcaatccactgaccctgaaactccgtcatccatgcaccgctctgtttgcctttccgtggaaagaaatccgcataaagcactgctaagtacgaaccgtcacgatcgaatacttcgaaagcttttacatcaggatgatataccttgatgtctttgttctccttgaacgtgatgccatagagtcgggtcgccaatccaaatacacccttaatcacgttctctaattgaaagtaagggcgcagcatctctgcatctaagttgtatcgctccatttgcaatttgtgcgaatagtatgcggtgtcccacggctgcatctcaaattcgcttccttctaatcgtcttgccaactcttctaaagacttcttttcttgcatcgccgtaggcttataggcatctatcaagtcgttaagaagttggtacacacggtcagtatcagacgccattctgtgcttcaagatatagtcggcataggtgtcgtagcccaagagctgcgcaatctctcgtctcaagtttaccagttgctggcaaatctttagattgttctccgggttatcgtgcgtacctaccgtgttgcgtgccatgtacatttggtgtcgcaaatcacgctgagtagagtaggtcatgaaaggcgaataactgggcgcatccaacgtaaacacccaaccttgcaagttgcgctctttggcggtgtgggcagcggcgtcacgtgccgtgtcgggtaagccgtccaactgtctttcgtcggtgatatgcagtgtataggacttgttttccttgagtaagttttgcgagaattgcagtgttagcatgctcgcttcctccgttagcttccttagttgtgctttctcttcatcgttgaggagtgcaccgctgcgtacaaagctgtcgtatgtcttctcgagcagcatttgttcttcgggcgtcaattcacgatgatgatgatacacctgttggacacgttcaaacaagcgtttgtttagctgtacatcgttggcgtgctttgtcagtataggactgagcttctgtgccagttggtccaattggtcgttggtctcagcggagagcatacacgaaaaaaccgttgaaactttgtctattaagtcataatattcctcgccctttgatacgtctacacgtgcgatagtgttttcaaaggtaggttcttcggggtcgttaatcgtcttttctatgatttcattgtcccgtcgtattccctccatgaaagcttcttcgtaatcctcaaaacgtagcttgtcaaaaggaaaggtatggtgtaatgtgtgataagtttcaaaaaaaatattctgtcgtttcgctttctccgtcatgctttctttcataaacatacaatcttctaataattattgcaaaagtacgaaaaatatcacaacacctaattataaaaataacatttaacaatcgttatcacacccactgtttcgttggggaataatctttctacttttgtacacaacgcagatgaaatcaacagcgaaatcaagaggaaagacggaaatgggcgtgtgatataaagaaaacaacgaatgggatgttcatgcttgatatatcttttgcagcaacgtatttttgtttcttttgtgtttttcgttgttaaaaaatgggctgtcatgctgtttctatgttgatacagaagaagctcaataggatgatagttcaaggaattgtgcagtagttgcagtaatgagcaaagacggggcgaagccccaacaggaatatagcccagggcaagcgccctgggtaaccgttcgttgtctcgttggcgcgctgtaagcgcaataggagtcagtgaagtttccttttcttcttcttccttttgcgcttacagcgcgccagtttcttggtatatttttacccagggcgattgccctgggctgtattcttcttgggctttcagcccgtctttgctacgtgcaaccccttcatacaaaaaatgtgatgattgatacatctttgtgttgttgcggctctttctctaagaataatgtttctattttttctatacaacgcagaagaaattaacagcgaaatcaacaaagttgtgtttgtttttttataaaggtactaaaaagaataattttctcgccaaaaaagacagttttttaagaaaaacaattacctttgcatgctgaaaataaaaagttattcttttcataaaaattaagcgtgcctaagcgcatgcaaattggataataaatatttaacaacatgatgcctaattttcccatatacggacacggtctctatgctcaagacaattgcatcttttgtattgagtaccgattgccggcttgcatgaacaggttgttaagttatattacccccccccatatttaacatctttttacaaattagaaattattactctcctctttccttactttttcgtaaggaaggcaagggattctattgacatgtctttatgtagtctattctcctttctgtggagggggaataggaaatgtcggagcgttgtacgtctgtctaaaagaagtaacgtgccgaggtcgtgttccttcacctacttactcaaggaggaaacaaaggcagttgtttgattcatggtataaacattataaaataaagaacgatatgaaagagataacaaaacggaaatacatccgtcccgaggtgacggtaataggtttgtcagacgagtgtccgttgcttgcaggttcggatccaagtactattgtaccacccaagaaacaagaacatgtaacttgcaatatagatgattacggggacgactggccgaagatatgtgaatgtgatggggatgaatgctggtataaaaaaggacaagagccttaagcttttgcggtacttgtactgaagactaattgttgtagtaacaaattaaagcgaatggagtcattgatacgactgacttcattcgctggttttattgttgggacaaaagaaaacggtggttcactaactgcaaacaacctttcttcgatgatggcgtcgtaacataagagcacgtctttttaggtaaaatgacagtttgttttcaaagacaatcatgttcttttgtttcaacaacgaattaaagcgctaatgaagtataatcctttattgtaaccaatgagtgccagcgttcaccaaatgtaacaaatttggcaagactatatttttttaagaaagattttttttgagagttttcacgacacttccgtgtcgttccgtgtccttccattgctatgatgaaaaatgttatttctcctctctcttcttccttttgcgctttcagcgcgcctgtttgttggcatatctttacccagggcgattgccctgggctgtattcttcttgggctttcagcccgtctttgctacgtgcaacgccttgatacaaaagatgtgatgattgatacatctttgtgttgctgcggttctttctttaagaataatctttctatttttctaaacagcacagaagaaatcaagagcgaaattaatgggaaagacggaaatgggggtgtgatataaagaaaacaacgaatgggaaggtcttgtgtgaaatatcttttgcagcaacgtatttttgtttcttttgcgtttttcgttgttaaaaaatgggctgtgatgatgtttttatattgatacacaaaaagctcaataggatgactgttcaaggaattgtgcggcagttgcagtaatgagcaaagacggggcgaagccccaataggaatacagcccagggcaagcgccctgggtaaccgttcgttagctcactggcgcgctgtaagcgcaacaggaggcagtggagtttcctttccctcttcttccttttgcgcttacagcgcgccagtttcttggtatatctttacccagggcgattgccctgggctgtattcttcttgggctttcagcccgtctttgctacgtgcaaccccttcatacaaaaattatgaggattgatacatctttgagttgctgcggttctttctttaagaatagtgtttccatttttctaaacagcgcagaagaaattaacagcgaaatcaaaaggaaagggggaaatgtgtgtgcgatataaggaaaacaaagagtgggacgttcttccgtgaaatatcttttgtggcatcgtattttcggttcttttgcgtttttcgttgttaaaaaatgggctgtcatgatggtgttcgatgcaggtcacaatgcgtgttttgtccgaaaaaatgacaaaaaaagagctgtttgaaaaagatgaaatagagaaaaaagataggtagatgatcaactttttatgaaaattttgtctcgtttatcgtcgttttttgacaaaagcaatgggtttagactgctgaaaacatgactttgaggtgttatgaacatgtagtaaggggattggagcatgtatctaacagtcttagagtaatgctttagcacagaaaaaaggcgtttttcggtcttgaaatatcgtgcagttttcgtagtgtgttgattgatagcaagatacaaaactttcgcaaaactctcgtatttgcgagccaaagtaaggttgtttgaaaatatgcgagttatgagacccctgttgtaaagaaaattcagaaatatgaatggttttttatcttggtgttcgtcatgagaagtcgaacagaattttcgtttatagggtcacttgttgccaacagcaattatgttcttttgttttaacaacaaattgaacaaaaataacaaatccgattgctggaatcaatgaacgctggcgttcaccgaattaaacgaatttggcaaagacgcacaacatgttgatgtcgacaaatttgtttcatttgcagaacgcttgcgttcattgtcttgcttggctcatttgttttgtttgtttcatttgttgttaatcctattgcctttaaatattagagccgtgtgagctgtcgaacaggcaaaccaactcgtatttgttcattgacgaaacattttccagcgtatgtggtcagaaaaacagatgaaacgttgctaaaaaaacaaatgttcatagttcgtgcgaactatgaacattgtaattggtggcgcgtctatggttagaatctatagtctacctgtatgtcaacgacagaatagttgtggctgtcctccttcagagaacgatcgttgacgagggcatattctgcgctaatgagtagatttttggtacaccagtagttcattcctacttcgtattgcgttttagattggttccattccccagtaggacgatacatgtcatagcgtgctttggcgtgaagctttgatttcactatgggggctatcaccaatgcgtaagcaccgtcagcttggtcgccagccttgtaattgatgttggcatcggtagccgtggcagccgactgctctgtctttgtaaagctccaacccgtagaatgcaaatactctgtcctaaatgtccaatcgttaacaaggtattctgccgaaaaggcgtaacgattttgacgcaaagaacgtatgccagattgtgtcttatgcacagggttacccttatcgtcaaccgtcatgatgggttgctggtgctcatcaacttcgttccatgttccttttcttgcgtacgttcccgtccagccaaaggctcctattctcagtccagcaacaggcattacccacatgccgccaatgatatctttcttctggtcgacatctttcatattgatgccttgcccgttgaatacacctatttgataatgtaagaggttgcgtccatgactatttcgcaagaagtcgccctgaacttgcagtcctatgtctcgtccattagaggcatgtccgccagccctgtcgttaaatcctgttagttttaagatgctttgggcatagctcataaaaccttgagccatagggtgcatagggttctcaaagctaaaaggacgtttgaactgtccaatttttactcgaaagcaatcgtatttctgccactcggcaaatgcgtcaacaatgcgaggactgcttcctaaggaattggtattgccattgaactggagttgtgttttccaataaaagtcgtttttgattcttccgtccaaagataagcgtaccattcggatattaaaggagttggattccgcattttcttgtgaccggtattggtattgagtcatcccatatccagaaagtttaacattgttgagccatgttggcattttggtctgagcacctgaagagatagcagtcgctacaatcagggttgtgataaaacctcttttcatagattgaaatcgttagatattaaaatttacagtttgcaaaactaatatattttttcgattcgtgacattttttttgttaaaatatacacattccatcatttttgtgttgcataggaacgaatgaactgactgaaatttttggagagaaaggatagcttcgttgaaattttgaagcaagtatattttaatagcaattattacttaaattatttgtcaaattgaaaaaatagagctatttttgccgttgtttacaaacatataatcaaaccgtatgaagaatttcttggtctcggtgattacactttgtgtaattctacttttgggaagttgtgccagtggtaagaaagttccctatttccaaaatatcgatgaaattagtttagcagggtcaaaaggcctttatgatgccaaaattatgccaaaggacatgcttaccattacggtaagtactaccgatccagctgctgcggcaccgtttaatctatcggttggctcctccgtagggggacaaggagagttgtcttctggtgcaggaaatcttcaaggatatttggtagacaatgacggaaatatcaattttcccgtgataggcagacttcatgtgcagggattaacgaagactcaatgtcaggacttggtgcataaaaagttgttaccttatatggctgcaacggaaaatcctatcgttacggtaagaatgtcaagctacagagtgactgttacgggagaggtaaacagaccgggagttatacctgtgtctacagaaaagatgagtgtcatcgaagcattggcgcaagcaggagatttaaccgtttacggtaagcgcgataacattatgttgatacgtgaggatgagacaggacaaaaaagcatggtcagactgaatttgaacgatgctaacttgcttaactctccttattattatttacaacaaaacgatattctatacgttgaacccaacaatgtgaaagccagaaactctggtatcggtccttcaaccactttatggttctcctttgtgggcatagttacttcaatggcatcattcctgttcagcgttttaagataattggtgaaacgagaaaaatgttgaaatataagaatgaagaatagcagaatataattttggtattcttcatttttttactttatatatattacccaacttcgttgaaagaggtgaaaatacgaactttaggaaaaaaacgacaaacgatagatggaacctttaaagcatgagtgtggtgttgcaatgattcgattgctcaaacccttagaatattatcaagagaaatatggtacatggcaatatgcgctcaacaaattgtatctcatgatggagaaacagcacaatcgaggacaagagggtgcaggtatggcatgtattaagttgggttcagagcctggctatgaacacatgtttagagagcgagcagaagggaaaaatgcgattaccgagatttttggacatgttagaaagcagtttaaggacgcttctgcagcgcaattgtcagacatggattacatcaagaaagagctccctttcgctggtgaattgtatatggggcacctccgttattcgacaacaggcaaaaaaggattgtcttatgttcatcctttcatgcgtcgcaataactggcgagctaagaatctatgtctatgcggcaacttcaatatgaccaatattgatgtcattttcgagaaactaaagcagcaaggacagtgtccacgtatctatagcgacagctatttgatgttggagtacatgggtcatcgattggacagagaggtggaacgcaattatgccaatgcgaaagcgcaaggacttgaaaacatggatataacgcattacatagaaaataatgtgaagatgagtaatgtgttgaaaacaaccatggcagattttgacggaggttatgtggtttgtggcattacaggctctggcgaaatgttctccatgcgtgacccttggggcattagacccgccttttattacaagaatgaagaggtggttgtattggcaagcgaacgccctgtattgcagacaactttcgatttgagctgtgatgatatacaagagttgcagccaggacaagccttgttggtgaagagaaatggcgattgttccatcgaaaagattcttgaccagtgtggaaattcgccttgttcctttgaacgaatatacttcagtcgtggttctgaccgcgacatctacaaagagcgtaaaaagttaggcgaacagttgacaccagcagttcttcgggctatcgacaacgatattaagtacacagtgttttcttttattccaaatactgccgaagtagctttctatggcttgcttcaaggttttaaggaatacgtccaccaagataaaataaagaaaatacagaatttaggtcatatccctacccaagcagagttagaagatatcttatcagaatcagtgcgaatggagaaagtagcttggaaagatatcaaattgcgaacgtttattacggagggtaactcaagaaacgatcttgcctctcacgtgtacgatattacgtacgagagtttggttccttatcaagataatttggtaattattgatgatagtatcgtgcgaggcaccaccttaaaggaaagtattcttcgaatattagaccgcttacaccctaaaaagatagtcattgtctccagcgctccacaaattcgttatcctgattattatggcatagatatgtccagtttggatgaattttgtgtttttcgagcagctattcagttgctgaaagacgaaggaagagaagaggaaatcaccgagatttatcgtgcctgtttaggagaaatgcagaagcctgttgaagaaatgcgtaactgtgtcagagatgtttatgacactttttcagtcgaagaaatcaataaaaagatagtagagatgcttcgtccaaagggagttaccactcctatcgagttggtgtttcaatcaattgacggactgcacactgccattccaaaccatcgaggggattggtacttcacaggtaaatatccaacacctaatggaatgaaactttgcaatcaggctttcatcaattactacgaaaggaattatcagcagaaataaagaaaaccaaagcaaatgaagttgatttgttgtttgctgaagtatccatatagctaccataatgataaaatgctcaatataatgaagaatgtaacgcttgtattatctgatggaactcgttttcacgggaagtccttcggatatgatgcaccagttgccggagaggttgtttttaatacagcaatgatgggttatccagaaagcttgaccgatccctcgtacgaaggacagcttttgacactcacatttccattgattggaaactatggtgtgccacctttttctattcaggaaaataaggttcctacattcatggaaagtgagagaatccatgtctcaggtcttatcgtgtctgattacagtcagttttatagccattggaatgccgttgagagcttggctgactggttaaagcgagagaaagtgcccggcatcacagggatagatactcgccaattaaccaaggtattgcgagaacatggcgttatgatggggaagatattgtttgatgatgaaccaaacaacattcctgaagcgaactatgaaggcgtgaactttgttgataaagttagttgtaaagagattattcactacaatgagggggcaggtaaaaaagttgtcttagttgattgtggtgtaaaagcgaatattattaggtgtttgttggaacgaggggtagaagttatccgagttccttggaactatgattatacagacatggacttcgatggattattcttagggaatggtcctggcgaccctaatatgtgcaatgaggctgtggaaattctcaaaaaacaaatgagcaagtccacaaaacctatctgtggtatctgcatgggaaaccaactgttggcaaaagccagtggagccagcatatataagttaaagtatggacatcgttcgcacaatcaacccgtgagattggtgggtacgaatcactgctacattaccagtcaaaatcatggatatgccgtgaatggaaagaccttaggcagtgactgggaagaattatttgtgaacatgaatgatggaagtaacgaggggattcgccacaaaaccaatccttggttctcatcacagttccaccctgaggcatgttcgggacccgtggatacggagtttatgtttgataagtttatagaaacattaaagtaagagacatgaaagacgaaaatataaaaaaggtactattactgggttcgggcgctttgaagattggcgaagcaggcgagtttgattattctggttcgcaagcattaaaggctcttcgtgaagagggtatccaaacggtactcattaatcctaatattgccacggtgcaaacctcagaaggggttgccgataaaatttatttcttgccagttcagccctactttgtggagcgtgttatcgaaaaagagcgacctgatggcatcttgttgtcttttggtggacagactgcattgaactgtggagtagaactttataagaaaggaatcttagaaaagcaccatgttcgtgttctcggaactcctgtacaagcgattattgacaccgaagatcgtgagttgtttgtagagaaactcaatgagattgatgtaaaaaccattaagagtgaggcatgtgaaaacattgaacaggcacggcatgcagcgaagacgttaggctatcctgtcattattcgagccgcatacgcattaggtggattaggtagtgggttctgtgataacgaagaagaactgaacaaacttgcggaaaaagcttttgccttctctccgcaggtattggtagagaagagcttaaagggctggaaagagatagaatatgaagtggttcgcgaccgttatgacaactgtatcacggtttgtaacatggaaaatttcgacccattaggcatccatacgggtgaatctatcgtgattgctccttctcaaacgttaaccaatagtgagtatcacaagctccgtgctttgtcaatcaagattattcgtcacattggtattattggcgaatgtaatgtacaatatgctttcgacccagaaagtgaagattacagggtcattgaagtgaatgcacgtctcagtagaagttctgccttggcaagcaaagccacaggttatcccttggcttttgtcgcagctaaactgggcatgggctatggactttttgacctcaaaaattcggtcactaaaacaaccagtgcgttcttcgagcctgcactcgactatgtagtatgtaaaattccacgttgggatttatctaagttccgtggggtagacaaggagttgggttcttcgatgaaatcggttggtgaggtgatggcaattggtcgtaactttgaagaagcgatacagaaaggtcttcgtatgatagggcagggcatgcacggctttgtggaaaacaaagaattggaaatagagaatatagatgttgccttgcgtgaacctaccgataagcgtgtcttcatcatttccaaagccatgcacaaaggatatacggtggatcagattcacgaattgacgaaaatagataagtggttcctccaaaaactgaagcatatcatcgatatagatgaagcgttgaagagttgtaccagtatcaacgtgctggataaaaccttgttgcgtaatgcaaaagtgtacggttttaccgatttccaaatcgcacgtgccgttggtttggaggatgaaatggcaaacatgcaccaagccatgttggtggtgagaaatcttcgcaagcagtatggcatattgcccgttgtgaaacagattgacacgttggctgccgaatatccagctcaaactaactatctctatatgacctattctggtgtgagccatgatataagctatgaacaagacaagcgttccatcgttgtccttggttcgggggcttatcgcatcggtagctcggtggaatttgactggtgtggcgttcaggctttgcacaccatacgtcgtgagggataccgctctgtgatgatcaattataacccagaaacggtgtctacagattacgatatgtgcgaccgcctgtactttgatgaactgacttttgaacgagtaatggacatcatcgacttagaaatgccacatggagttatcgtatcaacgggtggacagatacctaacaacctcgccatgaggctcgatgagcagcatgttcctattctcggaacagcggcaagagacattgacaacgcagaagatagggctaaattttcgtctttgttgaatgagcttggcatcaatcaacccgagtggagagccctcacttcgatggatgatatcaatgagtttgtcgaaagggtaggcttccccgtcttggttcgtccgtcttatgtcctttcaggggcagccatgaacgtatgttctaataaagaagagttagagagatttctcaagttggcagcgaatgtcagtgaagaccaccccgttgtggtgtctaaatttatagagtatgccaaagaaatagaaatggatgctgttgcgatgaatggggagattatggcttatgccatctccgaacacattgagtttgcaggtgttcattcaggagatgcaaccattcagttcccgcctcaaaagctatatgtagaaacagtgaggaggattaagcgaatcagtcggcaaattgcgaaagcgctgcacatcaacggacctttcaatattcagttcatggctcgtgaaaatgacatcttagtcattgaatgtaacttgcgcgcatcgcgctctttcccatttgtcagcaaggtgttgaagctcaatctaattgatttggcaacaaaaatcatgttgggagtcaatgtggaaaaacctcaaaagaatttgtttgatttagattatgtaggtatcaaggcttctcaattctcatttaatcgcttgcaaaaggcggaccctgtcttgggtgtcgacatgtcttctaccggcgaggtgggctgtttgggtgatgataccaatcaggcactgctcaaaagtatgttgagtgtggggcatcgcatccctcaacattccgtattgttgtcgacaggaggcgccaaacagaaagcagaaatgctggatgctgccaagatgttgaaggctcatggctatgagttgtatgccacaggtggcacaagtcagtatctaagtgataacggtattgaaaacaccacagtgtattggcccagtgaagagggaaaagagccgcaagcactttcgttacttcatgagaagaaaattgatatggtggtgaatatccccaaggacttgtcgcctcgtgagttgaccaatggttataaaattcggcgagctgctatcgacttaaatgttcctttgattaccaatagccgattggcaagtgcttttatttcagccttttgcacactcagcttggatgatattgatatcaaagcttgggacgaatataaataaatgcgctgcgtgaacatcgaattgttcgaagcgacccttcgatcatgatgtgatgagaggatgttgactgtatggatgacactgtgttgttgttcatcatctacatcctctcatttgttgaaatctactgaatatgattcgcagtctcgcggataagcaactcttgcttagcatcttgactgttcatgtaaggacacaaaaaaaaccattactcccgaaagagtaatggttgttctctcaatttttgttcgtattgattactgagcgttagctactgaatcaacagcttgtgtagctgaatcaacagttgctgcagcagcagagtcacctgctaccatagcagagtctactacagagtcagctgttgcttccaaagagtcaatagcagcgtctgtttgacttgttttgttaccacaagatgcgaatgagatagctgctacagctacgaacattaaaactaatttcttcatttctttgcttttttaatctgtaaaacaatcatttgtttattaaaacattgcaaaggtaagactttttttgatacgcaatacagttttttgtgattttttttctttttaactgtaacttttttgtaacatactatcaaccaatcagttgcagtgagtaaaaatatgttaaatatttgtttcttttgtttgtctctactcatttctgcgttatatcaatgatttttttgtgcaagttcgctgcttgatagcgttcttttagtggatttatggcgctatttcttagtgtgaacagtcttataactgtgaattttccaaactaacgcaatgcttcaagggatatatatataaggtgtacttctttttgcggtttaatttataattcgctttcgggcacattgaacgtgctgatgttcatatctcctttttctaatcctaattttagccacttcattcgttgagcacttgtgccatgcgtgaacgattctggttggacatatccttgtgctttcttttgcagatagttgtctccaatcttctcggcacaattgatcgcctcttcaatatccccatcttctaacgaattgtattcggcatcatcgtgatgcgcccacacaccagcatagtaatctgccaacagttccagtcgtacactaatgcgattggcgtcaaccttattcgaacgactcatttgttgatgtgcctcgccaagcgtccccaacaaatattctacatggtgtccaacctcatgcgcaatgacataagcataggcaaaatctccactggcaccgagttgctgcttcatactggtaaagaaagagaggtcgatgtataacttttggtcgcccgagcaataaaatggaccggcagcagaagaggcggaaccgcacgcactattcactctgtcggtgaaaagcaccaatgtcggtggggtataggtgcgtcccatttcctgaaacactttactccaaacatcctcggtacttgccaagatttgtcttgaaaactttgccagttcttcctcctcagcagtaaattctctctgttgtggagcaacttcttcgcgaagagtattgagtccaccttgttgaatcacatttcccacaatgtcaccaatgccaccaccctgcataagggtgaataaagcgattaacacaatacctccgatacctccaataccagccttggttcttgtactcatccctcttcggtcttccacattattgctttctctgcgtccgtttaatctcattgtaatttattttttatagtcttaccttctaaaatatttctacaaatatacgcatttatttgcatttttgagttcaatttaggggaaaaaataagctcaccgctcatggcgctttcatttataaaaggtggctccttcttggcaaagatgtactttgcttttgtattgaaactttaccaaaaatcgaccattgaaaatcttcaaaatagaaaaaatcaataggcaaacgcgctacaaaaatgggctgatttgagcaaaataaatgcctttttaagttgaaacattgatttaacggtcttggaaacactctttagaggtgttattcacatgcttcagcagccttgaagcatgcaaatagtaggcttatctcaatgggttagtcgccaagacagggtaaaattaagaataaaaaaaagtgaataagcgtaatataatcaatatcaatcaattatgaaccttgctcatttttcgcgtatttgcgacccattttgaagttggtgattttcacgcgagttttgaaaggcactttgtaaagaaaattcagcatttattttccttccatgcggcgtgctgccacttttacagcagctgttttttggcggttgttcgttgttagaatttcgtgcttcaatgcaagagcagtgagcaaccgctgtgttcttttgtctcagaaatatggaataacgacggaaaagttgaccaatcgttctttagattttatatgaactgcaggcgtttttcttttgcctttattttttagagtaacatttgtccaactgccgtttttttagtacttttgcaaagtttatagtacacaaaaataaattcatattatcatgaatgtttcatataaatggctcaaagagtacgttgacttcgatttgacaccccaagaggtggcagatgcactcacatcatgcggtcttgaggtagatgccttggaagaagttcaatccattaaaggcggtttgaaggggctgtatgtgggtaaagtgcttacctgtgaaatgcaccccaattccgaccaccttcatattacaaccgtagatttaggaaaagagcagccttctcagattgtctgtggtgcgccaaatgttgccgcaggacagaaagttattgttgccgatgtaggttgcgttttatataatggtgaggaatcattcactatcaagaaaagcaaacttcgtggtgtggactcatacggcatgatttgtgcagaagacgagataggtgttggaacttcacacgatggaattattgtccttcctgaagatgcaccagtgggtcagcccgccgcagaatattatcatttagaaagcgattgggtgatagaaattgatatcacggcaaaccgttccgatgcactttctcattatggcgtggcacgtgacttgtatgcgtggttgaaacaaaattgttataccactaacttgcatcgccctaattgtgatgcctttcaggttgataacgaggatttgcccattgatgtacaaatagaaaatacacaagcctgtaaacgctatgcttgtatttcgctgacggattgtgaggtgaaagacagtccagaatggctacaagataagttgcgggtcatcggattgcgacctgtcaacaacattgtagacattacgaactacatcatgatggcgtatggacagccgatgcattgctttgatgccgacatggtggaaggcaaacggatagtagtgcgcacacaacctgagggaacaaagtttgaaacgctcgatggcgaagaacatacgctgggtgaacacgatttaagtatttgcaatgcggaacatcccatgtgtattgccggtatctttggcggtaaaggaagtggtacttacaacagcacgagaaacgtggttttagagagtgcttatttccatcccacttggattcgcaagagtgcgcgtcgtcacggactgagcacagatgccagttatcgtttcgagcgtggtattgatcccaatggtatcatctacgcactcaaacaggcagcgatactttgtcaacagttggctggtggtaaggtgagtatgcagataaaggatgtttatcctgaaccgatagaaaatgcgaaagtatcactttcatatagctatgttaatggactgattggtaaagagatagggcatgatacgataaaagagattgtgacaaatcttgaaatggaaatccttcaggaaacagcagaaggacttgaattgtccataccgacctatcgtgttgatgtgcagcgtccatgcgatgtggtggaggatatcttacgtatctacggatataataatgtggagataccacaacaattgaagagctcgttgaccatcttaggcgaagaagacgagaaacagcatttggaaaatctgattggtgaacaattggtgggtagtggcttccacgaaatcttaaataactcgctcacaaaagtagcttattaccaagatttgaatcagtatgcagaggaaacaacggtgaaagtaatgaatccgttgagcagtgatttgggtgtgatgcgacagactttgttgtttggtggcttggaaagtattgcgagaaacgtcaaccgtaaaaatgcaaacttacgcctttttgagtttggtaattgctatcattttgatgcggctcgtttggatgcagagaatcctattaacgcctacaagcaggaaacacatttaggattgtggattactggaaagcgagtggaaggtagttgggcgcatgcagatgaagatagttcgttctttgaactcaaagcctatgtagaaaatatctttgcacgcttgggtgtaccagctgggctgtgtatctcggaaaagagtgataacaatattttctcggaaggcttgacgatgaagaatcgtggaggaaagcctatggttgaattaggcgtggtatgtccccgattattaaaaactgtgggcgtctctgcgacggtgtattatgccgatatccactggtctacggtgatgaaagctattcgcaaacagaaggttgagtttaaggagttgtctaaattccctgctgtaagtcgagatttggcgttgctgttagaccaagcaattcctttcgaaaagattgaagagattgcttttcaaacagaaaagaaactgttgaagcgtgtggaactctttgatgtttacgaagggaagaacttgcccgacggcaagaagagctatgcggtgaactttattttgcaagatgaacagaaaaccttgaacgacaagcagattgatgcaataatgcagaaacttatcaaaaacctcaccaagaatttaggtgcagagttgcggtaagaggttttttgtgaagtgattgacgttgatatatcaataattcattaataataacaattcgtgacgtagcaatacgttcatgacctctttaggtgaagaggattttaatcaataaattcaatgggaagagcatttgaatatcgtaaagcaacaaaactgaaacgttggggacacatggctcgtacatttacgaagattggtaaacaaatcgccattgctgtgaaagcaggtggaccagagccagaaaacaaccctacactgcgtgccatcattgctaatgctaagcgtgagaacatgcctaaggacaacattgaccgtgctatcaaaaatgcacttggtaaagaccagagcgattataaggaagtaacttatgagggctatggtccacacggagtcgccattttggtggatacgctgaccgacaataccactcgaactgtaggtgacgttcgttctgtattcaacaagtttaatggtaatttgggtactacaggttctttggctttcttgtttgatcataagtctgtgtttacttttaagaagaaagaaaatctcgatatggatgagttaatccttgatctcatcgattacggtgtcgaagatgaatacgatgaggacgaagaagccaatgaggtgaccatttacggagcaccaaccagctttggtgatatccaaaagcatttagaggaagaagggtttgaggtgactggtggagagtttacttacatccctaacgacttgaagaatgtgacaccagaagaacgtgaaactcttgacaagatgattgagaagttggaagagtttgatgatgttcagacggtgtacaccaatatgcaaccagaataaaccctcggtgcgacggtcattcatcattcggagcatggtgtcttcaatgatgaatggcacgcttgcattttctttaatagtgcagttcaagtcctctgtttcaaccacgaagtgaacgaggatgacgaacagcacatttgtacttctgatatcctgaactgtaattatcctaaatcttaaccttttatttttttgtatgaaaagaagtcgttatttcatccttttattaaacttactgttggcagccttgccattaagtgctaaaaaagattatacccaatttgtaaatccctatattggttctggaggtcacggtcatgtctttgtgggagcgaacgtaccttttagtgccgttcagttaggaccgatgaacatctttaagggttgggattggtgttcgggttatcattacagtgatagcgttattatcgggtttagtcataaccacttgagtggtacaggttgtgatgatttgggcgacattagtttgatgccctactcaggtgagatgcgaaccaagcgaggagatgatcatcaccttgaaggagccgcttcgtcgaaattctcacacgacaatgaagttgtatcacccggttattatgccgtaaaattagataacggtgtaaatgtagaactgacaacaacagagcgtgtgggggtgcatcgttacaagtacacaaaagcagaaaccccacgcgtattgatagatttgttcaatggtattggaaataaaacctatgaagcctatattcgcaaaattgatgataccactgttgagggatatcgctttgtcaatggatgggcaccccaacacaaggttttcttttatgccaagttcaatcaacctatccaatcacttgatgtgtttcatttgaatacacctgcgggaaccgatgagttacaaggtcgtgatgtgaaagcagttgcaacgttcaatgacggaatgaaagaactcttggtaaaggtagctatctcgtccgtgagttgcaccaatgcaaagctcaacttagaaaaggagatgacgggatggaacttcgatgacgttcatcaggaagcgatacaaaagtggaacgatgtgttatcacgaatagaaatagaagggacacctcggcaaaaaacaatcttctatacagccatgtaccatgcctttatcgcacctaatttatattgcgacgtcaacggagactttaggggcatagacgacaaggtatatagaaataataaattcaagaattatacgacactctcgttatgggatacttatcgtactttgcatcctctgtttacaatcatagcgagaaaggaagttccagatatgattaactccatgctgagcatctacgaccaaaatggaaagctgcctatatggccattgtattcgggtgagacgaattgtatgccaggttatagttccgtgccagtgatagcagatgcttacttaaaagggattggcggtttcgatgccaataaagcgttagactatatgatatccacggctacgaatccaaagcaaaacggtgtgaaagactttatgcactatggatatattccagccgatgctgttaaggaggcaacttcgattcaattagaatatgcagcagacgacatgggtattgcactcatggcaaagaagatgggacgaatggatgtttaccatactttcttgaaacgtgctttgtcgtatcaaaccatttttgattcaaaaataaataagattcatccaaagatgaaggatggctcatggtacgaaccttacgacccatttttagcgaacgaaagagatggggtaggagatttctgtgagggaaatggatggcaatatacctttatggtaccacaagaccctgatggactgattaaggcgcatggtggagatgccgcttttgtgaagaaccttgatgagttgtttgttgccgaaggcgatcttggagaaggagctccacctgatgtgtctggtatggtgggacagtatgcacatggcaacgaacccaatcatcatacaccttatttatatgtatatgcaggacacccgtataagacagcagaaaaggtgagaatgatacaaaacaagttctataccgatgagccagacggatactgtggtaacgaagactgtgggcaaatgtcagcttggcatatcatgtcagcgttaggattttatcaggtgaatccatctaatggcatttttgtttttggaagtccgttgtttaagaaggcaacgattcatctgcctgagggaaagacctttgtgatcactgcacccaacaataatgacaaaaatgtatatatcaagtcggctcaattaaatggtagaaacttgaagacctcttatattacttacagtgatgtgatgaaaggaggagtacttaacttccaaatgagcaatcgccccaataagagttttggaaaagcaaagcagcatagacctgtgagtgcgaaataatccgagagagtgcgttatactttggggctactaaataagtatcaatcatttgtgtttatttagcagcccctattttgttgcaagatttcgaaccactgtgaaagatgaacgaattgtcaatgcacttaatgttgacgtaaaagatttgtaagtaagtaataatatttaatatgaccgagaaagttcgtgcggaaagaaataggacactgactgtttcagcaagcgaaattccaaccttggaaaaatttattctttctgtaaatgatattaagacatcatttgcagatgactcaattatcaatgcagatctctttgattgccttgattatattcctaacgggtatttcaatttgataattattgatcctccatataatcttgacaaagacttccacggaaagaagttttcaagcatgaaatccgatgcgtatgaagactatcttagaagttggttctacaaagtttgcgacaaacttgctccaaacggaacactctatgtgtgcggagattggaagtgttcttcatcaatgcaaagagtcatagaagaacgcttaactgttataaatcgtataacgtggcaaagagaaaagggaagaggagcaaagtctaattggaaaaatgccatggaagatatttggtttgcagtgagaaatcctaaagattattactttgatgttgattctgttatgatgaaacgtaaggttatagcaccatacaaggtgaatggcaatccaaaagattgggaggaaacagagaatggtaatttccgaattacatatccttctaatttttgggatgatattagcatacctttttggtcaatgccagagaataccgaccatccaactcaaaagccagaaaagttgtacgccaagttagtacttgcatcaaccaagcttggcgataaaatttttgacccatttttaggtagtggaacaactgctgttgttgctcaaaaattgggtaggagttattgcggagtagagatcaactgagagtattgctattgggccgttaaacgcttgatgaatgctattgataataatacaatccaaggatatgaagatggtgtgttttgggagagaaattctttgggcgatcagaaaaagcaacaaatacaatctaaaataactaaaaaagtaaaagagcctcaaatccgcaactaagcccttgaacgtccttcttacgtcaactcctttatcgctctgtggatagtatcagagctacaagtgtgatgtgtcggatgaagcgagaggtggttcatcaaatgagtagtgacatccttgggtacatgaactaccacagaggtagatactcatgagagagcggatgatttcgctgtactgataaccgaacgttttcgttaagccagatgagcagagctaagtttacttaagctctgccatgtcgagaaaacgtgccatgaaatagaacgatctacaccttagaccgggggttgagtcgattacagatgataatttggagtcaaattgctccatgattgaaaataatcccccaaaaggagtgagtctctcagatttaatttgtatcttcgccatgtctatcgtcggattctcttgttttttttgcaacactaagataagtgaaaattcagacatagcaaaatcctgagcaactttttgttgctcaggtactttaaaagtttaagttataatagtgttgcggaattaagaataaacaagtagcattatgaaacaaatcatattatttctattcgttattttctttgttggttgcaaccagcatcctgatttgtataagattacggatggacttgtttcgtcactccaaacggaatatgagagttatggaattctcggcggaacggatcacaaacaattgacccctgacggcaaatatcaaattatgccggtggggcgattgattaatgtgaaaatcatggatgtagcctccgatgaagattacgaggacctacgccaagacttggaaaaccattacaaaggtgattctcgtgtgaatagtgtataccgttgtcaagcggggacattaatgatagattgtagaaactaataacttattaaaaatgtaattatgaaaaatattttatttatgctaatgctcgttctgagcataccttgcttcgcccagcagaacaaagcggaaggtgaaaagtcaaaaagtaaggctgttgaatttatgagccaaagtggtacacttatcagaaaggatttttatgatatacataaagacaaatatggcgttacttgccaagttcttatcttaacaaacattcttaataacaagaaaagtggatgcttgcgacttgaaaccaaatatttttcaagtgttggaactgacacatatataggaactcttgattctgatgagattgatgcagctataaaatcattaaaatatatagcagagacccttgttcttacatcacctgaaacctataccgaggttgaatatagtacaagagataacatgcagattggagcatttacctctgatggcacatggaaggtttatgttcaaacaaagtcatatacctcgcgctcgatgtctataattaaggctgataagattaacgaatttatcggatatcttgagcaatccaaacaattaatttcagaaaaggtaggttctgttcaataacatttatacaccatgcgaaggattttgattttattgtttgtatccttattctggttgaatgtggatgcgcaggaatatgagataaccatattcggaagttttcagaggtatcacctctatccatctgatagaggaatgtttcgcgatgacagaaaggttacgactttctcctacgacaagaaatcatccctcgcatgggtgtattgtgacgagttccttgcacaagtgcaattgccagaatctttcaaggacgtaatgaaggaacatggtatcaaggatattgagaagaagaaggctgatgtatatagcgagaaagtcgtggccatcaggcgtaaactcgaccgccactattttgttatcgactcgataaaagcagcccgtgaaaggcatatcgccgactccataacaagagttcgtttcgttgaagattccataaagaagaggaatgagtttgtggccgattccgttgaaaatgttgaagaggatacgatggcggcaagttataactatcctttctcatttagatttattatcggtcaaacaaagggatacacgcaagttggttccgagatgtctgatgacagttatagtaaattcggtggcaataaggaatatattaataaacgtccaattttcatagctggctattataaaaaggtaatacccaagaagtattcatttgacaccgataaggttagagaatactataaagcatacgctcttggtcgtagcttctatgtagataaggaagatgtagaattaaaagacgaggctcagacaagattggactcgttaattcgttccgacagaatcacccgtgcccatttcgctcattggactaaggatttcagtaaagagattttttacgatatagaaattaaaaatgtaggtaagattttcgattattacaagaaataccctgtttctgtttattcatggagttggggtagtaaaaatgaatattccgatttccagaatattgacatagaattctacaattcatcaaaaaagactattaaatatgtatatgtaactttccgagcaaagaacgctgttggcgaccccgtaaatggtgccaccaagacgctgacgggcatcggaccaatagagcctggtggttccggttcatattcatttgaagacgtttggtattctcatactattgataaagtgagcatcgtgagcatcaaggtgcaatatatggataaaactacaaggactattaatccagcatatccagcagtattctcagaagatgagaaaaatactattgacaatttcaatagcgacataaaagctttgaagaagttgaacggcgaagaataaccatttgctaagtagggtctgctaatttagtataactatctgacaattaactatttatgttgtataaaatttggccaattcgcccaaaatgactacctttggatgttaaaacattcaagaatcgagatgaaatactattcacaatatcgcagtcacgacctgtttgaacttgcaggagtcactttcgggattgagcaaatccaaccgttgggtcaagcaggccgaccgccttccctgggacaggatagagaaggaatacaataaagtaatcaatggtaatattgaataccaaaactgtcatttcaagagtattgaaacatttgataggaattgtttaactttgggtgttctcggttgggggacaaattcaaataatagccaaacactttgacatttcttgaaaatgattctataagaagtaaaccactccaatcaaacaaatcaaactttggttggggtttactcgtctttccaatcaatcgtttttagtgtgtagctctccaccacgcagtattttgtatgccacgtaatggcgcaacatgaatggtggggtctgaaatggttaacccactaaaggttttcacagggatatatttgggaccttcatacggataaatgtatgaataaatcgtgtccgtatgactttgatgacgtaccgttttcgtgagttgttggttgaaacgttcacgaaggttcttgtttttacaaagccatttcacgtaatcgcccatgtcgaagaatatacctgccttaaagccatcgagtacttgcacactgtcccgcaacgagtcgtctaacgaatatttcgcattgatgtccttcatcactgcagctaaggcttctacctctcggcagtcgatagcggcaattgtgccagacggcactcggtaattggagtagaagtcatgaaacttctttactatagcgccatagttgggagtgggcgatgccaaactgctccacatatccgcatacggcatgccaacagccataacctcactggtagagccaacaaggaaattagtcacgtctttgagcatataggctgtttcaacatttgccatgtagcaatcgtcaaacagaatgtattgcatctttgtgcccgtttgagcgattccttttgccaaggtctctatgtctgtggcataattgaggatgtcgtccacacttccaaagaatcgggtctgttcccaatacgtgggttgctgacgagtggaaaaggcataccgttttgcattgttggggtagtctttccaattttctttatacgtccaacctgtgccgtggcagccaatgatgagtgcatagttgagagcttcagccgctgctttcgtgtcattgatgatttgggcaataccctcagccgtagtatatgcttttcccgaataggttttgataggggtgtgcgttatttgtttgttgacataaccaacctcgtagagttctgattcggtgggcgatttgctaagaaataccactaagcgtgagttcttgagtcctttctgggctttgacacccgattcgatgctgtctaaattttgtaggaaaaagttgtacagtcctttgtgttgtgcacttcccgaccacggcatataaactaatatggtttgtttgttatagtcgttaatgtcaatagtatcgtcatccttacacgatgtaatcgtcaaggtacagagtaggacgagccataaaaagaactgtttatgcatcattcggttatttcttctttttaagttctgtcatcgaaactttcagtgctgcaattttctcttctgtatcactttgtttcttgcgctccaatgccaccacagcttcaggcgcattggctacaaatttactgttgctgagttttttctgaataccagctaagaagccttccaaatgtttgagttggtcttcatgtttctttaactcggcttccacatcaatcaaattaccgataggaacggcaaattcgttcgtgccgaccatgaattgcgccacgtcagcaggtttgtcagtcatggtttgtatggatgacaaatgcgccattttaatgataatgtcattaaaggcggcaaatgggttgtcaccaatagctaccagttctaattcttctttgggtgagatgttcttttggtttctaatcatgcgaaccccactcacaatctgtttaaccacttctatctcttctgtcagcgatttttcgtcgtccgtaggcgtaggaatatcaagctgttgggtcatgatagattcaccttcctttcgctcatacaagtgttgccacaattcttccgtgataaatggcatgaaaggatgtagcatttttaagaggatgtcgaagaagttcaaagtctgctgataggtcttcgtgtcgataggtgttccgtaggcaggcttaatcatctcgagataccagcttgagaactcgtcccaaaagagccggtagacaaccattagtgcctcagagatgcgatatttcgagaagaggtcgttcacttcttcgtttgtggtgcgcaacttagcctcgaaccaagctgttgccaacttgctggtttgtgattgttcggtatctgtaacctcccaaccttttactaatcggaatgcattccaaatcttgttgttgaagttacgaccttgttcacacaagctttcatcgaagagaatgtcgttgcctgctggtgcactgagcatcatacccatgcgtacaccatcggcaccgtacttatcaatgagtgcaatagggtcgggcgagttgcccaagctcttgctcatcttcctacccaacttgtcgcgcacaatgcccgtaaagtacacgtgtctaaaaggcatctgccctttgtactcgtatccagccattatcatgcgtgccacccagaagaaaatgatatcaggtccagtgatgaggtcggctgtggggtagtagtattgaatttctttattatcaggattattaatgccgtcaaagagagaaataggccacagccacgatgaaaaccatgtgtcgagacaatcactatcttgttcgatgtcgttcatggtgagtgcgctgtccttctgttgtgccagtttgagagctgcctctgccgtttctgccaccacaacctcttgcttgccgttgactgtaaagtaataagcaggaatgcgatgtccccaccacagttgtctactgatacaccaatctttaatgttttcgagccagtgacgataggtatttttgtacttcgagggatagaactgaatatcgtcgtccatgacaggctgcaaggcaaggtcggcaaagtgttgcattttcagaaaccactgtgtggacaacttcggctcaatgggcacatgggtgcgctcggagtatcctactttgttgttgtagtcctcgactttctccatcaatcccgctttttccaaatcttttgcaatttgcttgcgcacgtccatacgatccataccaacgtacattcctgcttcttcagaaattgtaccattgtcgttaaagatgtcgattgtttgaagtccgtgtttcagacccaatgcatggtcgttaatatcatgtgctggcgttacttttaagcatcccgtaccaaactcaatatccacatagtcgtcctcaataacaggaatctctcgtcccactaatggtacgataacgtgttttcctttgagccaagcattcttaggatcattggggttgatgcacatagctgtatcgcccataattgtttcgggacgtgtcgtagcaacgatagcaaacttatcaggggcttcaactacatgatagcgaagataataaagcttggaatgctcgtcttgatagataacttcttcatcactcaaggctgtttgtgcctgcggatcccaattcaccatgcgtactccacggtagataagacctttattgtagaggtcgcaaaacactttgataacgctttccgaacgcttctcgtccatcgtgaatgcggtgcgatcccaatcacaggaagctcctaagcgacgtaactgcttcaaaataatgccgccatgttcatgcgtccagtcccaagcatgtttcaaaaactcgtctctcgaaaggtctgttttcttgattccctgttctgccaatcgtgctacaacctttgcttcagtagctatcgaggcatgatcagtgccaggaacccagcaggcattcttgccttccatgcgtgctctgcgtactaaaatatcttgaatggtattgttaagcatgtgtcccatgtgcagcacacctgtgacattggggggaggtatgacaaccgtataggcttcacgcccatctggttttgaactaaataatttgttgttgagccaatattcataccatttagattccacatcctgtggattatacttgcttgccaattccattttatcgttttctactttaataataaattcttataaaacattgcaaaattacgaaatttcaattgaaaatgattacttttgcaataataaaaattcagccatgcactcaagagaagaaaaaatagcggcttttggtaggcttcttgacgtacaggaacgcctaagaaaggaatgtccttgggacagaaaacaaacctatcacagcttaagaccgcacacaatagaagaggtttacgagctttgtgatgctatcttgaaagaagacaaggtcaatatctgtaaagaacttggtgatgtgttggagcatgtccttttctacgctatccttggagatgagacaggggcttatgatattgcggatgtatgcgataaggaagcccgtaaattaatgtttcgtcatccatttatcgattggactggttgggaaggagaccccaagaaagaagttttagacgcacaagcaggggtggacgaaaccactgccaaaccgcagacggaacagcaggtagaaaaaacgtgggagcaaattaagcaaaaagagaaagatggaaacaagagtgtgttggcaggtgtgccagaggctttgccatctctcattaaggcttatcgcattcaagataaggcacggaacgttgggtttgactggaaaaagcgagaagacgtttggaagaaagtgcgtgaagaactgagtgagctggaagaagaattagcgaaagacgatgccgagcatgctacgaaggagttgggagatttccttttctcggtcattaatgctgctcgcttgtatcatcttaatcctgaaaacgcactggagctcaccaatcaaaaatttattcgacgctttaatcatattgaagcccaaaccataaaatcaggaaagcagctcaaagacttgacactcgcagagatggatgagctttgggaggaggctaaacgtatggaaaaagaatctgataacaactaaaaatacaaaatataataatgatgaaaaatacgttgaaaatatttgcggcaatgctcatgacagtcagcttggctgttggatgcgtggataaaaagggttctgcatcctcttcggacacggtatcacaagatgaagaggcatccacagactccactgtatatggtgtttgcggcgacggaaccgccatgcacaccttgcaggtgatatcagatgctggcgatacggtggattatatgattaacaccgatggagaattagtctctgatattcaaggaggtagaatggtaggtgaccgtatggcagtcattggagcgaaagtgaatcaagaattagttgcgaagaaagtaatcaatctgacaacgcttttagggagatgggtaagtttggataagaactttgaaattcgtgaaggtggcattgtcgagtctttcgtgaaagccgaatcgcatccgtggacgaagtggaaaattcttaatggcgccttactgttaaataccgatacctttgaagtaaagactttgggggcagatagtttgttgcttgagaacaaaaatggtatttttgtctacaagcgtcaacgagacaaacagcagtagaaggcttttgactctttcttttgcgtttagattcatctattggaaccttttagaattcatattttaggatgtggaagtgccatgccaacgctccgacaccatccgtcctcacaggttgttgagatccgtgagaagttgttcatggtcgattgtggcgaaggaacgcaagttcaactccgtcgtgctaaaatcaaatttaccaagcttcaagccgtctttatcacccacttacatggcgatcattgccttgggttgataggaatgctttccacttttgggatgttggggcgtactgcaccgctccatatctatgctccgcaagcgttagaagctttgttgcaaacacagattgccgtgttctgtccaggcttggaatacgatgtgaagtttcatgcagtggagaccacccagcatcaggtgatttatgaagaccgaagtctgactgtcgaatccatccctttagcgcatcgcctcccttgttgtggctttttgtttagggagaaacctgtgttgccacatatccgaagagagatgattgacttctatgaaatccctgtttcccaaattaacaacatcaaaaacggagccgactggactacaccagaaggggagatggtgagcaatcatcgccttacttatcctgctgcaccgccccgtagttacgcctattgcagtgatacacgctatcttcctcacttgcaccaattggttcaaggggtggacgtgttgtaccatgaggctacttatgcccaggaaaacgagagccgagctgaaatgttcgcacacagtacggcagcccaagccgccatggtggcgcgcgatgcaaaggttggaaaattgctattggggcattacagtgccagatatgacgacgagtcggtgctacttcaagaggcaaaaaatatctttccaaactcattcttaaccgatgaaggactggtcttcgatgttaaatagagttaaatggacaataaattttaattcgtgctttttggttttcaataaattgcgtatctttgttacattgaacacaaagaacatatatcaatgatacataagatactatccattacctttgcttttgcgctgctcattggcagtccaatcacgatgcaagcgtctgaaggtttcgaggctattgaaaatgaatttcagaatgtttctatttcagtttcggagtctgtactacatatcagtggtgcaaatgggcaagtattacagatatataatgtagcaggcgtttgtctgatgcgtgtgaagattgatagtcaggacaagcgttacgaactaaattatccaaaaggttgctacattatcaaggtgggcaaaacggtaagaaagatatctattagatagcgcaagcgttgaaatttgtttttcattactttctgttctttattcttctttttcagttgtgttcatgtcggaataaagttcagaatcctaatcagaacttggaattaagtagtttttcgtctcttcggaatgctgcttatgtcattcatccccgaaaagttcgggcagaacttctcaagacgttacaagatgatagagactctatgcaagccgactatcgtgctcgtaactattatttgcagggagggcggcttctttggatcgaccgtaatggagttgatcagcgtgccgatacgctgttagcgtatttgcgtgagatgaaagcggtaggattttcgcccaataagttttgtgtcgcctcgattaccgctgacttaaaccgactgagagctttgcaatttgataaaagtcagcattccattcatcaggtgttgggacgcttagaatatcatctaaccaaagcctttttccgttatgccacgggacagcagtttggttttaccaacccttatgtgctttttaacaagcttgatgtgaaagagggagattcactcaacgtgagttattatcggctctttgatattccgatggcacgacccactaaaaactattggaagaatctgtgtaaacaaactcatccagacagtttgacaacctttattcaccatatccaacccactaatcctttataccaagtattcaaaaattatcttgcgcaggaggggcgttccactaataatgtgaagacgctctgcaacttggagcggacacggtggcgactgaaagataacccattcgctcaagataaatatgtcatggtgaacgttcctgccatggagttgctggctatcgatcatgaacaagtcatgagaatgcgcgttggcgtgggaacgaacaccactaagacgcccttgttgagcagtaggattatgcggatggacgttaatccgcaatgggtcatgcccaagagtattattgacaaaagtgtggcacgccatgcaggcgactctgcttattttgagaatcatcggtattttatacgaaaccgagagacaggaagcagggtagaccctcgacaagttacgagtgaaatgcttcggagcggtcaatacttcgttattcaagaaggcggaaaaggcaacgccatggggcgcatcgtgttccgtttcaagaataactttgccgtctatctgcacgacacctcctcgcgcggagtttttgaacagtcgaatcgtggcgtgtcacatggatgtgtgcgtgtcgaaaaacctttcgaactggcggtatttttgttaaaagaaaaggatgaagaactcattgaaaagatgcgctactccatgcaagccgatattcattcgcattatcaaaagaagctaacggcgacttccaacctacccaatgacaccttgcaagaatctaagttaatcaattcggtgcgtgttcaaccagcagtacctctgtacattacttattataccctgtatcccaacgagcagcatggcatgcgggaatatcaagatatttacggttttgacgctgtgatttacaaacaattaaaaaactacctgcgatagtttcaatggacgaacggtgggacgaacatactatcggcagggcattggcagacccaaagctgcgggaacaagcctttacacaaatggttcggcaatacagcgaacccctttattggcgcatcaggcggatggttttctatcatgcggatgcagatgacattcttcaaaacaccttcttaaaagcgtggaagcatgttgcgcaatttcaaaataagtcgaaagtcttcacgtggttataccgaattgcgatcaatgaggcactcgattttcttcgaaaacaaaagaatacgcttaccacttctgtggaagatgtctcctcgttggctcaaatgatgcttgcagatgactactttgacggtgatgaggcagaggctatcctccacgcagcgattgcaacactgcccgaagtgcaacgcatggtctttacgcttcgctactttgaggagatgaaatatgcagagatgagcgagcttttaggcaccagtgaaggagccttgaaagccagttatcacttggcagtgaagaaaataagtgcgttcattcaaacaagcaattaaacttttatacttttgtttcgtcataaagatatgaagataaatagggtagaagacaaacagcacatcgagcgttgctttaagcaaaccaactcgttcaaggttccggaaggatattttgaacgggtggttcacgatattttggtgtctttgcctcgtcaagaacagcaagtggtgcctgctcgtcatgctcgcttttatccgctatacactcgttggttggtggctggctgtgtgttggctgcattattgtctgttacactttattttcatcacactacagttccttcttcttccaagcagtcggaacctacgtctacatacacgaggaactatacctctgaaactttggaagaagccgcattcatcagtctgatggatgatgaggacttatattctttatttgaagacgattaacaacaagcgaccatgaaacaaatttattcatttcttcttttattcgtatgtattggcgcttttgccacaagtacagagttgggcgaacagtctcttcgctcccgtcgaggtgattttcaggcacgtatggagcagttcattactaccgaagctgggcttacccctcaagagtctgaagttttctttccgctttttcgagagatgaagaagcagcagatgacttattttctcgagcaacgtcgactgcgacatatcgatatcaatgacagcaaagcttgtgaagaggctgtcttgaagcgtgctgccaatgaggtgaagattaaagagatacagcaaacttactatcaaaagtttttgaaaatactccctgccaacaaggtgtttcgtattgtcaaggcagaaaaaaagtttcaccgccaactcatgcagcgacatgcacttaaatatttcaaaaagcgaaacgacaagcaataaataactatgcagcggtactttatctatttcagttacgacggtacctcgtaccacggttggcaacagcaacctaacagtcattctgttcaggcagaattacaaaaagcactgtcaacgattttgagagagcccattgttgttgtgggtgctggacgcacagatactggcgtgcatgcgcgaaaaatggtggcacactttgatttagagactgttattgatggcgaacaacttacctacaaactgaacagattcttgccacgagatatttcggtggcaggcgtgaagcccgttcaggcggatatgcacgcaaggtttagtgccaaatggcgaacatatcactattatgtacacaatcataaaaatccttttttgcgccattactcctgtcaacttccttttcagcttgattatgcactgatgaatcaggcagctaatcatttgttgagcgtgaccgactttggtgctttctgtaagacacacaccgatgtcaagaccacgctttgcgaggtggtgcgtgcagaatgggtacaaacaggagaggatagctggtactttgtgattaaagccaatcgctttctccgtaatatggtgcgtgctgttgtcggtacgttgattgaagtggggcggcatcgaatgactcttgagcagtttgatgcagtgattcggagcggtaatcgtagcaatgcaggcgagagcatgcctgctcatgcgctgtttttagaggagatagaatattaaagatgtggttgattttggcttttctctcggcttttctgctgggattttatgatgtatttaagaaagtttctttatcagataatgcagtgattcctgtgttgttttggaacacgcttttctcatcgctcctctttttaccttttattattttatctcattcaacaacttatttagacgataccattttccatgtttctaccgcagggtgggaagcacataagtttatcgtactcaagagtttcattgtgttagggtcgtgggtttgcggctattttgccatgaagcatctccctcttaccattgtgggtcctatcaacgctacacgtcccgtcatggtgttggtgggcgccatgttggtgtttggcgaaacgctcaatctctatcaatgggtgggtgtgctattggcaattacgtcgttcttccttttgagtagaacaggaaaaaaggaggggattgactttaagcataatctctggattgttttcttggtcatctctgccatcttgggagctgtgagtggactgtatgataaatttctgatgatgcctcgcagtgctggtgggttaggacttaatcaaatgatggttcagagttggtacaatgtttatcaatgcggattgatgggagtcatgttgatgttgttatggctgcccacccgaaaacgaaccaccacgtttcaatggcggtggacaattctcggcattagtctctttctttgtatggcagactttgtgtacttttatgcgctcagtcagcccgcagccttgatagctattgtctctatggtacgaagaggcagtgttatcgtgagttttctctttggcatcttcctttttcaagaaaagaatatcaaaggtaaggcaattgacctgttgttagtcttgttgggtttgattttcttatatatcggtagtcgagtatagcacaaatcacaacaaaactgtcaagtaaatttaggaaaagtacagcggatattccatggcgttactaacccatggagataagggcattaactcatggagataaggggcttataacaatgacttaagccctttaagtctatgagttaatcgcattaaaacaatgagttaatggggttggagcaatgggtgaatggctctgttcacgtgagatgaaaaaagcagctcaacaagttctgtttctctctattgtgacacataaaaaaaagttcgacaacttggtgctgtcgaactcttctatgaagattaaaagtagtttgttatagatagacgcatccattaaattttggatggtgcaattcttctttttattcctatttttgaatatttggtagttcaagtccataacccttcttcttgtctaaggctttgagcaagaaaccaagtatcagggcgatgacacctaaagagacgaatactaacataggagccgtatagtcatacttcaaagggtcggtgacaccagggttggacgaacgcagcaccgaaccgataatcattgggaaggcatacaagccgatgttctgaatccagaaaatcagtgcgtaggcagaaccaataagtttgtcatcgatgagctttggtacggagggccatagggcagcaggcactaacgagaaggatatacccaacaagataatggctgcatacgtgatgatgacactctgtgtagctggtaccacaaatgcaaagatgaggtgacagataatcatgagcattgctcctataatcaacatcgttgctccttttcctttgcggtcaaggaagttgcccaaaaatggcgtcactgctgccgctcccaatgggaagacaaagaaaacaagtcctgcctgttctgcactaaactgaaggttgcattgcagcatgtttatagcatacttttggaaagggaagatagctgagtagtataatacgcagagtaaggctacaatccagaacattttgagcgataatatcttgccaatgtcagaaaccttgaatgggtcgtctttctcttcttccacgccttgagcgtctaacttcttatccatgaacccataaacaatgaagcaaatcaaaccgataatcaataacagcagttcgtaagccaaaggacgtgacacgttaatgggtttgatagaagcgatagcaggggaggcgatgaccacaacggcaactcctacacgagcaattgccatttcaatacccatggctaaagccatttctttacccttaaaccacttaacgataccgcgcgaaacagtgattcctgccatctcggcaccgcaaccaaaaatcataaatccaatggcagaaagttttgcggaggctggcattccatcataaaatggggtgatgttccaagctgccaaaggtagattgaggttgttgtcaaaccaaactttgatactacttgcatcaaatccttctgtcagcgcataataattgatgcttgcacctaccaccatcactgttccagaaaggattgctgtaaagcgtacccccattttatcgaggatgatacctgcaaaaataaggaaaaatacaaatacattcaagaagggttcagaaccagcaaatcgaccgtatgcgatagggtcccaaccgtgttgtgtctgtaagaactcttgaagaggagacaggatgtcaacgaaaatgtaagcaaagaacatggcggatgccaacaatacaagtgctgtccagcgccatgcgggcgaatcactcagtttcttttgaaatgtttcaaccattgttgtgttttttttgagtttatgagttttaagttgataagttttctgttgctttgtaaacgtgttagaggacgtctatttcttaagccagcggtctaaccagttgaagaaagtacgctgccaaagaataccgttttgcggtttcaatacccagtgattctcgtcagggaagatgagtaactcggcaggaatgccacgtagacgagccgcattgaacgcgcccataccctgattggcattgatacgatagtccttttcgccatggatgcagaggataggagtatcccattggtctacaaacttatgcggactgttgtcgtaggtgcgtttggcattggctgtttggtctttattccaataagcatcttcgtactcccagttagagaaccatgcctcttcggtgtcggtgtacatgctttcaagattgaaagcgccatcgtgtgagatgaaacacttgaagcgtttgttgtgatgactggctaagtaataaaccgagaatccgccaaatgaagcacccactgcccctaatcggtctttgtctacataggggagatggttggcagcatcgtcgatggctgataaatagtctttcatacactgtcctgtccaatcgccagaaacctgcgcattccaatcagaaccaaagccgggtaaacctctacggttgggtgctacgatgatatagccgttggcagccatgatttgaagattccatcgataactccagaattgacttacaggactttgaggaccgccttcgcagaagaggagagtggggtatttcttattggcatcgaagtgtggaggcaagacaatccagctcaagaggtctttgccatctgaggttttgctccaacgttcttccacttttccaatggctaactggtcaaagatgtgcttgttttcatcggtcagctgtgttaccgttgcttgtttttcttttttcgaaggactcacaatgaataaatcatcggggtgagacatcgaatgtcgagtgactaataactgtttggtgttgcctaaggtttgtacacttccatagtcgtattgaccatcggtgagttgttttacctgtcctttcaggttggtttggtacacatgtgtcttaccgtgccatacaccaatgaagtaaagggttgtgttatcgtttccccagcaataagcatctacattgctgtcaaaactttccgtcacatattgtttaacgcctttctttaagtcgtagatacacaaacggttgcgatcgctttcataaccgttttgtttcatgctctgccaagcaatgtatttgccgtcggcagaaaaagaaggattggtgtcatagcccacattcatatcgccctgctgatgattaacagcttgatttttcattgatttcgttgcatcaatggcaggttcttgatatccttcgggcttgcaaagattgcgagtcttgcccgtagtgatgtcatacaggtaaatatctgtgtcggtagagatggcatattgcacgccttcttttttacgacaggtataagcaatctgttttgagtcaggactccaagccaactgttctacaccaccaaagggagcagtaggacattcgaaaggctcatcttgtaagatgtctttgccctcatcaacgccattttcggtcacgttggcaacaaatgggtgtgcaatgctttccacatagtggtcccaatggcgatagttcatgtccgtagccaagcgacccgttgccaatggcaggtcggcaggattggcttttatggttccgtgataaggaagagactttatcaaaatcacctttttttcatcgggtgagaacttaaatccttcaatatcaacagtgctattcgttatttttttccgatttgagccatcaggattcatggtccatagctgtccacctgtgaggaaagctatctttttgccttgttgaatccacaccgcatcggtttcgcttttactgccagtagtgagttgagttttatgacttcccttgacatctgtcacgaaaagcatctgttggctgttgttgttttttacgctataatagcccacttgatagacaacttggttgccgtcgggcgaggaggatgcccctcccattcgtcccattgcccacaatgcctccggtgtcatgaggtcattagttgccttgaaggcggcattttgttctttcgctgttttcactgtgctttgtgctttagcaaaactgccgcctatcatcaaagcgacagttgccataaggagtgtttttttgttcatactatattagagtttacgtttctttctttccaattcttcgcgtttgcgttgcatttcttgctgttgttcttgcattgcttgcaaacgtgcagcaagcccacttaacttctttggattagctttgttctcctcgtagcgtgcttccaaaatttgaagtagtttcgcatcgttagtcgttttacgcaaggtccacataatggcagcactaaagaagagcgatacgaaatagtagaagtttaatcccgctgaatagtcattgaacataaagaagaacatcacgggcatgagatacatcatccattgcatcatcttcatttgttcagcctgctgacctaccatttgatcgcgctgttggcgcatggtcatccaactgtaaagaacgttggcaatacagaagaggatacaggtgagtgagagatggtcgcctatcaaccaaatgtttttgttccattgaataatggggtcgtaggtacttaaatcgttaatccacaagaaactttcgcctcggagttgaatagcatttggcacaaagttaaacatggcaatccaaataggcatctgaatgagcatcgggagacagccagaaagaggactgacaccatatttagaatattctgccatcattgcttgttgcttctgcatctggtcttcaggcttgttatattgtgccgttgcagcctcgagtttgggttttaacacgcgcatcttggcagaactcatataactcttcttgaccattgggtaggtaatgagctttaacaaaagcgtaatcagtataagtaccacacccatggggaaccacttggaaagccaatcaaatacataaatggtaaaccaacggttgataatgcggaacaaaggccaacctaagtaaaccaatctttgtaactcaaggtctttattgaatgtactttctttttcaatgcgattgagcaaacggaagtcattaggtccgaaatagaattcaaactcagacgctttctgtcctgatgggtcaaagaaagtttgcatttttgcctgatatgcctttagatatccactgcctttctcctgtggcacactggtcatcagtgcctcttcgctaaagtcatgcttggcaatcatgacagctgagaagaattggttcttgaaagcgacccaatctatcttgtcatcaatctttttgtctatctcttctgaagtctcactcagtttcttagttccccccttcaccttgtggtaagtgagggtagcgtagcgattttcgaaggtaaatcctttttcttgttgtcggcatttgtctgtccaatcaacaatcatggattttgtttgaggtgcaaacaagccgttcatgccattcactttcatggacatgtgcaaaagataatctgcacccaagcgatattgtatcacgagagacttgccttgtcctgcctcggctgtcagcgtaagggtagagtctgtctgtgcggaaggactgaagtagaggtcttgcgttgcaatgtttgcctctttcgtcgacatgatgaagtttagtttttgaactttatcgtcgaacaaaataacgtcaggattgtcctctctgtccttaaagtttttgatgattgctttgcttacggttcctccttttgtgttgacagacaattcaaggtgttcgtttttcaagacaacctcttgtgcttgaccctccaaggcagcatgaaataaagcggtggtgtccgccttttgtttggcttttaagtcagctatttctttggcgtgtgcttgttgtttagcgagttctgcttggtgttgagtgactgcggcaatggagtcttgctgcatcttctttgcttgctcttctgcagagggttgagaccaccaactaaaacctattaacaagagtcccataagaacgagacccgtcatcgtatttttatccatttctaattatttcttctgattttcaattgctgattttatgaaatcaacaaataaggggtgtgggttaagaactgtactttgatactctggatggaattgtgtgccaatataccacttcaaactcggtatttctacaatctcaactaaatcactttcagggtttttacccacgcacatcattcccgctttctcgtattcttttaagaaagagttgttgaattcaaaacggtgtcgatgtctttcttgaatatattcctgtttataaatattgaagacgcgcgaaccttgtttgagcacgcattcgtatgaccccaatcgcatggtacctcccatgttggtgatgttcttttgttcttccatgatgtcgatgacattgtgttctgtcttctcatccatttcacggctgttggcatcgggataacccaatacattgcgtgcaaactctatcaccatcatctgcatacctaagcaaataccgaaggtggggatgtcgtgtgtcctcgtatagtgagccgcaatgattttcccttcaatgccgcgttgcccaaatccgggacatatcacaataccgtcttgtcctttaagcatttctgcaacattgttctcgttaatcttttccgagttgataaacgtcagtatcgtcttgtggtcgttataggttcctgcttgcgacaggctctctcgtatgcttttataggcgtcttgtaaatcgtacttgcctaccaatccaatatgaacctctttctttgccttgtttctgcgttccaagaaactcttccaaggacccaaagttggcgtctcgtttactgctattcccatctttttcaagatagctacgtccaacttttggttttgcatattgacgggaacttcgtagatactgggcaagtcttcactctgaataacgcaatcgaaatcgacattacagaaagatgccactttgtgtaacacatcatctttcagatgtttctccgtacgaagtactaaaatatccggttgaatacctatgctttggagttccttgacactatgttgcgtgggcttggttttcagttctccagcggctttcaaataaggtacataagttaggtgtacgctcaaggcgtttttacccaattcccatttcaattggcgaatggcttctaagaacggtgtagactcaatatcgcccaccgtaccaccgatttcggtaatgacaaaatcgtaatggaacttctgtcccatgagtttcacattgcgcttaatctcgtcagtgatatgaggaactacttggatggttttgcctaaatagtcgccacggcgttctttatcaataacagctttgtaaattctgcccgttgtcagcgagtttgcttttgttgtttttatccctgtaaaccgttcgtagtgtcctaagtctaagtcggtttccataccatccgttgttacatagcattctccatgctcgtaagggtttaacgttcccgggtcaatattgatgtaaggatcaaatttttgaatggtaatattgtaacctcttgcttgtaaaagctttccaatagatgatgaaataatcccttttcctaatgatgagaccacaccacctgtaacgaatatatactttgtttcagccacgatacgttgttttatttgtgatatgacataaaaatacaaggtgcaaagttagtataaaattgcgaaacatacaagcaactttcattttttattattacctttgcatgcatcaaaaacgaatatgaaaatgaaacttatcagcacattcatgatgatcatgataccgatggttttatctgccaacgaaccagttggtcgtaaggtgataaaacatccgtcagacaccaccaccacctttgtgaaagcttatactgattctttgcatcattatcaacagcagctcgattccttgcaacgtatcaatgcgcttttgtatcatcgactcgcacaagaaaatggtaaatatgctcgattgtttctgcctaccactttttatcaccagataagtcaacatcagtttagtttatcaaaagactcgctgacctcttctatgttcaacgaggctttggagaatgcgttgctccatatctacctgaagcggccggatttggtcaccaagacacaaacacagctaaaagcggaagggaaagtgtctaccagtcaagaaacgacgcttaaaaataaaaccgctattgttgaaaagatggctcctttacctacggaggaagtgtatgtaccagtagatttggtgataaagaaacctaacttttggagcttttcgggcgatggttatttacagtttttgcaaaactacgtatcgggcaactggtataagggaggcgagagcaactattccatgctcggcaatgtgaccctcaatcttggctataacaacaagaaaaagataaagtgggataacaagttagagatgaaattgggtttccaaacctctgaaagtgatacattgcacacgctaaagacgcataccgatgatatccgatataccagtaacttcggtttgcaggcgactaaaaattggtattattctttacagatgatagccagcacgcagttcatgcgaggctatcgcaacaacgatgaaaaggtttattctgatttcctgtcccctttgaacatcgaccttgcggtcggtatgcgatataatttcgactggtttaagggacgtttgaagggtagtgtgaacctctcgcccttggcttatcattatcgttatgtggctcgtgagcatttggtgacgcgctttggtattgaaaaaggcaagcaccatgtggacgattacggttccagtatgaacattgatttcaactggaagttctcagaaatggtgcgatggcgttcacgtctatacggttacacctcgtataagcgctctgaaatagaatgggaaaatacattcaccttccagtttaccaagtatttatctgccaacttgtatgtctatccacgctttgatgatagtcgcaagcgtgatgacacgaacggatatttcatgtataaagagtatttgtcgattggtttgtctcattcgttctaataagttccgacaacaaaactccctcattcgttgctttgatggcaacaagaaggctccttcagtgaaggagctatttttaaggctggttctataaattagctttgttagattttgagcttatttttgaggtcaaaatgcaagagagtgaaggagtgtagcgagctacacgactgaacgaacttacattttgaaccaaaaagaagccaaaagataacaaaacgtatttcataaacatttaatgactatgttcggtggtaatttatagaactagcctttacccaatgaggaagctgtcgttgttccaaagaaaaagcactttcttcactctattggcttataaatcagagtttttatgtaattttgcacccaaaataatgacaacgacaatgacagaacagcaatcctctcatcaccaacatgcgatggaacatcaccacagcacagagcatcatcaccaccataggaaacatcctcagttccaaaacaaccatgcgatgcggaaaaaacgtaggaagatggcgagcaacgtattgttcttttcgctttgcatcgttgctgcactcatcatgatggcagtcatttggatgtacaccgctgagtagcagagcagacagaaaacataaaaggctggttctataaattaccaccgcacatagtcattaaatgtttatgaaatacgttttgttatcttttggcttctttttggttcaaaatgtaagttcgttcagtcgtgtagctcgctacactccttcactctcttgcattttgacctcaaaaataagctcaaaatctaacaaagctaatttatagaaccagccaaaaaggcgtttcgagtattgtactcgaaacgccttttatgctaagggatgtcccaaaagtgggacacccgttgtaggatttagcaaactttctctaatcgcttcatcacagagaacatgaacaaagcagagagtaagcagactccaatgaatacagaccaaaccgcccatacaggtaaatcaccccaaagatatccacctacgctcaccaacaagttaccaatggcggtagcagcaaaccatccacccatcatggctcccttgagtttaggaggtgcaaccttgctcacaaagctgatacccataggactcaacagcaattcaccaaacgtcagcactaaataagtactaatcaaccaattggcagatgcgtagctggctgttccagcctcagcagccaacgcctgttcattaggagtaagcaagccttgtgaaccaacaatcatgatggtataggccgatgcagcaatcaccataccgtaggctatcttgcgtggagccgaaggttctttgcccttggcagccaatgcaccgaagattgccatgctgactggtgtcaacgcaactacatagaagggattgaactgttggaagataggtgcactcacatcaatcgctccttctacttgtgtgtacttataaatcaatacaccaattgatgctaagatgacagctaacgaaattcccttagctttctgtgtttttgactggaagaatgaaaatcctgcataaacgataaagacaatcatcacaaggtttactacatcgaaagccatgctctgaacaccagaagaagtcttttgagtaaactcgttagcaaagtaagtcagggtgagtccgttctggtggaatgacatccagaagaaaataaccactgcaaacaccaacattagtgccactactctatcctttacatccttcttgctcaactcttcggtctcgatagcttgaccatcgtctgtcttggctgccgtgccatttccttccacatgacggaacgttgaacggaaaccgtaataaatagccatagaaataatcaaagatatacatgctacggcgaaggagaaatggtaagcatcgttctcagcataaccaacagattctgcccactccttaatgcgtacggctgccgttggtgcaaacaaagcaccaatgttaatagccatatagaagatggagaaagctgaatcgcgcttgtcggcatacttcggatcatcgtaaaggttacctaccattacttgcaagttacccttaaacaagcctgtaccaaagctgatgaacagcaaagccagcaacattaccaagagcgcaaacgtctcaccgcccaacgggatggataagaataggtagcccaagaacatcaccacgataccaatggtgaccatcttgccaaaaccaaacttgtcggcaagcacaccacccaccaatgggaggaagtaaaccagtccaaggaacacactgtaaatcataccagccgtaccaggatctaatccaaagttagctcttaaaaacaatacaaacacggcaatcatggtgtaataaccgaatctctcgccagtgttggccaatgccaaagcaaaaaggcctttaggttgattttcaaacatagtttattaattatttagttgttgtagtaatatcaaacaaataggacagtcttaactgaatattcgacagattagatctggcaaaataatcgcgcttcgtgtccccgtataggttccctaatccaaagtaataccgagcatctaagagcagatgccccaccttaggcaacgaatattccactccgatacctgccacaataccataatcaaacttgtgctccacgggcatcttgtattgggtcgtctcggtattggctctgtcttgcacgttcgcctgattgagttcaaagttcatttgggtgctttcattcagcatatagccaaattgtggacctgcttgaaagaagaactgaaagcctcgttgttcttttccccaagccaaatgtgcgaagacgggtacttgtatataattaatggtgcggctgtattcctccgccaaaccagtgttcttattgagtactggctcgttttgaagattcacaatgtcttctttccaaccagcttgcacataattgatttccgcatgaatagaacaaagggtttgaaaatatttctcagagatataccgaaaagacacgcctcccgtcatccctccatgaaacgtttgcgtcactttgggcacaaacccgacattgctcagcacataacctccattcacacctacggcaaactcgttgcgatgactccctacctgcgccgtaaggagcagcgggtaaaacaataaaaagagggaaagaagtggatgtttcattttttacgctaacacatggtttgtagtagaaaggcttaatacgagatgctctctatccctccgttactcttaaagtgaatcaacatgaacgtggagttctgccatccagccttttttatgcgtcgaaagtccaaaggagtctgtaaggcggtataggagttttgttttttcagtcctgaaaaggctttcccatattggtgcaatccacgacaaaagaattgtgcatggtcgtaacctgtcaaggcaaatcgtggaatggcgtattgcatttcttctttgaaccacagacgatacttttgctcaaactgcatggtttgtggagagagcgcattataatacgccacggtaggtatataggtggggtatttgcagaagtattcgaaatatactttggtgtacatcaaccactctgtatagccaaacaacgacaccgacagtgtaggattggctgccttcagtccatctatctttgccaacgccacgtttaactcgggcgatttacctgtattcagcaccaccacattgggtttcgacaaggtaaacgatttggcgaactgttcctcgctggatttcaagttcgtgatgttataagcgattttcttatcctctaattgtttccgtaacgtgaaagtaaagatgcctttctgactatctcgatcgttgcaatcgatgaacacaggatgatagttggggaaacggttgaggaaagcatgaatggcatcttcattcagttggtcggcagactgataaacttggtagacctgtggattggttgccacttccccactctcaatagagaaaggaattaccagcttgataccaaagcgtttgcagaagtcacccaagtgggcaacctgcttggtgtacaagggaccaaagataatgtcgcaccgttgcgcattcacatctaagagtgtttggcgaatgtcggcatcaatgggcacattccacgcatacacatcggaggagatgccttgacgcttcaagtcgtcacacgccaacagcaaaccgcgatagtattctaccattctgcgaccatcaccgtctacgttgtgcaaaggcaacatcactcctatgcgaatggcacgcttggtaatgtctaactcttttcccttgaccagttgtgtggtgacaggttgattcttgtctgtcttgggtacaacggggactgcattgggtttcttccccttttcgaacggaataaacacggtgtcacctttctttaactcatatccctccactttcatttctgggttagcatccattaaatcgggaacggaaatgccatattttcgggcaatcccaaagacggtgtctttcttttttgcctcgtagatgtctcgccactgatttacttgcgctgtggcttcaagacaaaacaagagtgttaataataagactatatagttaaagattggtttcatgtcacaaattgtctttttctgtttcatttgcaaatttacaaaaaaatctctaatcgctcctctttaatcatgaatcttttagtatctttgcaaagatagaaagctccaagctttcaattttcgtatagtaaggtgcagtatagcaccacattggacaaacaaaacaacggaatgaaaataaaattcattatttctacactgacgcttttattcccactcctcctttctgctcaagagcaacccaccattaacccgcatgctgtttatttttcagaaaagggtgagcccagtgagccaacaacttctatcagcggttcggctccattacgggtgttactgacagcgaacgagagccatacagcaggatggacagcttactacgagtggagaattaccttagaaagagaaaaagctccttaccttgttcgttatgagaaagatacagaggtgcgctttaccaaagctggtgcgcatcgcatcgtactgtatgccatcttcacccaaggtcaggactcggtgaaatatacccaagagtattgggcagatgcacaacctatcaccgtgtctatctcggaaagcaagctggagatgcccaacgccttttcgcccaatggcgatggcatcaacgatgtttacaaagccaaagagggctggcaaagcatcatagagtttaagggttacatctttaataggtggggacagaagctctttgaatggcataatcctgccgaggggtgggacggaaagtaccaaggcaaagacgtgaagcaaggcgtttacttttgcttggtcaaggcaaaaggtgccgatggacaggtgttcaacatcaagacggatgtcaacctgctgcgcacctaccaaccatgaaattaaaaagaaagaagaaccatcaacctctcaaaagaaagcaaactactcatgcctcgcgaagacgataaaatcaatatatttggtgcgcgcgtgcacaatcttaaaaacatagatgtagaaattccgcgaaatgcccttactgttattacgggcttgtcgggctcgggcaaatcatctttggcgttcgacaccatctttgcagaaggtcaacgaagatacatcgaaaccttctctgcctacgcacgcaacttcctcggaaacatggaacgacccgatgtagacaaaatcacgggactgtctccggtcatcagtatagagcagaaaaccaccaacaaaaatccacgttctacggtaggtacgactaccgaaatatacgactacctgcgcctactctttgcacgtgctggcacagcctatagctacatgacgggcgaaaagatggtgaaatacaccgaggagaaagtcattgacatgattttgcacgattatgccgacaaaaaaatattcatcttatcgcccttggttaagcagcgaaaggggcattatcgtgaacttttcgagagtatgaggcgcaaaggctacctctacatgcgagtggacggagagataaaagaggtggtgcgcggcatgaaggtagaccgatacaagaaccacaatattgaggtagtgattgataagctacaggtgcgaggaaatgacgacgaacgattgaagaagaccatacagatagccatgaagcaaggcgacggggttatcatgattatggagaaagactcgggaattattcgcaatttttccaaacggctcatggaccctgtcagtggcatttcgtacggtgaacccgcacccaacatcttctcttttaactcaccagaaggagcttgtccacattgtaaaggcttgggaacagtcaacgaaatcgacttgaaaaaggtcatacccaatgacaacctcagcatttatgagggtgctattgtgcccttgggtaaatacaaaaaacaaatgatattttggcaaatcgatgccattttgcatcgatatgacctgaacatcaaaacgccatttcgagaaattccacaggaagcggtagacgaaatattgtatggcagtttagagaatattaaaatagccaaggaattggtacacaccagcagcgattattttgtgaccttcgacggtatcatcaaatatttacgcaccgtcatggagaacgatgactcgagtgcagggcaaaagtgggctgaccagtttttggctacaaccacctgtcccgaatgcaacggcatgcgactgaaacgtgagtcgctctcctatcgcattggtaacgagaatatagcacaggtcgccaacttggacatgagtgagctaaaggactggctcgaacatgcggaaactcatttggatgagcagcaaaaagtgattgctgccgagattatcaaggaattacaaactcgtgtgagcttcttacttgaagtgggtctcaactatttatcgctcaatcgacagtcggcttcactgtcgggaggcgagagccagcgcattcgattggctacgcagataggttcgcaactggtcaatgtgctgtacatccttgacgaacccagcatcgggttgcatcaaagagataacgaacggctcattcgttcgttaaaggagctgcgagatctcggcaactcggtcatcgtggtagaacacgacaaggatatgatgttggcagccgactacatcgtagacattggaccaaaggcaggacgcaaagggggtgaggtggtatttcaaggcactccacaacaaatgcttcgaaaatctaccattacagccgattacctcaacggcaaacgcagcattgagattccccctaaacggcgcaaaggaaacggcaagagcatttggctgaaaggggcaaggggcaacaatttgaaagatgtagaggtggagtttccgctcggaaaactcattgtcgtgacgggagtgtctggctctggcaagtctaccctcatcaacgaaacgctgcagcccatcttgtcgaaacatttttatcgttcattgaagaaaccgatgccgtacgattcaatagagggtatcgataatattgacaaggtagtcaatgtcgatcaaagtccattggggcgtacaccgcgcagcaatccagccacttatactggcgtgttcagcgacattcgatccctgttcgtcaaccttcccgaggcaaaaatacggggttacaaacctggacgcttttcattcaatgttaaaggtgggcgatgtgaggcttgtaatggcaatggctacaagaccattgaaatgaatttcctgcccgatgtcatggtgccatgcgaggtatgccatggcaaacgctacaaccgcgagacactcgaagtgagatataagggcaaaagtattgccgacgtgctggatatgacgatcaatcaagctgtggagttcttcgacaccgtacctaatattcttcacaaaataaaaacaattcaagatgttggtttaggctacatcaaattaggacaaccctccacaaccctttcgggcggtgagagtcagcgggtgaagttagctaccgaactctcgaagcgtgacacaggaaagacattatacatccttgatgagccaaccactggactgcacttcgaggacatccgcatcttgatgaatgtgctgcaacaattagtggatcgtggcaacacggtggtgataatcgaacataacttagatgtcatcaaactggctgattacattattgatatgggaccagagggaggaagtggcggtggaaaagttttaagtacaggaactcccgaagaaatagcgcaaagcaaggagggctatacccctcgttttttgaaagaagaactaaaactaacaagaaaaaagaagtaaagctctatcttcctcttttattgaagtaatgagtgaaggcagttatctacagtggatgaccgccttcactctttgttatagctacctcaattcatggctcagtagaaaatcaatggggataggcatatagttttgcaattctgaataagaagaacttcttgtctgccactcctcttagattggctcggaaaagtttaattttggcattgaacgattctgccatggcattcgaagatctgttgttatagaagttcaatatctcatcataatgctcgtaaaatgtggcagcaatcacattgaatgaatggaagtctgcctcttcaactttattgtaccaccgtgccatggagagcctggctgcatccttgatggtgttcttggcgaagatcatgcgcagtgagtggcacagtccgtatgccttttggatgtctggatattgttcaaaaagaattttagcacgcagtttctgccgctcagtccatttgttagcggccttgaagagtagatatcttgacctggcgagaagctcctttcctgtatctccgttggcgtatctgtatggtttgtatggcttgtcgcagagtttagcttcctccatctcgtcgtttgcctgctgtatggcatcccagcgatgtttgatgcgcaactcctgtacggcatcgcatgctaacttctgtacatggaacctgtcgataacacgcttggcattgggaaatgaacttttgacgattttgcgcatggagtctgacaggtccagggtgacttcctcaacagaggagcgtttgtcctcatcaatcctatccagcaccgctatgacatcttccgactttgttcctgcaactactgctacaaggcttccttcccgtgtccttgccgcacggttggtcacaaaagtgtacagctcgccgttggacagtgaggtctcgtcaatggcctgggaaggcccgatgttgtcaggaaagagcagccactcgtcggcatgttctatctggtcccattggcgaaagccgctcaggacttctttatattgtttctcaaatgtgtgtccgtcaatatgatagaaatcttcaagcgtacggcaagtcactggggaagtctccatacgtttcttttaaaaaagctccaaattccttggagtaacgggtgccctgagctaccatgtctaaagcgatgggaagggtaaaactcttgcccgtgcgcaaatccgtccatcgtctgcgacgaattttcaagatcaccttatggtctcgaatagggaagtctgttatattaactgcctccatgaaccccttggactcgaagttggcatcacctgacaaagtcttgtccatacgttcgtcaagactaatatgaaactcaggtccaacctcgcagacagaaacgatagtaaaataagacctatagctcattttgcaggctgaaaagtgtcatgccattcgatatatacacatgtttcgcccattcaagataccttcagcactaaattgacgattcacattgctcaatagctcattttgcaggctgagacataggtgtctttccgatgtatactaactttatgggcatttaagttgcccaaaaattcaaagttagtatgttcaaaatgagatgtcgtgcgtgtggtagtacgcacacgaaaaagaatggtgttcgcaaaggtgtacaactgtataaatgtcaggattgcggctatcagtttcgctccggtttccaagtgagcgatgatgaattgtggactgcttatcaacaacagaagcagacgatcaatgaactatcggtacgcttcaggataagcctctctacggtcaagcgtaggttgcatgacatcaagtgtgagtgggtgcaacctccactaaacggaagcgattttgtccatctgaacgtaacgtattgggggcgaaacttcggtgtgctgctcgcattggatacggagagcggaaagcctctctatctgtcctttgtaaagagcgagacagtgaaggactatgaagacgcagtcgtcagtattgagaagcgtggatatgtcatacgcggtctaattattgacgggaaaaagagcctcttcaagtctttctctgagtaccatgtacagatgtgccagttccacatgaagcagattgtcagaaggtatcttacgcagaatccgagaatgctggccagccgggatttaaaggctcttgtggacaggctgcatcgaatccacgaggctgatttcaggagcgaatatcaagcatggaaggaaaagtggaagggtacgatagaacaccgcagccagcacaaggacggcaggctgcattatacgcaccgatggttgaggtcagtcatgaacagccttgatttctacttgccttatctctttacctgccagcgggaggactgccgaggaatgcccaatactaacaacaagattaagggaacattcactgacctgaagaaaaacttgaacaatcatagcggacttatacaagagaatcgcaaaaggttcatcaatgggtttttcttggcattgatagaaactcaaagtatgaaaaagcaggaaccacacccatagtggatcctgctcatacttgtcgttttatacaatcctattcctcatggagttgctccccagcagagccccattatgcttcagactgcatggcaaaggtatataaactctttggatattctgaataaagccagcctgcaatttgagctattgaacacctaatacaaaaaacagcctgcaaaatgagctatacgcctaaaataatctaatatttgagaaggcaaaacaagagttgccaaagtacgtaacattttttcttccatgatgcgaaggtcggaattattaagataaataacaaattattcccccattgattttctactgagcccaattcattactacaacaaagctggcaattgttcgcagcgtttttaatatcgctacacctcaacaaaaatatcctccgcctgacgtgtaaagaacacaattcagacggaggatgttttgtatcattttatatcttagaacgctaccgaagccgcatgtatccagtcgaacaccatgtagcacacgccaaacaacactacaccggctgtgcatacagccaatgccaacttggtattggtgtggctcttgaacgtgggcaacggattttcacttttcttaatgtacatcgccttcacaatcaagaggtagtaatacaaggagatgaccgtattgattaacgcaacaaacaacacgatgtatgcccatgcccctactgaagtacttagatcagcatcctgcacggctgccataaagataaagaacttagagaacattcccgcaaacggtggaataccgcccaaggagaacaatgccaaggtcataaggaacgccagcttagggttggtttgataaaagccattgtaactgtccatcatcaccgtaccgttgttatgttcctctaccgcactgataatggtaaacactgccatgttggctaccacgtaaatcatcacatagaagctcaatgcagtaacgctcaacgctgagttcccaacaatcgccaagacaatataacctgcctgagagatagaactgaacgccatgaagcgtttcaggttggtttgacgaatggcgaacaagttggctaccgtgattgacaatacaatgacgatgtacaacaaatattgccaatagagaaccataggggcaaatactttcatcaagatagtgcaaagagcaaaagctgctgcacctttactcactaccgaaagatagcccgtaacggtggttggcgcaccttggtatgagtcggctgtccagaaatggaaaggcaccaagctaattttaaagcccaatccgctgaaaaagaacaccatgccaagaatggtaaacggtgtagcagttagctgtgtagcaatgtcttcaaagtaaagcgtgcctaccgcaccatagataaagctgataccgtagagcatcaccccgcttgagaaggtggctgtcaatatgaacttggctcctgcttcggctgaatcgtgacgatatttgtcaaacgcaaccaaacaagccataggtacactcgccatttccaagcctaagaaaaagagcaagaagtggttggcactcaccatcatattcattcccaacagcgttgctatcaccaataagtaaaactctccctccttaaaagcggtatcgggacgtgacaaccattcttttgactgaatgagaacgataagcgttccaaaagccaaaatggtctttatcaccccaatagcaggcgtagcgatgtacattcccccaaaaacagtgtgtgtctcaatggggaacaggttgatgaggatgtgggcaaacataagcagacaaatcatgggattgaaccatgagcgacgcttgtcagtgggcgcaagcgtcctaatcttctgcgatgtggcaaagtcggcaacaaacgtaaccaggaaaagcaccactaaggtgacctctggcatcatatataggaattgactgtaattcatcttcttctaaactttagtgtattatattgagtaggataggtcctacggcatcattgatgacattgcttgcccacagaggtgcgatacctaagccagctacacagaatatcaaacacatcacagccacacgctcgtcccatgtagcatcagtgagttgctcaaaatgaggattggctaccttctgataaagtatctttccaacaacacgcaagatataaactgcggtgacaacaatggaggtacaagcaataatagtagctgtgcggtggaaagtgtcgttgttggcaaacgagcctacaaagatagtcatctccgcaacgaagcccgagaaaccaggtaatcccaagttcgccaaacctgccactacatatcccacgcccaagaaaggcatgattttcatcaatccacccaactgacggacatcacgtgtatgcgtacgtccgtaaatcataccaatgagtgcaaagaacaaggcggtcatcaaaccgtgcgagagcatttggagaatggcacccgtacatgcggttttggtcatcatcaacagtgcgaacaacaccaaaccacagtgacttaccgaagaataggcgttgatatatttcaagtcggtttgcacacaagccgagagagcaccatagacaacagagatggtagtgaggataaggaagatccaagccaactcttgtgccgcctcgggcaacaagaacatggcgatgcggaaacagccgtagcctcccaacttcatcaacacgccagcatggagcatagagacagcggtgggtgcagaagcatgtccatcgggtgaccatgtgtggaagggaaacaaagcgcctaacacaccgaagccaatgaatatcaatgggaaaaatattttctgaacatcaacagggatattgtgcagggcagcaatctcaagcacgttcatcgtggtggctccactatagaaataaatgcctaagataccgataatcagcaaggcacttccacccatgagcatcagcgtcaacttcatagcggcatattcttttggaccactaccccatacacctataagcagatacatcgggataagtgccacctcatagaacatgaacatggtaaataaatcgatagagataaagaaaccaaacacaccaatgctcaacaaggtgaaccaaaggaagtattctttagtcatgggcttgagctgccaagaggcaaaggtacccgtaaagacgatgatactcgataagagcaacatgacaaccgagataccatccactcctaccgtgtaggcaatgttgagcggtttgaaccaaggtgcactgtacataaacagcatggcttcggtatttcctgcctgacgcatttggataaatgcaatagtaagccaaacagagagtgccagcaaagcggtagagccagccaccatgacaccacgtacttgacgaatgttgcgagccaaccaaagcccgaacaacatcaagacgggaataacgacgaataatgttaatatactcatttttgtattttattcattaaatctttctaactaaagcattacaacaagcaaatcaatgctaacgtcaatgctacactacctgtaaggaaccaaatggcgtattgtctcacatcgccactctgccaaggtcggatgctttcgcctgcctcttgagtaccccatgccaagaagttaaagaagccatcaatgacatgacggtcgaaccaagcaatagggcgactgacacaacggaagataattttgtgtgtcacgaactgccaaacctcgtccatatagaaacgtttgtaagcagcgcggtgcaaggttgggaaagtacttgccaacttgtctgccactggcgttttctctcctttatacataaaggtggcaagaccgatggcaagcaatgccaatacggtactggtaatcgccaccgaccagttggtatgcgtattaaacccaatgccgttggcagacaccagctgtcctgcacgtgtcccccaaaggaagacggtacaagtaatgagcgacaagaatatcaacggaaaggtcatcactgcaggagcttcgtgaggcgcatgcacgttgggttcaccctgatgcgactcgtaatagctcttgccccaaaagataacataatacaaacggaacatatagaaggcggtcatcatagcaataccgctcatcaccattcccatgacggggtgaaagttgtaacaagccaccaatatctcatcctttgagtagaatcctgagaaaggtggaatgcccgaaatcgcaagacatgaaatcaagaacgtaatgtgggtaatgggcatgtacttgcgaagtcctcccatataatacttctcattggagtgtacggcatgaatcacacaacctgcacccaagaacaaacaagccttgaacatggcatgcgtaaacagatggaacatgcttgccatatatcctaagccttgtacgtcggcatattcttcagtcattgctaccgcacctgtggtaggatcgggcaagcaaacgcccaaggcaacgagcataaaacctatctgcgaaatggttgagaatgctaagacacgcttgatgtcactctgtgcacatgccacggcagccgcataaaaggcggtaaaggcagcaatataagcaatccagtgcaactgttcgggcgcatattccacgaacaaggggaacatacttgccaccaaatacacacctgccaccaccatcgtagcagcgtgaatcaatgccgaaacgggcgtcggaccctccatagcgtcgggcaaccaaatatgtaaagggaacatggctgatttacctgcaccaccaataaacatcaggaacagagctaacggcattacccaagcggcatgagcagcatgagttgccaattctggtgtagcagttaaatcgtaattgaatgtacctacatagaagctataaaacaagataccgattaaaaagaacaaatcggcaaagcgtgtcacaatgaaggctttcttagaagctgccacggctgtgtgcataggataatagaaaccaatgagcaggtaagaactaacgcccaccaactcccaaaacaaatacatctggaaaatattggttgccactaccaagcccaacattgacatggtgaagagcgaaaggaaagcgtaataacgctgaaaacctttctctccgtgcatatagccaaaggaatagatgtgcaccatgaaactgaccgtagagataaccactaacatcattacagaaataggtgtcaacctaaaaccgatgttaaaggtaagcagttcggtaaacttcaaccacgtaatattaaaaggtgtaatggtgggatataatccgtcaacgccacgcccaacgcctataaaatactcataagcggtgtagcaagagagacagaacaccgtaccaagcaccacggtgccaatgagtccagccaccttatgactcatcttcatacccaacagtccaagtatcaggaaactgagtgcaggtagaagaagtattaaatatacataactgtaatccatcatcttataatttcatattttcaatactgttcacctgatcactaccaaagtttcggtaaacgtttataataatggcaatcgccaccgctgtctcggcagcactgatgccaatggagaacaacgtgaagaaaaaaccctccaactgttcggggaacaggatgcgattaaacacggcaaagttgatatctgcggagttaagaaccaactctacagagattaacattgccaataaattacgacgggtaacgaaaccaaatacgccaataaaaaacaatagcgcactcagacctatcaaacattcaacgggtatcatttatcatcctcctttctggcaatcaacaaaccgccaatgatacatgccaacaagaacacggaaatgagttcaaagggcaaaacatactgatatttttcagagcctaccaatgcttgtccgatgacattcatcgggacttctgcatcagcaacctgcgttgcttgatgtataaactggttcttcaccaagacacctatcacggtagccagtcctatcaatgagagcaaagccccctgaattacacgtgaacctttgagatgttctactaatccttggagcgtacgcttggataccaactgtattgcaaagatatagagtatcgtgatgccccctgcataaatagcaatctgtgctgctcccaaatatgtatatcctaaaaggaaatagatacctgcaacaccaaataaaacaaatatcagaaaggtagccgcccgcataatcctttttgttagtacacacataatggcagagcccaaaatgacgactgccaaaatgcaaaacatgattaaattagccatatacgttactacttttatttggttttggtattaaattgtccaatggtcagcggtgcccctccgtctatcaagcttggcaaacttccgccttgatacacttccttgtcaaggtgcatggtcaaggaatctcgctcaaacacactgttttcaaagtcgttggtaaactcaatggcgttgaagttacaagaattgacacagagttggcagaacatacagtcgcctaatttgtactgatagtctaccaattgtttctttttcttgcccgtctcttcgttgacaaccatttcactcttaatgagtatggtctcattgggacatgctttctcgcacatagtgcacgctacacagttgtgagtgccatcttcgttacgcttaaacactaagcgtccgcggtgacgttgagccacatgcagtgtcgtcttgcgattctctggatattgttcggtgctcttgggggtgaagtattccttcaaggtaaccctcaaacccgttagaagcgacttgatagcataccagatttcgctaaaatatgattgtttattttccatcttactgaatcttcaagaaatgaaacgatttaaccgtggataccaaaagccacacaaatggtcatcagtatgagattaaccaatgccaatggcatgagatacttccactctaatgttaagatttggtcaattctcaaacgtgggaacgtccagcgaatccacatcagaagccaaactacgacaaaggtcttgcctaagaaccacacaatgccaggaatataattcatcaccgcatcgaagccttcgataccaatattgaagggtgcccaaccgcctaagaacacggcagttgctaatcctgcgatgacaaataaattgaggtattctgccaaatagtagaaaccaaaacccatacccgaatactctgtatgatatccagcggtcaactcgctctctgcctctgccaagtcaaacggtccacggttcgcttcagcattaccagctaccaagaacaacaagaatgcaatgatagcaggaagatgtcctttgatgattaaccagttccatggtcctgtctgtgcttccacaattccactcatctgcatcgttccagtcaaggcaacagccgcaatgagggtcagtcccaaggtcatttcatacgaaatcatctgcaccgctccacgcatggcagacaaaacagaatatttgttattagatccccatcctgccaaaaagacgcctaacacaccgatgctcgatatagcagacaccaagaagatacccacattaaaatcgagaatgtgtgctcccttattccaaggaaggaacgagaaagtacccaccgaggcaatcacgacaaagaatggcgcaatataatacaagaacttgtcggctttatcaacggcaaagatttccttaatgagcatcttaaacacgtcggcaaacacctgaagcgttccccaaaagcccacacgcataggcccgagacggcattggaagtaggcacacaccttacgttccatgaatatcaacactatcgccaacaaggcgtaggcagtgagaatggcgacaccaacgacaacacattcaatcaatatcgtccaaaaatcgttcaaacctaaggtttgtcgaagaagcgtgtcgaaccatgtagttactatactaaaatcaaacatgatctatttaagttatttatgttgaacaagttgcgaacattgagcaaagcattgctacaagttgtcaacttatatacctgctatctgtcaatatctggaatgacaaaatcgagcgccgcacctgcagtaacaaggtcagctatcttctgtcctctcaacatctcatccatggcggcgacatgactcaatcccataggacggaatttcaagcggtaaggcatcttgtctcccttggaatccaagtaaactcctatttcaccgcgtgagccttcgcatgagaaataccattgtccttcaggcactttgatgattggcttctgttttacatagaagtcgcctgctggaatattatcaatgagttgttcgatgatgcgaatgctttgcttgatttcctcaatacgattgaggtatctaccaaacgaatcgcaatgctcgttgagaacttcctcaaactccaccttgtcgtacatggcataaggatgatacttgcgcacatcgtttttccagccagaagcacgtccagaagcacccgtcacaccataactaatgatgttttcaagattcatgggcgcaattcccttgaagcgttgttgcatgatgacgttatctccaaacacatctatgtactcttgtagcatgggtttgaggtaagcacacagtttcttggtgttctctacaaagttgggatcgatatcatcttggcaaccgccaatgcggtaatagttttggatgagtcgtccacctgtagtctcctccataacgttcagcacatgttcacggtcgcgcatactgtacaagaaggctgtcaaagcacccaaatcctgtgcgcaacaacccaaatatagcaagtgcgagtcgatacgctgcaactcgtccatgatggtacgaatgtactgtatgcgctcggtcagttctatctccatcgcctcttcaatgacgcccaccaacgcatggcggttcatcatggcactgaggtagtccattcggtcggtcaacgccaaggtttgaggataggtgtacgcctcacacatcttctccattccacggtggatatatcccaaatgcggatagatgtgcttcacggtttcaccgtccaacacactttgcaagcgaagtacaccgtgcgtactggggtgttgaggaccaatgttgataacgaaatcgttgtctgtaaacaacggaacgcgagtctctaccaagttaccgttcttgtcgagcgaatattggaacgtgtaatccaactccacatcctcttccaaagtgtactggttgttctcgggcgagacatcgaagttcttacgaagtggatagcccttgaaatcattgcgcaaataaagacggcgcatatccttatgccccaagaacttaatacctaagaagtcgtacacttcacgctctaagatatcggcagccttccataggttggaaacggtatcgagaacatactcctcccctatttgctgcgctatcgccttgaccgatgtacgttcgtgagtttgtgtgttttctaaaatataaatacatcctaacccttcttcgccaaagtcttcgccaacaatggtaacaaggtaatcgaaatgcttgtcgttcttcagttttgacatctcttgtgccaagttactgaatgcaatttctatattttctaatttcatatccgatataccttatttaatgttgatgttctaactcttcttgaggatgaaagtcttcgggaacgtgagtcactacgataggcttgttttccttcagtttttgttggtacacctctgcgttactcaatccgtggtggtgagcctcttgcttatggttgacacctccgaagaatttttctactttgattttgcgctgcagctgcatcatgccatacatgatagcctctgggcgtggcggacatcccggtatgaagacatcaacagggacaatctcatcaattcctcttaccacatgataactgctcttgaacggaccaccagaaatggcacatcctcccaccgcaataacgtatttgggttctgccatttcatcgtataaacgcctaaaagcaggtgccattttgttggtaatggttccagcacacataatcaggtcggcttgtcgtggagagttacgcgttacctcgaaaccgaaacgagcgaaatcgtaacgggcgcatcccactgccataaactcaataccgcaacagctggtagcgaaggtcaagctccagagcgagttggcacgcccccagttaatcaattggtccaacgaccctgtgacaacattcacgcctccttcatggagttcgtcaacaatgcgttccaacgattcgttgtccttaaactcctcgtatggaatactcttgatatacggtttctttatttccattccaaagctcctttccgccaagcatacgccaagcctaagacaagtaccacgaggaagaaaccgatgctaaccaaagccatagctccaaaatctcgcacaactaccgcccacggatagagcagcacagtctcgatatcgaacatgaggaaaaggatagcgaagaggtaataaccaacgtgcatgggaagccacgaagaacctctcgttggaataccactctcatagggttcgccttttaccgcattatacgagcgcggaccaattaactttgcaatgacataagctgccactaccaaggttacggccgtcaacaaaacggtaacgaataaagtaaaattcataaaaattattataattataattgttctcgctttctgtcgaaacacatacatttttacaaatgcgatgcaaagttaatcattattttgagatttttacaagatatgaacaaaaaaaataggttaaattgctaacttcagattgcaaaacatgaattccaagtgaatattttattatcgggacaacacaaccctcatgccactaccaacaaattcactcaaacaaaagcaaaagaaaggtggtatttgatggcataaaaaatcagaaaaatctttacaagaaacattagaaaactcacgaatttaagggcaaaatccttgcgatattttcaaccaacctcatggttgactgcaaatatgcgatttttgcaaacttttgatataaatagacttacaaaatttcaagtaaagaacacggaggttatcttcatgctttaggtatcaaaaagggtgagtttggcgtcttggaatcatgcaataagggcgctattgtaatcatttagcacgactaaagcatggagacaagcagcttgaagcaataagataagggaacaagtcactattttgatgccttcaaaattctaaaacaaagaaaactcgaattattttcttagacttatctcaatgctttaacgggggaaaagacacttaaaaataagcaaaaaattttacatatataagggtaatcgttactttattaaaatgcgattgaaaataaatgccatccgtaggcaattagaagaacgttttgaaggtggaatgcaaatgacatgactcctcctcaaattgcctcaataatctgtagaaagtgcaacgacacaatttgaggaggaataaagaactattgcaccaatagctttttaccatttacaatataaatgccacgtggcaggtcagagagtttttcaacaaatacacgttgtcctgacagcgtatagattttattctcgctggtgcgctttgcagcggtatctatctgctgtatgcctgtggttaccgtcactggttggataagtattacagacgaaaaggtttcgttatagtaagggtcgcttgcaccatcaaaggtattatccgatgtttttaacacccaaatgccttgcaccgcttgattagtgctggtgtgagttcctcttttagatttaatatagaacttaccgaaaagattaagaaaattctcagattttacatggtttcctttaccagccttttgcaattcaagtccgttggccgcctcatccaatttgtctgtcacaccattaggcgcataatctttaagccaacttggagcaggcgtcttggtaggataactcaaccacttgttatcgatagtctcgaaagcaatttttccattcttcaagacatgcgccgtgaagcatgccgactcgttgggaacatctcctaatgcaactttacgcgtagacagcttaccatcagaataatcaagcaaaaatatgtcttgtccaataccatagaacttaatggtgtagcgtttaccattcactggcatttctacatccgtatcattaagaaagtcatatctggctttcaataattgttctgttgtgtgtgtttttggtgcatcgcaaattttttttaaggcaagacgacttttggcttttggctttggatatcccacaccttcatgggtcaataataatctcactaatgataactctaattctggtatttcgttattgttcgttgttgaacgagtcgccaccgcatcgtaggcgatgtttgcaggattagattttacttccacgtttgatgtcttttgaatgctcataccgttatcggctgaaaatgcggtattccgtccaattgtaagacatagaatgattgcgcaaaatagttgtaattttgtgttcataaataaaaaaatgttgttgttaattgataaaattattcaaatagtccgcaaaagtaactatttttcctaaaagtccggcaagctaaaataaaatcttgatataaatcaaggtattaacaacggctatcttttcaaaaatgagctaaaaatctaatgacatactacctatcccaaggctatctaaaagaaacacacacgataaatatgggctgaaagcaaaaagactaacagttcaaagcaacgccatgagtacagcaaaccttctatcttgcgctcttaaagttcaaaaggaggggcatcagttggagacgatttatgcgaaaaacgcataatataaccatactgccaaagccacaaacacgagaaagagtactatttttaataaacaactcgttattttcttcaacataaaagcacccacaataatggctatcagtaggtagatataaaaactaatatttgaaaacatgattttaactatttcattctacttcattgaactcatgagctgtccgcccagagtaaggcggattcttatggccaaccttgaacaaatgtgcgaatgctggtggtatgggggtttcaaactccatgggacggtgcgtaacggggtgataaaaacacagcacgtaagcatgcagacaaaggcgtccgatgggattgtcgccattgccatatttatggtcgccacacacgggatgccccatatctgccgaatgtacacgtatctgattcttgcgtcctgtctctaatcgatactccaccaacgaatattccgttgttcgattcaaggtgtgaaaatgcgtgacagcaaactttcccccattgtcctctggactcgaataggtgatatacgccctgttgtctttgagccagttggcaatggtgccctcatcttgttccatttcgcccgacaccactgccacatatcgcctatcgtacacgttgtgatgccagtcatgttccaatagttgggcggtttggatgtccttagcatatatcatgagtccactggtatccctgtcaagtcgatgcaccacatgcgcagtacatttctgtttgctctgtttgaaataactgtcgagcacttttttgacattcagcgaggcatgtcctgccgccatggaaaggatgcctgcttgcttttctatcaccaccaagtagcggtcttcgtaaactatcttgacatacttacttttaaagagagtgttctttttcgacttactgatagcgattttggcgcctggcgtcacgggataatcgaactgggtgatttgcttaccattgacaataatgccacgtccagccaatgttgctttgagttttgacttactgagatgcgtcacatgattgagcaaccaattcaggagtgtgtctgtctcttcaacgacatagcattggtaatccttgttggagaagtttgagttcattcatcatccattttgaaagttgatacaaagataccatttttcgtgaatttataaacgcttgtttaacaattatcaataaaaatgtttacctttgcgctcaaattatataaaataaggtaaaagaacatgataacagtttcaaatcttgcaattcagtttggcaagagagtcctttataaagatgtaaatatcaaattcactcacggcaacatctatggcattatcggtgccaatggtgcaggcaaatccaccctactcaaagccatcagtggcgaattagagcccacaaaaggcagcgtagagttaggaccgggcgaacgactgtcggtacttgaacaagaccactttaagtatgacgaatatttagtcatggacacggttttgatgggacacgaacccttgtggaagaatatgaaagagcgtgaagccttgtacagcaaaccagagatgtcggaagaagacggtacgcgtgctgccgacttggaattgaagtttgcagagatgaatggctgggaggcagaaagcgatgctgctcaactgttacagcacttaggcattggcgaggcattacacaccaaaacgatgagcgagttgtcaaacaacgaaaaggtgcgtgtgatgttggcaaaggcactgtttggcaatcccgaaaacctgctactcgacgagcctaccaacgaccttgacttagattcggtgcaatggttagaagaatacctgagcaacatagagcagacggtgttagtggttagtcacgaccgtcacttcttagatgccgtgagtacacagaccgtagacattgattttggtaaggtgaccgtgttctcgggcaactattcgttctggtacgagagttcacaattggcattacgccaagcgcagaaccaaaagatgaaagccgaagagaagcgcaagcagttggaagaatttatccgcagattctctgccaatgtggcaaagagtaagcaaacaacctcgcgcaaaaagatgttggagcggttgaacgtagaagaaattcgcccctccaatcgtaaataccctggcattatcttccaaatggaacgtgaacccggcaaccaaatcctgcaagttgagggattgaaagccctcgacaccgatgggagcgtattgttcgacaacgtgagttttacagttgaaaaggatgagaaggtggtcttcttgagtcacaatcccaaagccatgaccgctctattcgaaattatcaatggtcatcgtgagcccgatgctgggacctataactggggagtaactattactaccgcctatctcccactcgacaatgccgaattctttgaatcagacatgaacttagttgattggctgagccaatttggtacaggcaatgaagtggtgatgaaaggatatttaggacgcatgttgttctcgggtgaagaggtattaaaaaaggtgaacgtgctctcgggtggcgagaaaatgcgctgtatgattgctcgtatgcaactgaaaaatgccaactgcctcatcttagacacccccacgaaccatttggacttggagagtattcaggcatttaacaacaatttggtgacgttcaaaggcaacatcctcttttcgagtcatgaccacgagtttatccaaaccgtggcaaaccgcatcatcgaactgacaccaaagggcaccattgacaagttgatgaattacgatgaatacatctatgatgatcaaatcaaagaactcaaggagaagatgtaccagtaagcagtacaacattttaatggtttgaacaataaaagcaaggcttgacaagtaaagaaaaacttggcaagctttttgctgatatttaagacaggtaataataaatattgattatgagcaaaaaaaataagcacaaagagcaagaagcaggaaagaagcttgatacacagcacgaagagatggacgctggcacagtaatggacgacaaaaaggtggaagagcaagctgctgccacggataaccaacccgagacgcaaggcgaagcacccaccacagatccattagctgaggcacaagcacaaatcgaagaactcaaagatcggtatctacgtacagtggcagagtttgaaaactttaagcgtagaacacagaaagaaaaggctgaactcatcttcaacggcagtgagaaaactgtctctgccatccttcctatcttggacgacatggaaagagcggctgccaatgcgaataagacagatgacattcacgcacttgaagagggttgggaactcatctttaagaagctattgaaaacgctggagggattgggcgtgaaaaaaattgaaacgcaagacaaacccttcgacgtagattttcatgaggcagtggcgatggttcccaatgttgaagacaacaagaagggcaaagtgatagactgtgtacaaacgggatatacgctcaacgaaaaagttatcagacacgcgaaagttgctgtaggacagtaatataagataacgatatagaatataaaaaacaaaacattgaaggaatggcaaaacgcgattattatgaagtgcttggtgtgaacaagaatgcttcagaagatgaaattaaaaaggcctaccgaaagttagctataaaatatcatcccgataaaaacccgggaagcaaagaggcggaagagaagtttaaggaggctgcggaagcttacgatgtacttcatgatccgaaaaaaagacaacaatacgaccagtttggcttcaatgcgccaggcggaggaggatttgaaggattcagcggtggaggcttctccatggatgacatcttctcaatgtttggcgacgtattcggtggacacagcggctttagtggctttggtggcttcggcggtggcactgctggcgagcggcaacaaccacaatatcgaggtgccgacctgcgcttgaaggtaaagctcacattacaagagattagcacaggtgttaccaaaaagttcaaagtaaagaaagatattgcctgcactcactgtaatggtagcggtgcagagaaaggaagtggtacacaaacttgtcctacttgtcacggacaaggggttgtggtaaagaccgtgagaaccatgttgggcatgatgcagacacagtcagaatgtcctacgtgtcatggtgcgggcactgttatcaaaaacaaatgccaacactgtcatggcataggtgtggtgaaaggcgaggaaatcgttgagattaagatacctgctggcgtggcagaaggcatggtggtgaatgttccaggcaagggtaatgctggtccaagaaacggaatcacgggaaatattcaagtattgatagaagaacaacccaacgacacgtttatccgagacggtcaagacattatttacaacttgttgcttgacttcccaactgccgctttgggaggcgaggtagagatacctacgttggagaatacacgtgtaagaataaaaatagaagcaggcactcaacccgggaaaacgctccgcttgagaggcaagggacttcctgcagtgcagggatatggctctggaagaggtgacttggtggtgaatatcagcatttatgtgcccaagaccttgagccgagatgaaaaggaaacgatagaacgcctgcgcaccagtgacaattttaagggtgactacgccacaaagcagtctatctttaagaagtttagaaactattttaatgaataaggtacatgaaacttttcatgcacaagaaatgacttaattcattgattgccttatgaattaccaagaaactattgattatctgtttcacgcagccccagtctttgaaaaggttggggcgtctgcctataaagaagggttatctaacacgattgctttagacgaacactttgggcatccgcatcgtcagtatcgcaccattcatgtagcaggaaccaacggaaaaggctcttgttcgcacaccttagctgctatcttgcaagccgaaggttatcgagtgggcttgtacacctcaccacatttggttgattttagagagcgcattcgcatcaatggcgtgtgcatagacgaggagactgttatcaaatttgtagaagaagaaaaggatttcttcgaacccctccacccttctttctttgaactgaccaccgcattggcgtttaagtactttgccgaccagcaagtagatattgccgtcattgaagtggggcttggaggacggttggattgcaccaacatcattacgccaaaactctctataattacaaatataagctttgaccatacgcaattcttgggcaacactttggcaaagattgcaggtgagaaagcaggtatcattaagccccacgttcctgttgttgtaggagaagccctccccgagacaagacctgtattcgagaaaaaagcgcaacaagagcatgcacccattatctttgcagaagatgcatcagaggttttgcactcaacttatgatgtttcttcgcaacaacgcatttacaagaccctgtctttcggggaactgcgaggagatttaacaggctgttatcaagacaagaataccaacaccgtactcgctgccgttaaagttttgcgacaaatgcacattcttaaacatcccgaaagtttagcacaaggcttgaaaaacgtgatgcagaccacaggacttatgggaagatggcagtgtctgcaaaagcaaacttcaactcaaccagccatctattgtgacactggacacaacgtggcaggctggaactatctgagccaacagctgcaacaacagaaatacgagacgctcagaatcgtctttggtatggttgatgacaaagatctccagaccattatgaagatgttgccaacagatgcggtgtactattggacacaaccctcgacagaaagagcttttcctgtggaggaaattgccaaggcaggggctaccaatcagcttcaaggacagcagtatcgaactgttcgagaagcgtattccacctgcttaaagcaagccaatccaagtgattttgtgtttgtcggaggtagcagttatattgttgccgatttgctaacctttttagaaaggaagtgatttaagggtatttaacatctaattgtcccgcttttttaagactttcgtttgtcatattcattttttttcagttactttgcaagtacaataaaatgactaaaagcttataaatatgactaacacaagtgacgcaaataattgctgtgggctgaaacgtgaagattttcagacaacaattgatggcaaaaagacagatttgtacgttctgaagaatcaaaatggaaatgaagttgccattacgaattatggtggcgctgttgttgctatcatggttccagaccaacaaggaaaactggcaaatatcatccaaggacatgacaatattcaagcggttattgattcgccagaaccttacctctccacgctaattggacggtatggcaatcgaattgccaagggacgctttcagctcaacggtaaggaatataatctacctatcaacaatggtcccaatagtttgcatggcggcaaaaagggatttaatgccaaagtttgggaggcacaacaaatgaacgagcaaacgcttgtcttaaaatatgtaagtccctatggtgaagaaggattcacgggagaagtgagaaccattgttgaatataccttcacagacgacaacgaactcgttattgaatatttagcttttaccaacaagaagaccattatcaacttaacacatcacggcttcttctcattgtcaggcatcgcaaatccgactccaacggtagaagagcagatttgtgaaatcaacgccgattattacatcccgatcgatgagacctctattcctacgggcgagattcgcttcgtaaagggtacaccattcgatttccgtcagcctaaagccattggaaaagacatagaagcagaaaacgagcagataaagaatggtgctggctacgatcactgctttgtgttgaataagaaagaagaaggcgaattgagttttgctgccagacttaccgaccctaagagcggtcgtgtcatggaagtttataccacagaaccaggcgttcagctctatactgacaactgggcagacggttatcaagggcaacatggtgctacattcccaagacgaagtgctgtttgtttcgaagctcaacacttcccagactcacccaatcacccatacttcccttcggttgtcttagaaccgggacaagagtataagcaaaaaacagtttataagttttctgtcaaatcataatcatcaatcaccctattcgtcttttagtcctatcgcaaatcgcttgagaccgtgccaagaaattggactttcgaccaaataaagaaagaaacacaacggtttatcgaatggactaaacaatagttgacattgatgtaccgagagaacgaacctaaaatacccgttacaaaagggcatgtattgacagttccctcccctatctgaaataactaaaaataaataattaaaatctcttaacagtaaaaatggaaaaacagacaaacaaaaatggcgtcattgttgcgattatttcaatgatgttcctctttgcgatgatctcatttgtaacaaatcttgccgccccgtttggtaatatttggggtaagacctactcttgggcaggcatggtgggaaacctcatgaacttcttagcttatctcttcatgggtattcctgcaggtaagatgttggtgaagtacggttataaaaagacagcactcattgctatggctgtgggtttcattggactttttatccaatatctatcaagcatctttggtggaagcagtgaaatgttcactatccaagaaaatcctgtgatgctcaacttcatcatctatttgataggagctttcatttgtggtttctgtgtctgtatgttaaacactgttgtgaaccccatgttaaacctgttgggtggtggcggcaaccgtggaaaccaactcatccagactggtggtacacttaactcgctcaccgctacactgactccgtttttcgttggcgtgctgattggagaggttaccgacaaaaccagtatgaacgatgtcactccactactgtgggttgccatggctgtgtttgctgttacattccttatcatcgcctttgtcaccatacctgaaccacagtcaactgcttcgggcgtaacgttcgagcatagtccttggaacttccgacacttcgttttgggcgtaatcgcgatattcttctatgtaggtattgaagtgggtgtaccagccgaactcaatttctacatcacgaaattaggattccctggagctgctgccatcgccggtggtatcgttgccatctattggcttttgatgttggtgggtcgatttatcagtagtttcgtgagtggtaaaatctcttctcgagcacaactcatttccacttctgccttaggcatcatcctattagtcattgccatattacttcctgaaagctcgtctgttacattccatggtgtgaatgttcctgttaaatgcttctttatcatcgcttgtggtatttgtacctctattatgtggggttgcatcttcaacttagcaacagaaggcttaggcaaatatactgctcctgcatcaggaattttcatgacaatggtcgttggtggtggtgtaatgccattcatccaagatcagatagcaacctctttgaatgattacatttcaagttattggttgattgtagccatgttaggctacctgctctactatggactcgtaggaagcaagaatgtgaataaagacattcctgtagattaaataagaataagcgataagctgagtgcatgcaaacgcatgcgttcagctttttttgatgattgacatactgaaatttattaaccccttaaacatatataatatggatatagatcacgttagaagtcgttttatcaaacactttgatggcaaaactggaaatatttatttctctcccggacgtattaaccttattggcgagcacaccgactacaatggtgggtttgtctttcccggtgctgtagacaagggcatcatggcagagattagacccaatggcagcaacacgattatgtgttatgccatcgatttgaaagatcgcgttgagtttaaggtggacgatccacaaggaccacgtaccagttgggcacgctacatctatggcatcgtgcaggaaatgaagaaattaggcgtagaggtgaaaggctttaacactgctttctctggagatgttccattgggcgcaggcatgtcttcgtctgctgcactcgagagttgttacgcttttggacttaacgacttgtttggcgacaataaggtatccaaatgggatatggtcttggcaggtcaagctaccgagcataactacgtaggtgtgaactgtggcatcatggatcagtttgccagtgtgtttggacaagaaggaaaactgatgcgcttagactgccgtagtcgcgagtttgagtatttcccctttaatcctaaagggtacaggttgatgttggtcaactcttgtgttaagcacgagttggttggttcgccatataacgaccgtcgcaaatcatgtgaaaatgtagtgaagcacattgctgctaagcatcctgaaggcaagtttgaaacgctacgtgattgcacttgggagcagttagaagaagtaaaagatgaagtaggagcagaagactacagccgtgctcgctttgttttgggagaaaaagaccgcgtcttggctgtttgcgatgcactggaagcaggcgactatgagactgtaggcaagaagatgtacgaaacacacgagggcttaagcaaagactacgaagtatcttgtgaagagcttgacttcctcaatgaagtagcaaaagaaaacaaagtcacaggtagtcgcattatgggtggcggcttcggaggatgcaccatcaaccttgtaaaagacgagattcatgacaaatttgtagcagatgtaacagagaaatatgctgccaaatttggaaagaagcctgaaatttatgatgttgtaattagccaaggctcacacaaagtttgctaatttacttttatggaaaaaatatctgttggctcatttgtcgtcaacagatatttttttttgtttatctacaaaaataaaatgattcaaaactatcaaccatgaagctaaaaagtaagatatttttaaccatcgcttttgttgccacattgtttgcagcatgttcaagtggcaatgataagaacctcaccgtttcgggactcaatcctgccaaattcgataccatcattcatgaaaaacccgtgaaactatttgtgataaaaaatagtcatgacatggaggtgtgtgtaactaacttcggcgcacgcattgtctctatttgcgtgcccaataaagccgacattgctaccgatgtggtgctgggttttgacaacatcgcacaatatgccgacaccgttcataacgccagcgactttggagccgtcattggtcgatatgctaaccgtatcaacaaaggacaaatcaccgttgcaggtaaaaagatacaattgccacaaaacagtttcaggcactgtctgcatggaggacctacgggatggcaatacgcaatttatgaaggtcaacaattaaacgattccaccttacaattgagcctccactcccccaatggcgacaataactttcctggcaatgtaactgctacagttacttacactgtgaagaatgacaacacgctggacatacagtttgaggcaacaaccgatgcagagacagtaatcaatatgaccaacaactcgtacttcaatctctcgggtgacccgtcaaaggctggcaccaacatgattttgtatatcaatgcagacaactacactccttgtgacagcacattgatgacaactggagaaataaagtccgtttatggcacgcctatggatttccgcaaacgccatccgctctttgaaactattggtgacacaacctttacacaaatcaaatatgccaatggctatgaccacaactttgtactcaacacctataccaatggcaagggtgacgacacaaaggtggcagccagtctgtactcacctgaatcgggcatctatatggaggtgtttaccaaccagcctggtttacagttttactctggaaatctcctctcagggagtgtagtgggcaagaaaggcatcgcctatccacagcgtgcagccgtatgtttagcaccacagaaatatcccaattcgcctaataagaagaattggccttcaccatatcttaaacccggtgagaaatatttcagtcatgtggcttatcgatttagcattcgctaaataaagtctaagcgataggcatgggtggaactaactacttgcgctatccaaaatatcatagtttttgcaaatcagtcgaaggggatgtgtcaaaaaaggcactccccttttttgcggtatctgcaatattagcgagacctcaccgcctacgagagttccgatgaaaatacacttgcagaggaaacagagaaaacaaagggcaggtcaatgcagattattatgcctcatttcttaacttcgtttgtctttcaagaagacctgataaacaaaaaaataactgtcaatttatttaacaaacatgcttgtataattcgcatattttgaagcaaaccgtcggctggtcgcaaatacgcgaattatgagaaagttttgtaatgatatgactatcaatatgttatcacaaaaagaataaaataaatgtctctttttatctctatttggctccaaaagcaataaaaaatcgtgttgtaacaatgagtttgtgtctcaaaataggctcaatagtgcgactattcacatgtaatagtcgtataaactcaatgctttaattgaaaattagcactttctttgtcgaaaaatgtcaaatatacctgcttttttctacttatctttttctatttcacaacttttcaagtgccgttttattgtcatctctttttacaaaaacaattttaatagacgtgcgaatgtatgggatgtttcatcgaaaaaactaaaatattacaattctacaactacagtctgcagaaaaataactatatttgcaaaataattaaaattgggattatctaacatggaatttactgctcagcaaatagcacaatatattaatggcagaatagaaggagatgaaaacgtaagcgttcataacttttctaaaattgaagagggcaagacaggtactatttcatttctctcaaatccgaaatatacacaatatctttacaatacacagtcgtctatcgtcttgatagatgacaaaataacaatagaccgtcccgtcccaaccaccctgatttgggttcagaatgcctacgatgcaatagccaagctactgcaactgtatgaatctatgcggacgcataagacgggcatcgaccctttggcatccatagcaccaacagccaagattggcaagaatgtctatattggtgcctttgcctgtattggcgagggcgttgttgtgggggacaacacacagatttatccacatgtggtgctatgtgacaacgttagcgtgggagacgactgtctcttctatccccaagtgacggtctatcacgattgcaaaataggcaaccatgtcattttgcatgcggggtgtgtcattggagccgacgggtttggatttgctccaacaagcgatggatatgataaaatccctcagataggaattgtcaccattgaagaccatgtagagattggtgccaatacctgtgtagaccgatcgaccatgggcagcacttatattagaaaaggtgttaaattagacaaccttgtacagattgctcacaacaccgagattggcgagcatacagtgatgagtgcgcaagtgggtgtagctggctctacaaaaataggacaatggtgcatgtttggcggacaggtaggtatagcaggtcacattaccattggcaacaaagtgtacctcggtgcacagtcgggtgtaccaggaagcttgaaggacaaccaacaactcatgggtactcctcctatggaacaaatacgtttctttcgctcccatgccgtagcccgcaaactacccgaaatgtacaaacaactcaacgagttgcaaagggaaatagaattactaaagaaaaccacggacaaattggtttccaacaatcaagaataaaatggatacaatcaaacagagaactcttaacggtagcttttcattgtgtggcaaaggcttacacactggtcttagtttgacagttacctttaaccctgctgcagagaatactggatacaagatacaacgcatagacttagaaaatcaacccatcatagacgctgttgctgaaaaagtggtagacacgcaacgcggtacggttctggctaatggagaggtgcgagtatctacagtagaacatggtttgtctgccttgtatgccatgggtatagacaactgtctcattcaggtaaacggaccagaatttcctattcttgacggttcggctgccatgtatgttgacaaaatcagacaagtaggaatcgtagaacagaatgcacccaaagacttttacatcattcgcaagaagatagaggtaaaagacgaagagacggggtcgtgcattactatcttacctgacgagcagtttagcatcacagccatgtgttcgtttgagtcaaagttcatcaacagccaatttgctaccttagacaacatcgaaaactttggggacgaaatagctcctgcccgtacctttgtcttcgttcgcgacattgttcctttgctggaagccaatctcattaaaggcggagacatggacaacgctatcattatctacgagcgtgaagtgtcgcaggacaagctggatcaacttgcagacatattaaaagttccccacatggatgccaccaagattggctacattcagcacaaaccgttgatgtgggagaacgagtgtactcgtcacaagcttctggacatcatcggagacatggcacttataggcaagcccatcaaggggcgcatcgttgccactcgtccaggacataccataaacaacaagtttgcccgactcatgcgcaaggagattcgtaaacacgagatacaagctccgatttacgaccccaacgaagagcctttgttggacaacattcgcattcgccaactgttgcctcatcgttatcccatgcagcttgttgacaaaatcattgccatgggatcgtacagtatcgtaggtgtgaaaaacattacgagcaacgaaccgttcttcgtgggacattttcccaaagagcccgtaatgccaggcgttttgcaaattgaagccatggcgcagtgtggtggcattttagtattaaatcaagtggaagaaccagaacgatggtctacctactttctcaagatagataatgtgaaattccgccaaaaggtagttcccggtgacaccttgatattccgtgtagagatgattcaacccgtcagacatggcatcagtaccatgagaggctacgcctttgtgggcgatacggtagtctccgaagccactttcaccgcacagattgtcaaaaccaaatagtatggagcaaggtcttcaaacccacaactcctccctatctataaagatttccaaatagaatatgaatcaaatcagtcctttagcttatgttcatcctgaagcaaaattaggagacaacaacatcattggcccattttgctacatcgacaaaaacactgttttaggtgatggcaacgtattacagaacagtgttacgattcacgttggtgcaagaattggaaacaacaacgaacttttccctggtgcgagcattagcacgaaaccgcaagatttgaaatttaagggcgaagagaccacctgccaaataggaaatcataacagcatccgagaaaacgtcaccatctcacgaggcacagcttctaagggtaccaccattgtaggcgacaataacctgttgatggagaacatgcacatcgcccacgattgcatcatcggcaatgagattatcataggaaactccaccaagttggcaggcgaggtgacagttgacgaccgtgccattatcagtgctacattcctgtgccaccagttctgtcacatagggggatatgtgatggtacaaggagggagccgttctccgaaagacattccaccatacatcatcgcaggacgagagccaattcgttatgctggaattaacattgtaggacttcgacgcagaggctttagcaacgaactaattgacttgatacacgaagcctacaggttgttgtacagtaagggcgttttgagtgaaggtattgaagagataaagaagaacatcaacatcactcctgaaatacaatatattatcgatttcgtagaatcttcgcagcgaggcatcattcgataaatgaatacactgattgttcttcttggtcctacaggtgtaggcaaaacagaactctctctgaaaattgccgaacacctcaacactcctatcattaacgctgactcgcgacaactgttcgcagagattcctattggaactgctgcacctacttcttcacaattacaacgagtaaaacattacttcgttggctcgctgcatttgcaagattattacagtgcggctaaatacgaagaagaagtgttacaacttctacccgagctcttttcgacttctccacatcaagtggctttactttctggtggaagcatgatgtatatcagtgctgtatgtcagggtattgatgacattcccactgttgacgacaccacccgccaatggatgaaagagcgattggagcgagagggattagctccactcgtggaagagctcagcttattagatcccgtacattatgatatagtagataaaaacaatcccagacgagtggttcatgcactcgaaatctgtcacatgacgggtaagccctactcctctttcagaaccaacaccaaaaagaaaagacctttcaaaatcgtgaaggttggagtaaacaggactcgtgaggagatgtacaaccgcattaaccttcgtgttcttgaaatgatgcgacaaggattgctcgatgaggcaaaggcggtttatccgcttaaaggattaaacgccctcaatactgtgggttacaaagagctgtttgcatattttgacggagatataccgctcgaagaagctgtccgcaggattcaatctaattcgcgcgaatacatgcgaaaacaactcacatggttcaaaaaagaccaagatattcaatggttcaatcccgacaacattgaagaaatactaaattatatcgacaatcagctatagataccaacttatttgctacttttgcaaacaaataaatcatcatgaaatcgaaccgaattaaaacattcctcaactggttttggaataaaatacgtggattttggccatggtataaacagcaatacattggacgtccatggtacgcaaaaacaggaatagcactactctctggagtgatagcactctttatttatttgggtgcggtagacatcaatttcctttggttgtttggtaagtcaccaggctttgcccaaatcaagaaccccaccactgcctcggcatctgagatttacagcagtgatggtaagctcatcggtaagttttttaacgaaaaccgtacccccgttaccttcaacgaagtgaatccactcttctggaaagccttgattgatacagaagatgaacggttctatcatcacattggcatcgattttcaaggtatcttcgcagctgcaaaagatgcagttgtagggaatgaagcacgaggagcttcaactattacacagcagttggcaaagaatatgttccgcgtgcgtacgcaatattccacgggaatattgggaaagatacctggtatcaagatgctggtcatgaaaagcaaggagtggattattgctcttaagctggagatgctttacgacaagaacgaaattctcaccatgtatgccaacaccgttgattttgggtctaactcatacggtataaaaacagcaagcaagacttatttcaacacgacaccttcgcagttgacggtcgaagaaagtgctgtattagtaggaatgctgaaagccaccactcattacaatcccatttctaatcccgagaacagtctgcgtcgtaggaacgttgtcatgaaactgatggaggcgaaaggcgacttgtccaaagggcaatacgacagtttgagtacaattcctatcaagctacattatagtgtcgaaaccaattatgacggacaagcactctacttcagggaagccatagccaactatctaaaggattggtgcgaagagaatggatacgatctctataccagtgggttgaagatttacaccacgttggacacacgaatgcaacgttatgccgaagaagccgctcgcaaacagatgaaacagattcagcgtaacttcaacaatcactgggggaagaacgatccatggattgatgagaacggacaggtcatccctggcttcattgaacagattgcacagcgacagcctgtatataagtatttgagtggcaagttcccccatcagcctgactccatctcttattatttgaatcagccccatacggtaaaactctttgactatgaacatggcacgatagaaaaacaaatgtctaccatggactccattcgttacatggtacgcttcatgcactgctccatggtagctatggaaccgcaaacaggagctgtaagggcttgggtgggtgacatcgacttcaactcatggaagtatgacaaggtgacagcgatgcgtcagcctggttctacgttcaagttgtttgtctacaccgaagctatgaatcaaggactaacgccgtgtgataagcggcgtgatgaatacatctccatgcaagtatatgacaagaagaagcaacaagaggtgacttggacaccaggcaatgccaacggacgcttctctggtgactctatcccactgaaaggagcttttgctcgaagcatcaactctattgctgttcgacttggacaagaaatgggtatcaagcgcatcattgagactgctcacaagatgggcatcaaaagttcactcgatgatgcaccagccttggcattggggtcatcggatgtaaacctcttggaaatggcaaatgcttattgcaccgtagccaacgatggcaaacaccatgagccagtcttggtaacaagaattgaggacagtgaaggacaccaagtgtacatcgctcccaccaagtccgaacaagttattccatacaagagtgctttctttatgcaacaactgcttttgggcggcttacgtgaacccggtggcacgtccatgagtcttggaggatatgtgggtaaatacagagataccgattggggaggtaagacaggaacttccaacaatcattctgatgcatggttcatgggagtaagtcccaaacttgtcgttggcgcatgggttggaggcgaataccgaagcatacacttccggactggagcactcggacagggatcgcgaacagccttgcctatttgtggatacttcttacaagaggtgctcaacgaccctgcattcaaagcttaccatgccaaatttagcaaaccaaaagatgatgacatcacacgcagcatgtacacctgtgacagctattatgaaaaggcaaaagtggacaccacggcacaagacaccttaaacgacgatatggaagaggtgctctttgacgagtttggcaaccccattcacaaatctgaagaaaagctcaaaccttctgaacgacttgcggtgccacaaaagaagaaggaacccacagaagaggtcatcaagctggataacttgtaatggcacatggcattgatattgaaaagatagacctgaacaaccaagagctgcaaaatgcgttgcaactggttcagttcacgcaccgttccttattcctcacgggaaaggctggaacaggtaagtctactttcctgcattacattgcccaaactacaaaaaagaaatatgttattctcgcccctactggcattgcagcaatcaatgtcggtggggttacactacatagcttcttcaaacttccctttcatcccctacttcctaacgaccgacgctacagcacgcagcagcttagaaatacgctcaagtataacagcgagaaaatcaaactcatccgtgaactcgaacttatcatcattgatgagatttctatggttcgtgccgacatcattgatttcatcgacaaaatattaagggtttactcgcacaacatgcgcatccctttcggtggaaagcagttactattggtgggcgatgtctatcagctggagcctgtcctcaaagaagaagattggcagttgctgcaaccttactatccctccaagttcttttttgatgcacacgtgtttagatctttccaattggtttgtatcgaactgcaaaaggtgtatcgacagcgtgacgacaaatttatcagcatccttgaccatatccgaacctccaccgtcacgaatacagacctctccctattgaaccaacaggtggggcaacaccaaccaatggatgcgcatcaactgtccattaccttatccactcgacgtgatacggttgattatatcaatagcttgcatttatccaagttgccaggcgatgccacaattctccatggaagcattgacggcgaatatcctgaaaacaatttgcccactcccatagagcttgaagtaaaaactggtgcacagattctattcatcaagaacgaccgtgaaaagagatgggtcaatggcaccttaggaacgattatcggcattggtgatgaagaggatggaaagatttacgttcgcacagagcagggcgaagacgttgatgtggaacaggaaatatggaacaatgtgcgatacacctataatcagaaagagcaaaaggtagaggaagagattttaggttccttccagcaattcccattacgtctggcatgggcgatcaccattcataagagtcagggtctcacgttcaaccaagtgaagatagacctctctggaggtgttttcgcaggtggacaaacctatgtcgccttatctcgttgtcgctcgctaaagggtatcgaactacaagaacctgtcaagaaagaagatatctatgtaaaccaagaggtagtgaggttttcaaaaacttacaacgacccaagtgcactcaacacggctatacaacagagcaaagcagacaaacagtaccatgatgccaccaaggcttttgaccgaggggacatgcagacggcactcgattacttctataaagccattcacagccgatacgacattgaaaagcctgaagtaaaacgactcattcgtagaaagctaaacatcatcaacctccttcgtgaacaaaacaaacaattgcagaaggaaaagcaagacgcagaagcttttctcaaagagttgtctacagaatatgtcatcatggggaaagattgtgaaaaagaaggcatgaccgaggctgctatccgaaattatcaaaaagcccttaaactttatcccactcatccccaagccctgaaaagactcaaaaagcttaacggctaaaatgatattgatgcactaataagctttgtccatgacaaggcgaagtctccacaaaaatacagccacgacaacactctgtgtctcctatcccatagaggtaacctcttctttcaacacgcattaagccacttattcgtacactccaagatgcttgatataaggagattgaaatacagctaaagtgaccttgaaaatatcatggaaatgatgagccgtttggcattataatattctcatactatgggattaattgagctttcctcatttcgtcacttttccgaagcaagcttataaattaaatgtctttcacaatagcgctcctttttattaacgattatatctgattgttaatatttcttaataattcggggggggtaattatttgtctaaatttctgaatacttttgtaaaagttttaactaacagcagcttgggtaatctatattatctgattgtgtaaaagccttgatgatatgtcacaggacacacacgctgttagttaccactcttttgacaaacatgtatgaaaaataaattaactcatttatacccaatgatgacaagaaaacatttttacacattattaattacgtgcctcgcactgctgtcctgcgtcacagccaaggctggcgacaaaacatggacgctaaatgcggacaaaacggagtggctgtacacctacaccaccgaaaagcatccttttgtagataaatatgggtatcagctttatgctgtaggccaaatcacgttttcatttcgaaacaccattgatgccaaccaaaagatcaatgatcgctggacggattaccgcatgcgaattggcaaccctgatggctttaactcttctggccgagtgagcgtgaaagcctactacgcctctactaatagcttagcgtacgacaatgccacagactattacaactttgtatattataattcagatattgatgacaatggtattttaaaaatatctaacgaatgggttataaacaaaggtttctggtgggacatggatacccaaagcagcatcaagctgtttttccagcgagttggtggtggcaacgtagagattctccgtattcctcgccctgatgacacgggtgccacatgctacagcaccaccgagaacatacagcggcactatcgcaccaacctctacaatcgatatgatgctaaccaccgtcatctgagtaaaggtgtgatgtatatgaaggatcacggcgacggaacctacctctttaatccagtttgggatcaattcatcaaaacctctggcacccagacaatagccaagaatcaatacaagcaaaacgcccttggctggactggaaaggtgagcagtgacaaggtagtagtggctccgttgaatactaagacaggcaaatacgagctgagtatagacgtgctgataccattaactaaattcgaggataaaggcaataaggaattgcactcgctcttccaagctatcgttcgcgctgatcaaggtacgaaaataaacatggctattagtcactatgactatgaagccaataaatttgaaacaaccacttgggactatggttttgtctctggtgtgggaatagacgataacaaaacgaacaacaaggcctatggcaccgtgtatcccacaggtcgtgtagactttttgaagcgcgtggcgaatggcggttggctgaagttggaatttcctatcaaggtcaacaacaagactcctaacgtaagcgaccttgagacacaaggcaagctgattctcactgctgacaagcctttcgaagttagcgacatctttttgttgtggagacccaaccagccgggcttctatcaaacctcagcaacaacaggtcctaatgctcttggtgacagcaacattaacaaatcctgggtagacctatcaacagagaccaagtttagcctctttgatcgtggcgataatcttaaccgtgtggtcaaagtgggtccgaattctcctttgggcatggcaggacgcgagcatccctgtaacgtggtggtgaacggaaagatgccacttctctatcttaccgatcgtggtgtttttgttgaaacccccaataaagagagggtgaacacaggcgtatggaaagacaaagacaagaaacaatacatggagagcggctatacctttggtgtaaaggaaggctttacggctgataaggtttggttcgaccgcaactttgcccgtaggaaagatgctaacggcaaatatcacagtatgtctaccatctgcctgccctttgcgatgaacgcaacagagttgtctaagttcaacgtatcaaaagcatacgagttcgtaaatgccacaggcaacacggctacatttaaggaggtaacaaaaaccgaagctgacacaccttatttgatagaaccgacaacggctatcaccacagccaacgaaaagcctattgagtttggcaaaaaggacatcccagccagcaacattgccacaggtgacttcatcggtacttataaatacaacaatttgaaagccaaagatggagaatatacgaactatatcttcggtttcaatacacagaaattcaattacgtgaagtcttcaggtgcttcgtttaagcctttccgtgcctacctacgctccaagcaaccagctggcagcttggcgaagagtatcgaattcaagatttgggatggatcggtaacgggtattgagcaaatcgatgctaaggataacacaccatcacatgcacccatctacaccattgacggacgcatggttagcccaacgggaaatctacaactcctccctcaaggcatctacattcagaacggaaagaaaataattaaataagcaaacaaatgaagaagatatatcaacagcccctcatcgacataattaaaatcaacgccgacgatctattgaaaactgtagtagcgtcgttagaagacgatgcagcaggtgcaaaacagtttgactttaatgatagttttgaggataatgatgggcctgtatggtctgccgatgattataaacaagaaccataacgttgttaacagaataagatgaacaaaacaacattatcaatataacacgacgataagatacactacgataaaatcgatgatgggtggaacgatatgctcgtttccacccatctcttttatatgctgtgcacaaaaaaatatgtggacgaaataaacatggtcatttgtctatttcgtccacacatagcactgaagcacaactgttagctacgttgaatgtgtctccttctttaatccaagaaaataattgagactattgatgcggttatctacttgacaagattacccaaaatgctacgggttatttcacgtgtcatcgtgcgcgtggctgcagaagtggcattcttaacggcacgttcggtagttgatgttcgggaacgtgattttttacctgttactttattagatacagcagtgcctaagatagaggcgaatgtagcagtgagggcagtaatgacagatttcaaaatcttactgaataacgtgttaccgctgtgttcagcactcgtgggagttgttttatcgctatcttctgccacttcttgttcggcttgctgtttcatctgcattaattgttcataggcactcacgcggtcaattggctgatcgtatttgatacccaattttgattgggcgatgattgctttacgttgttcgtcggtgatggctccaatctgactcaacgggaataacattttggcacgttcaaccacctgaggtgctccctttgcatctaagaacgataccagagcctcgcctgtctcaagattagtaatcgcctcttctgtcttaaaagcgggattagcgcgaaaggtttcagctgcagctcttacggctttttgatctttgggcgtataggcacgcagtgcatgttgcacccgattgcctaattgaccaagaatgttgaggggaatatctgtaggactttgggtaatcaaaaagatgcccacccccttacttctgataagacgtatcacctgctctatcttatcgatgagcgctttagatgttccgtcaaagagcatgtgcgcttcatcaaaaaagaacactaacttaggtaatggctgatcgcccacttctggcaatgcagtgtagagttctgaaatgagccaaagcaaaaaagtagaatagagttttggttgcaacatcaatttgtctgctgctaaaacattcataatacccttgcccccttcggtctgtaacaagtcgttaatgtcaaaagatggctcaccaaaaaacttgtcggcaccttgactttccaattgaagcagtgaacgctgaatggctccaatggaggctgaagagatattcccatatttcgtggtgtactcttttgcatgctgcccaacatagtcaagcatggagcgcaaatctttcatgtcaattattaacaatcccctttcgtccgcgacacgaaacacaatattcagaataccagcttgcgtatcgttgagttcaagaagtcgtgtcaacaattctggtcccatctctgaaatagtagcgcgcatgggatgaccttgttcaccataaacatcaaaaaagcgtacaggacaagattgaaacgtgggattgtgtataccaaattctgccatacgtttctcaataaagcctgtgagatgacctgcctgactaataccagacaaatcacctttcatatcagccataaagcagggcacgcctgcctgacagaaagattccgccattacctgcaaactaactgttttgccagtacctgttgcgccagccaccaagccatgtcgattgaccattgccccgttcaacacaatcgggccattctgcccatgtgcgatgtataatccttgttcttgtgtgtacatgatatgttatgaataaatatttttggtaaagatactgtatttatttgataattagaaggaaacaagcaaaaaaaaatgaatgatatttttacaacgaaagacaccaaacatacaacgcatgtaaacttggaggtacactacatggaaaaataattaatgctgaattttatttacaaagtacctctcaaaactcgcgtgtaaacaaccaataccaaagttggtcgcaaatacgctaattatgagcgatgttcataactgactgttattaaatatgttataaataaattacctcttttcattctcatttttatcgttgcgcggcggttaaagcattgttctaagtttgttatttgcatgctttaatgctgctattgcatgcgaataacgcctctgatacatgtttccaagcccattaaggcaatgttttgacttaaagagacgtctattttgttaaaatcagcgcaattttgtctatcgcttgcctattaaaattttctattttgaagattttcaatggccgttttttggtaaaatgataagacaaaaacaacgaatcttcttaccaagaaaggtaaaactttttactttcataggcacgtgtgctgaactgtcggcgttattccatgcgagacctgcaaggacgggtagtcacctcacctcggaaagtagaggcaggaagtccgtcaccattgacaagattggcgcgagtgtacggttgccaaccgtaacgcacaaagcgaggttcccttaccttgtcggattgaagaatcactaactgtcccttaatctctgcatgagcaggataaaacaaaccatcgtattgggcgatctcaaaaccatcaacaggcttaccgtcagaggtagacagtttgtcagcatcattaaacaagacagcgaccttgttaccagcctcatgccaaacacacttaaacagaggaccacacggcgtgagtggacgatgataggtgtctgccaatgcccaccgagccagtcgctcgcctatctcctgtttatggattggatgcacattgagcgaatcaccaaggtcggaagataccgccattcccgtattgggtatttgctgcatcaaccttcgttggctgtcacgaaaccaagtccacgaaggtcggtcaagacttgatagctgcacaaaataaaacggcatgctgacattgttccaatactgccgccaagaatcgaccaacagtttgaacagcgtttcgtgtgtctctatgttatgggcgttcgactcgccttgataccaagccacccccttaacagtatatcgctctaagggcaagataccgctctcgaacaagtaacaaggttcgtacggatgcctcacacctactccctttgcttgtgcgatgttcttggcagcccgttgtcgcacccacggctgaatgaagtcgttgtgcagccaattgttaagaatagcagggaaacgtgattccaatgtatgcctatctatccaagactcggtaggcgaaccgcccactgcattgcagataatccccacaggtacttgcaaactgtcgcgcaacatacgaccgaaataataagccacagccgaaaaatcccgcaccgcatcaggtgacgcaactgtccatgacgagggacgataatactgcaaatggttcaacgaatcaagtaccgacttgttccactccacatcaaccgtttcccaattgggcttcatgtcgtagagacgcaagtcctcatcaccagaaagagggatatcccgctgggctgtagcggcttgctgcatcatgaaagccatgttcgactgtcccgaacagagccacacttcgcctatcgccacatggcggaagatacgcttttgctttcccgcacttactgtgagtgtcgtgcttcgctcggctttctgaggcgcaaaggtaacttgccacttgcccagttggttggtacgagttgactggtacatacttcccaatttaactttaactgtctctcctgcattggctgtgccatgaatcgttatgggtactcctcgctgcaataccatattgtcggtatagatggctggcatatgcaagccaccataattgcctgtaatgctgccatataccacttttgccatgataccagcaccttctacgttaggatgtaaggcatcgggcaacaaaaaaggataaggatataaaggcgcatgaaaatcaatcagttcgctaccactgattgcagccacagtttcaatgcttgcctgtatctgctcgtgccattgttgcgttcctgagataaaacgcggatgtctgtgtgcaataggtgacaatcttgccaaaatgatgcgcacctttggattggcttgacgaagtgagtcgataagagccaaataatcggtcacgaattcgtcacgatagttgggccaatttcgtgggtcggtgtcattaatacctaaatgaatgacggcaatatcggcgtgaaatgccatggcgtcgcggaactcttgttgcttgaaataagggcgatgcccatgtcgtagcaaggtagctccgggttttccaaaattcccaacgagatatttattgcccaacattgtctgtagctgtgcgggataagagtctttatcacgattggcgatgcccgttccgtatgtaatgctattgcccacgcaagccacacgaaccggtggcactgatggttttgcatctgtgtgaaggactacgaagcacgaaaataaaagcaaacatgccaaaagtagctttgattgatgattttgaggacgcatggtgatgatttgttgtgtacgcattttgttaggttgatgaagattgtaggaatgccacaaaacgacagtaggtgctcaaaatgaaacgcttagttttcatcttgaacacctacacactcgaatgattgatggcaagcgcctatattatacttgttgaatttcataaattctgccaccatagccaggaatttgtgccacaaacggcacggaagctgaccactctgcacgctgttcttggtgcgtcaacaggtcgaccgccttgcatgtagcctgccgcatgtgcagaaagtcgaaagcatgttggggtatgttgacatgcacccgctgctgattgggcgagaagttcacgacaatcaacaagagttgctctgccgatttacgcaagaagacatactgctcatcggggttgaacaatgccgagtgctgagtgttggcatacattaagtcgaagaactgtccttgcccaatggctggctgatgacacaattgcagtattttttgatatacttcggaaaggcgttggctgcgcttgtccattttttctctttgataatatccttcgatgatagactttaccgcccagtagtcgaatatggttgtcctgccgtcaagtccgctgaatccttccgcatccatgcctcgctcgccaaactcctgtccagcatataccatgacaggattggtatgcagccatgcgcatgtcatgaaagccggcaaagcacgttcggcactaccacaaaagaagtcactggcgatgcgttgctcgtcgtgattttccaagaaatagaacatctttggcaagatgtcatccacggattgccattggcgggtaatgtgatgggctggacgtttgccacacacgatgtcgcgcaaacagtcgtacatgcccaccttatcgtataagtaatcaaatcccgaagcgatatacgcccgataaagagtgggattgtacacctcaccaatgatgatgacgtgaggataggttgccttgagcttaccaatagcgtactgccaaaaagtcgttggcaccatctctgccatgtcacagcgaaaaccgtccacacccttagaagcccaaaacaacagaatgtctgtcatctgccgccacgtgtcgggcatagggtcgaaatgttcgctgcgcccacccgcatcagtgtaatcaataccatagttcagcttgacggtctcgtaccaatcgttagctgaaggcgaagcattaaaacaatcgttacccgtgcatttggcaggatattcacgataaggttcgctggcatccttgcacaaatcaatggctggttcaaaggaatagcttgggcaataataaaaattgttatgaatgtcaaagtgcttgttcacatcatccttctctcccaagtctctcactccctgaggtttgcaaatggagtggtattggcgtgccacatgattggggacaaaatcgataatcaccttcataccgacatcgtgcgttcgtttcaccaatgcttcgaactcatccatgcgcttcggcacctgcacggcaaggtcggggtcaacatcataataatcggtaatagcgtatggcgacccagcctttcccttcacaatggctggatgttggcgagggatgccgtagttagagtaatcggttgtcgttgcatggcgaacaatacccgtgaaccacacatgcgtgaaccccatgtcgtgaatacgattgagcacagtcgtggtgatgtcgttcatcttccccactccattctcttccatcgttccatggggcgtgcgggtcatattttgattgccaaaaaggcgagtaaagatttgatagatttgcatgtaaactttccttattcctccctatgaggagagttgtttgtcgataatgttaacgttgttgagaggtaagaatagagctttgtcttccagccaacaggcaagatgacaaagctcaatacagtttagattctcctttcgtttagataccgtggactgtcacttccttgctgatgcgtccaatcataccttgcaaagccttgccaggtccacattcggtaaagtcggtagcaccatcggcaatcatgttctgcactgttgttgtccaacgaacgctactggtcagttgggcgataaggtttgccttaatcttggctgcatcggtataaggtttcccgtctacattctggtacacaggacattgaggcgtattcaccgtggtagcctctattgccttttgcaattcgtccttggcaggctgcatcaatggcgagtggaaagcacctcccaccttcaaaggcaacgcacgcttggctcccgcagcctttagcttttcgcaagcctcctcaatgccttccttatctccagagataaccaattgtccaggacagttataattagcaggaatgactactttgccttctttgctcacctcttgacatatctcttctaccttttcatctggcaaaccaatgattgcagccatagtacccggtgccacctcacaagccttctgcattgccatggcacgagcataaactaatttgagaccgtcttcaaagctcaatgcaccagctgccaccaatgcagaaaactcgcccaaagaatgacctgccaccatatcgggcttgaatgcatcacccatacagagtgcagaaatgacactgtgcaagaatacagcaggttgtgttaccttggtttccttgagttgctcatcggtaccagcgaacatgatgtcggtgatacgatagcccaacacctcgttggctttatcgaacaactcctttgctgtctcgttattatcataaagttcttttcccattcctacaaactgggacccctgaccgggaaatacaaatgctttcataactttttttgttatattttatataaatacaatattatctcctcacacgagaagtttttgaaataaattaccgtttatattttttattcagaccatgcaatcttaaagcgaaacaaattttctttggaatttcttttagaattgtggcgcgtatctctttgcccgataaattccaaaacaaataatagtgcctaaattttcgaaaagctgcttcgatattatatttcatgcccgacctcacaggtgtacttgacatatacttaccaaagttaccaccccgaagaacaatagctaaaatatcttgctccttttttttatcacgttcttgaatcttaaatgggaattcattgattggtaatcccatctggtgaatcaatacccaacctatagcgcaaaatgctcgcataaagcccatcgtaaccaaatgtttctctaaagattttttatcaatcaactgatgataggaatgcaagagacacaaaacgtcacaaaactgtcggagtccaacgccaagctcaactaaatggtgatacaagtggagaaaagtataaagtacatttaaagttggttctaaagtagccacttgacaaccttcaatagtcaaactatctttattggcagattttaagatattgtcccaatactcctgaatttgacgatgattaaactttatcatgttataatgcatctctaacggaacttgactataattaaattctaagtgctgttccgattcagagccagagaacacaatcccccattctttttcaagcactgtttttgcttcttcaaaatgttctttatcacaaaagaaatcaatatctccaggtgtacgttctaaagggtgtggataaatttttgaaaaggtttgtcctttaaagatgatataatcaatattattttttttgagaatactacttagcctaacaatcacagcattaactcgatgattagattgctctatggatttattcacagagaacacatgtagtgcgtcttgtctatctaactggaaattagatcgcataagtacaccagccacaattccctcaatagtctgtctggaagcaacatacatcaaacgtctatattcttgatgtgataatagagtaaatggcaagggctcattaaaaaatgaggatcttatgattaaaaatagcatttgtactggtgacatcatctcattatttagaagaagaaaagtatttgtttattaatctaacttctcataaacagaatttctactcttaaactcaggaacaatttgtttcattttacgtactatctccaaatcatcgtacgtttttgatatttccaagagctgctgaatattttgctcaatctgatcataatcatattcgcgaaccttcgctattcgtattttaggattaaacgatggtaacgtactttcttcgtcgttcaatacttcttcatagagtttttcaccagctcgaagtcccgtgtatttaatttctacattttcagctcctgataatttaatcatgcgcttagcaagatcggctatcttcactgggctacccatgtcaaacacaaatatttcgccaccatttccttgagtaccagcctcaagtaccagcttacacgcctctggtattaacatgaagaatctaataatattaggatcagtaactgtgacgggtcccccagccttgatttgcttttggaacaaaggaatgacagaaccatttgatcccaggacattaccgaaacgagttgtgacaaattgtgtgttcccctttacctttccttccttttcggctttatccaaactttgtacatagatttcgcagatacgtttagagcatcccatgacattggtaggattcacagctttatcggtggaaatcatgacaaacttcttcacaccatatttgacgctcaggtcagcaataatctttgtgccccaaatattattctgaatgctctcactgggattatcctccatcattggcacatgcttataagcagcagcatggaagacatagtcgggctgataagtagcaaaaatcttttccattcgttcatagttttctatagatgctactatcgtctcggtgctaacgttaggaaattcttttttcattaacaagcgaacatcatgctgtggcgtttctgcttgatctatcaatatcatctgcgcgggattaaacttaccgatttgtttaaccatctccaaaccaatactacctgccgaccctgtaataagtattgttttcccacttaacaagccctcaacgctcttcatgtctatttcaatctggtctctgggtagcagatcctcaacactgatttcttttagagaattcaccacattcgtggcattttgattatcccactcttgtaaccctttggtcatgtagattgtcacaccagcattaatcaaaagatcttgtaactggacatcatctctaaactctttgttacgcaacggcgaaaccaatacattttttattttctttaatcggatatcttcagataatttttgatcaacacgataaactttttttcccatcaaatagccaggagtaggatcgtcttcgtttgcaataaaacccatcaatctaaagtgctgtggtttttggttgttgatatgcttagccaaccctattcccccttctttcactccatagattaacgttcgctgtgccttctcgttctcaaacatcgtgtcataaaccatctttactacgattctaaatgtccacatcaaaatcgtggaaaccaaatagatagatattatatgccttgtgtgaagtggaacgaaccaacgattatcctcccaaaataagataggataatgaacaaggaagacaaaaaagaaagccaaacccatggcaagcgccacacgttgcaagtctacaaaagacgaataacgtataatgcccgcataggtatggaatattcggaacgaaatgatattaaaaaagaggtataataaaagagtaagcgtaataggttttatgttgcctaaagtggctgctcctctaaagaatagccaaaatacaaataatcctgatagatagcaaattatacaatctattaaaattacacaccaatacggtaaagaatctctcttaaagtaccaatttactagcttattaaaccaattcatacgatgttgttgtttttggataatgactctacaaagctcataaagatttgtgaatcacaaaaaattaaaaaccactattttatttggtctataatagattgaacgatgtaacgtgcgtcatcctcagacacacacggtcctgacggcaagcagagtcctatcttaaataattgttcactcacaccattggtatacgcgggacagtttttatacacaggctgcaagtgcatgggcttccacaacgggcgactttcgatgcccattttgtccaacgccacgcgcatgacttctacattcgcattgggttcacaagatgtatgcaccttccctgtagcatgtaccacaccagcagcacctcccacagcacctttaacagcctgctcatacgcatgctcctggcccttcacctgtaattcgggatccaatgtaatggtgttgagccaataattcgattcaaaatcggtggatggatttgcatggaacgtaacgccatcaacattactaaacaactccttataaagttttgccaacctgcggtgatgagcgatgtgttcgtccaaaacagttaactgacctctaccaatgcctgcacaaacattgctaagacgatagttgtaaccaatttcctcatgttcgtagtatgggaacgcctcacgagcctgtgtagcaaaaaacatcactctgtttttagtttcttcattaggacatatcaacgcaccgccacccgaggtagtaatcatcttgttgccattgaaactcaacacgccaaactgtccaaaagtaccaacaacttgccccttataacgcgaacccaatccttctgcagcatcctctatcaaaggaatgtcgtatttttgagcaatggccagaatctcttgtatcttggcaggcatgccatataggtaaaccacgatgatggctttcggctttcgccctgtcttttctatcctgtctttaatcgcttcttccaaaaggtctggatccatgttccatgaatccttttccgaatccacaaacacaggtgtcgctccctgataagtaaccggatgcgaactggcacagaaagtaaagctctgacatatcacctcatctccggctttaacgcctaaagcaacgagagccaaatgaacggccgacgtccccgaagccaaggctaccacctgcttatccttcaaccgcccgtcaccctccaaccacagcttatcagggtcattctcgtgtggtgcgatactttgcggataatcctccctccgttgtttgtctcggtcgcactctcctctcccacttgagcaatcagttgaggcaatgaatcgctttaactcctcttcaaacgcattcacatttggtcccaacggcaccacccaattggtatcaaaagcctcttggatatatttcatttcattgccactcatgtgggcaagacacaaataaattcttttattcatatatctctttcaatttctataatgtgacacaacaataaccgtcatacaagtcattagccgttacaaatctaattatcacaatatcccgtagtttcatctagcagcgttttctatcttatcattgcaaaaatacaataataaattgaatagataagataataatcatttgatttttcaataacaagccagcatacgaggttctttcatcgaagggcgatattgttcaacaaccgcaccaaccgaattcgtgtcattcgcagtacgctgacgttcattgtcttgttcagttcatttgtttcattgcgttttcactcgttgttgaaacaaaatcaaatggttgttttcgccaataacaccctttggttaaaatattttacaacaactgctttataattcgcgtatttacaaacaaaccaatccttgcttgcaaatacgcgaattatgagcatgttttataaggcattgtcacacaaagcaatataaagaaaacgccaacgaaggacgctgttttaccaccatttctgccattaacccattgttttaatcacgcaatgtacatgcattaatacccttaccccatgtttattgcatcacaaaacacaccaaacagcggcagtatttcccaagttttacctgataaaatgatttttcgtgccaaacaaacccagtaatacctactccttgcctattaaaattttctatttctcctccttgcgacaccctgttttattgtcattttttaagacaaatggaagaatctaatgtagatgatgaaaccctaaatcatctctccattataccacattttcttaccaacgacagtacagaatatcatctgtaggtcttttacaaaagaataatgataatagtaatacagattgagctttattttatcgggataaatcacttcattattgtaggcgataggatcggaaacattcgataataattcttcctcattgcgatatttcaaactggcaggtccagttatgccaggttttaatttcaggatgtttctatcttcacccttcaatttgtcagcataaccaggtacatcagggcgcggtccgacaaagctcatatccccctttagcacattccagagttcaggcagctcgtcaagtttatatcttctcagtttttctcccaaaggcgtaatcctactctcttctgcagccgcaatagaggtttgtccttcgccagcaacagtcatcgaccggaacttgtatactgtgaacagccgaccatgctgccctaccctcttctgcttgaacaatactgacccacctggcatttttaagcggattaaacacgacacaaccaataagacaggactcagaaagattaagcctaacagcgacatggatttatcgaatatgtacttcaaatgcatataaaactacgaattgcacaaatgacacgaatgattatggttgaaaataactacaatttgcacaaatgacacgaatgattgtgttggagagttactacgaattgcacaaattgctctaattaatatgctacatctgcgaattgaacagattaatgttctgaacttctataaaaaggagtgatgctataataaatatcgctcatactttaatgaagactcaccaaaattaatcaatagccccaaaggaagttttgatattttcagatagttgataacttgggaacgattgatatcgttcagttctcgttcagcttttatttcaagaagaatatgttcgtaacatataaagtcgcatacaaaagaatgtttgagttctatacccttataaacagccatcatgctgtattctctttcatagggtattccttgcaatttgaattcctcctccaacgcatctccataaaccatctctctcattccacatcctaactcgcgatgcacagccatacaggctccaattattctatacgattccttgccataaatcaacttatcaatttccatataaaccctaataataaatccttaatattcattcgtgaaatttgcgaacctatagtacaaattaataattagtttaatccgagaaattcgtagtttaacaattctcatcaattcgtttaatacgtgaaattcgtagttaagcaattctcatcaattcgtttaatacgtgaaattcgtagttaagcaattctcatcaattcgtttaatacgtgaaattcgtagttaagcaattctcatcaattcgtttaatacgtgaaattcgtagttaagctccattctcgtccttcgtagtcttcttgcggtactgtacaaaataatccccgttatcaagcgtcttaataattttcacttcattcgccgtctccgcggatttgagcgaagcgatgttatcgggtgctatcgtcccaaagacctgcagtccaaggaattcggaaatctccgtcgcacattcattcatcaatttattaatgccttggcgtcgccatcggtagtctgttatgtatccacgaaacgcctttccccaaaagaaactacgttgaaagaaatagccgaccactgcatcaccgttcctgacgatatacgcaagaaaccccttgtccctgaccaacttcgttagtgctttctctgtaaattcatgcggtttgaaatatctgaaagtctcttcgggttgctcactgaacatctttgccaacgcgggaacgtcattttcatgcaaaacatgaattgtaaaagtattctgtttggagtatttctccagcagcaagggtatttgctttaactttttaccatatctgatcccaaacagccaagacaacacgagccccatcatatcccacagccacgggaacttgtctcttaataggtgtgcaactctgtataacatgaaaatcgttacgaattatagattctgatacatctgtagagttgggtgcaagtcgaatgcttgtttgacgtcttgattgcccataaagttagtaaaaatccctcacgcagtgaccatttgtgcaaaataatccctgtatgagggacgatttcgtacggtttcgtccctcatacagggattttcttaatcacagctcagcatacctttgtctcagcgcctcccacacatcacgctgctcatagcgttcttggattaacctcctactgtaggcggccatcctgttggtgttgtcggcgttgttgatcaaatcgcacatcgactggtaaagtgctttggtcatgggcgaggagaaaccgtccgcttgcgggtcgtccggggcaaactgtatgagatgaccgtggcgatcgaccggtgccgggatgatgaccccattctcaccatcgatgatgatctcgttgcaaccattgatattggtgacgatacaaggcaactccatcgctcctgcctccatgggcacattggggaaaccctccctgtaactcggaaacaccaatgcgtcggccgccatcaggtaagggcgcacgtctttttggaggcctgcatagaacacagcagcggagtcgctcaaaaaacgttgcgcctccggagtaatatggccaccgctctgcacctccttttctcccacaatcaggagcttaggttggcgcggcaggtcagcggcatgacccaccaatcgacgcattacctccgccaactcgttaatacccttgtctctcaccatgcgggctataaggataaaaacgaaatcatggtctgtatatcccaacttttggcgcatatatcggcgcccgtcaaagggcgtggcatccgccatcaaccgcgttcccttgttctccgctcgcaacaactcactcgtggcctcgcgtgacagatacgaggtgtccttcccattgatgttgccatgatgtaccacttgcagttgtttccccgtaattttgtcctccctcaacgctcgtttcacaccctccccttccggtatgacctggttggcgcagcagcatgtcacgcgttccatcgtcttcaatatagtgcgcagcatgccggtcgtggcttggtagcgcagacccgtcacggtgtatatacggttcggcacgcgcgcggcccatgcggccaccatggccaacaatgaccctttgggtgtgttggcatgcacacaccacggcttttcgtgcctaaagagtcgccacaaaaaccacaaggccttgatatccttgcctatactgataggtcgttccaaaggagcatcaatcacccgtatgccctctcgcgcggccacctcgttgagcacaccagtgtctttggctacccccaccacctcataatattgattgagatagttgagttgtccccttagcagcgagttcaggctgatgtcggccgtggttacacgaattagtttcttcttaaccattttacgtagatttaaactaaaacaatttagtttattctttatcaacttcatgataaacagccatatatcgatttgccatattggtaatatcaaaatattgtgctcttttactacatagagttgatatctgattataaaatgtatagtctattgcaaggtcttttatttttgaagccagttctttatagtcgccatcctcaaataaaaggccatatccatctacaacttgttttaaaccatcaacattacttgcaataacaggcttgccaactgccattccttcaactgcaactaaaccaaagccttcccaatgtgaagacaatacaataatatcgcttgcagccataattctgtcaacatcatttctatttcccaatatagacacgcgatcctgcaaatttaatctttttatctgagatgatattttagttcgcaactcaccatcaccaacaaaacaaaacttgaaatgtttaggtaaaatttgggcagctcttaatacacacaaatgatttttttgctttctaaatgctgctaccatagttataattatgtcatcatcagtatattcgggcaccaaattgtttcttacaacaggttgagcagcactaaatttagagacatcaataccgttatatatagtgacaatattattaagatgaatataagacctcaaaaactcagaagttttatcagaaattgcaataatcttaatatactgcttatacatccagtaatctattggtttccaaaaaaatatttttcttcttctatttgtagtattatgttcagttgtcaccagtctcgcattcccagcatatatgtgttttgctaacggtacgaagagctggcaagccgtattatgagtgtgtataatgtcaaaacgtgaaatataatttttaagtttgattatatttaaaggagagtatatttgacctctttcatttaaagaatggattattaagccttgatcaattaatttattgtaaaatgctgttcttgttccatcaaacaacagtagctctacattcaaacctttttttttaaacattggaagtaaatctaccattaatttttcagcacctccaatatgcagagaagttataatatggagtattttcatcacataatattttataaactatccttaaagtgcatcaacaatcctaacggatacgtccatgaccacttagtaggtatagtacgtctgtcgactttgtcagaacaaaaactaaaacgccaaaagtttatacttgctttgattttttgtaataaaggaatatctaaacttaacatttcagaataagtcatcatggaaccaaccgggcttttcattctcattttgacaatatttgctgtcaagccgtcattttgatattctgccaaatagataattttattaaaaaaccttagcttatatttctttgctatacggttccaaactaaagcttctggacaaaacttttctccacttatttccggaaaaggaaattccctcataacttccgtcctaaaaacttctgccatatctccttttactttatatttaaagcgtatatcaatagtagaagcatcaataataggtgaaggtaagccactgccgagaacatctctatttgttaaaccatctattcctgaaacaccaccaaaattcggattattttgaatctgagaataatattctgcaactgtttcgagtgagtcgattggtagtctatcatcgctatccaaaataaagaacagctcaccgtttgcctctcttgcaccaatattgatagcagtgtgctttccttcgttttctttataaatatacctaatggggaaagtattatgttctgcaataatctttttcataacttctttcgtactatcagtactaccgtcatctactactatccactcaaagtcatgaaaagtctgtcgagtgagacactcgaatatatttcttaaaaaagaagctctattatatgtaggtgtaaaaacagtaataagcatgagatttgttatttttttaaattaacactccatcttatgggttgccggtataacttttctacatcatacttctcatcatattcgtatatgtcgtgcactgtatccatttttctataaccgtttgtaaaaaaagttttatagggataaagataataaaatgattgccaactagtatatatacgaacatataaaaacaaactcaaaaagattaatccaaaactcagcatactcttttttctatatctactaccaatattagatagtgttaaaatcaagcctattatataataccatgaaagcctaccaccattttccgaacgtgcaaaaatcaacaatattgcacaaaatattaaagcaatgttgagcaaaacaatttcacttttttctttccttatagctttatattgagataggataatgtataagaagacaaaagcttcaaataaatacgcgattcgtatactaccagatgagctataatcatcttgttgctccactatagaactatctccatatgcattaaatagtgcatttggtataggtgagagccctataagaagagcaatagccataacaagtaaaacaattcgagcaggatatttttttatcggaataaaataaattggaaaaaaaatgatagccgatttatgtatagaccacgctataagaaaaaccagtaaaaacttccaaaactttcgctctattacatatactataccgagccatactatcgtagctcctaaaacctggcgtaagtaagtaaatgtaaagaaaaaccacaaacctaaaaatatagcaagtgctaatggatagttgtgagcatatctttttaaggagatgaataaaagtgtataaataataagcgtataaataaaaatgaaaatatatcggttttctgttatatatgagagcaatatatttagaataatatacccaggctcacttggaaaaaaaagaaaaacattattatctaaatagctcctccgagcggtagtaacatcagctatagtatcaaatacttcgccatatatgtatctatcatatccaccaagcatatcagaaaatccaacaaacaaagcaaggaataacaaatacaaaaaaagaaaatgagtgctcctattgattgtattcttatttccgaagaaacaaacaacaggaatacaaaatattattaaataaatccacatgcaaaattatattgataagatctgttagatgtaaaaacggttaattttcgtgtaatctcatatacaccgaatccaaatataataataaagctgtaagctttttgttctttagcattgcacagattaaaaacatctttaaatcattagaaaacttagcatacttaaacaaagctaaggttctcattttattaaaaacttttcttttgtaagattctggaaatgaataagtaagaattgaatgaatatatccttttataaacatactataaggctttgacaaaacattctgtgtattaacatcatcaatcttatctatcatttgctttgctctcaacagacatgtcatcgtatctttagatgagtttagtctatgttcaatgttaggattaaaaactgccgacacaggattttccatgtaatagtataactcatgatcaatacattttactctacctgttagtggtataagacgaaaaataaaatcaaaatcctctcccattgacaagttctcaaaacgaatatcattattatgaacaacagatgttctatacactctcgtccataaagagttattatatattccacttgcagtcagagataatccggaagtgtattcacctgtatattttacatgccttcctctttcttgatttccccaataataactaagcattaaaacatcatattcgtcattacgtaataaaggcatgatatacgacaatgaatttgttgaaatatagtcgtcaacatctataaaccaaaagaaatttcctgaaacattgtcaagtaattcatttctggttggaccaattcccttattttcacgggaaattaaacgtatattatcatatttagcttcgtattcttttaaaatacttaaagatttatcattggagccatcatttattatgactatttcaacctcctcattaaaaccaccttgccgtacaatgctattcaaacatctattaatatatacttctccattatacacaggtattagaatagaaagtaatttactcatattatactatatttatatggtgaatatactattagctcttacatgctatataggatatacaatatatttttgggttggagatgagttcctgtttattatctttccagggttaccaataactatactgttatcaggtacatcaaaattaacaaacgcacccggggctattaaaacatcatcacctattttgattcctcctatcactatactattagcattcatgcatacattgttacctattacaggaacacctgcaaccctgccttttgaattgccaaccaaacatccctgcgctatattaaaattctttccaattcttgcatcagggttaatcactatattcccaaaatgaactattctaaacccctcggcgattactgttgaataaggaatctgtatttttgtccaaaaggaacatagctttaataacatcaaccaaaaaaattttataattcgaatttttgatagctgacattttcgatatatgtatatatattgaaatcctggcacaaaaaaaacatagcgtattttctgtagccaagaatagcttgcactaccaatatatctatataagtctttttgaataatatcgttcatacaattcgttattaagtattattaatagtacaaaaatataaaactaagaataaacaaccatacaaaagtagtatactaactttctgtacagtggaacatttacattatatttttccttcgtaggattattagatgttattttcattatacgtttaatatattgtttcatgtcatttgaagacacgtcatttctaaacaaggaataaatcaagttaatactctcttctttaatatgctgtgttagcagtctatcatccgaaacttttccgatgtaagaagatttcttttcaagaatcgagatgccatcattaatacgctttgcattccacggagatcgactgatggaattggagtcaccaatacaatagtaatatgttacatcgttacataaaattaatgcctttatataggtagaaatttcaaaactccataatacatcctcatgtgtaatccctggcatgaaataagtatgatactctgcaaaaatgtcacgtcttatcaatttattgcaagcaataatataccattggttctcaacatatccttttaacacggaagcattgtcatggaaactttttgtttgggcagaactcacctctacattgttaccattggcatccacgcccttggttactcccataacaatttcggggcaatcatttaacaatgccgtctcaaccagtttctcaatagatgtaggtggtatggcatcatcactgtccaagaaaaaataataatatccggttgccattttaataccagtgttacgagcttcggacaaccccttgtttttttcatgttcgacaaatttaaaatcgatactaccctgataagattttactatattttttgcaataataaaactgttatcaggtgtacaatcattaacaataacacattctatattcgcataggtttgattgaacaccgaccacaaacaacgctctatgtatttttctaccttatatactggtatgacgatgctaacttttatttccattcaaaaaactgatataatcgaaatcatccaaataacgtttcaagctaaagatgtgcctataatccaatgatttgccggaataccagttgttgtaccacttaaatccatggtagaatgggtaagcagattcgaattctgcattttcaggtcccattacagaaaggggatattctacctctgcacacatatccagtagttcagaactgaaagatgatccctctaacaaaacaaaaatgttgttccagtcaattctgtttttacgctcttcccatttctccttagcacatttaaaagagctgtagtgtacgaatttaatacacacgtctccccaatttggcaacgaaaggcgccccacgggaaaatctactgacgcgtcatggatttcctccaactcgcaacgcatatactccttcagatttctgacaaattttataaagtccttgggttgaatattgagattaatcgtaggcgaattgaatcgcagacttaaatcatgcaatataactccacccgtacagttattgcaaaatagagaaaaatcttgattgacaagtcgtctcgatttatgtttatgataccatagtcgaggatacttcagcaaccgatggcacaacccatgaatatgtccgtttaaattcgccattcttatatcgcttaacttagcttaccattatctttagccttactaaagattcccgtttatattctttatacttttcgctatctgccctaaactggtataattcgcttttttgataggtgtcagaactgttatatgatgttatagctttttcattaccaacattcttcattaggattgtgactcgtctatccttatcatagccgtcttgacaacggctaacattggcttctcgtaatggtaaacgatgcgtggcgaaccatacatcgccttacaataccattcagcagtacacatatgtttaaattcttaatattattatgaatcaaatgtaataacggcacgttttatcacgcactctatcttttcagatattaaacgtatgatgtaatttattcctgatatctcaaatattttttttctgcaccaatcgatgcatatacatattgtgaaaattataaagcaattcgttaacattttgaatataaacaaactatcattaagcattccttgacatacgaatatctcctcccataatattttcctcaccatcacattatcacttatcagatagactgcaagtgtataaggagctatcttaacgaggcatcttgtcataacattttcttttatggttaaacctctagcccaaagaaagacatagagtgagaaaaaaaacaaaaatccattatagctaaaaccaaaaggtgtaatattagtaccatgaaatacagaaataagtatagccatcaagccatgatatgtaaaagtaataaccgcagcgacaatggcttttctaccataatgattcatactttttgcatatagtctaacataaccagcaaccaaatacaaaaaaataaaccacaataatccataacttccaccaaaagtgtcacctaaagggaacttcactaataaagttaagcttattcctcccaatcctattaatgtcaacaaatacttgcttttactaacatgatgaacaaagacattcaagaccggagcgaaaatgagcaaacccatataattggtcataaaccaatattccttaaaagtgataggaaatactgcgtttatcagctcttttacacggaacgtttgaaagcccatacaacacaagaccgcatacaaccccacagcataaaacaatacctcaacccataatactgtcaacctgttcagcttaaaaggttttgttatcataaaatagcctgttatcataacataacaattcacagcaatatggcatatctcatatacaatttctgacataatgaaattatacgtagacaaagaccaccacattgcccctcccgagtaaatctcaaaatgtttatacaaaccatgagtaaagtaatgtaacaccacaattccaaacattgcagttactctaagcaaatcgaaattgattaaacgcttctgcgtaaccgtgtaatgtgtaaagtttatatcttgtgtgtttatcgccattttcctactatttttcttcctaaaagcaacattcttcccagaccataccatctaagcgcaaccttcagttctatactaatatctctcacctgccttaaatctccaaaacactgggcaaactcccttccgttcatggccgcaccgtgatagagtgtggcgtaagccatccacggcatttccttttctacaaaaagacgccaaaatgaagttttacccaataaattcctgaagctttttgcagcatgaagtgcatttaatccggcttttgtattctgactgccagtaatgttgtttccatcgcctcgctgcacataatgataaaaagctttattgatgtagccaaccttaatctcctttaacaaaagtgctatgttgatatataaatcctcacatatatcgcaattcggaaaatgcaaatcatgttttattaaggtttcctttttgaccaacttattgcaacatgacccatggagagttccatttaacagctcgataataatgcttttgttatcaagagagccaggttcttgcttgcatacacttgatgacaatactgtatcataatagtaatcacatataagcatatcaatctgtattctttctgcttcattataaagcgtctccaacatctttggatcaatccaatcatctgaatctacatggataacatatttaccggttgcatgtaacagaccataatctcttgcagatgccacgcccccattttgtttgtgaaaatatttaaaccgagtatctgtctctgcatactgtttacaaatacttgacgatttatccgtactaccgtcatctacaagtataaattcggaatcttgcaaagtttgattttgtaacgaagataaacaaactgaaagaaactctgctgcattatataatgctactattacagttacctttaccatatagagatactttattttactgctccaagtttgcttaaaattttctcacataataatgtattaaatgtaacgatgtactaaaaaaatatttaaagggcatcttatttatcatcaaaattaactcggttattcccttgaatatctttcgatttcttactaactctacgatgtatcccatttcatattgctgcaacatgggcaatatttttttatctttttctaatttataaattgtagttagtatactaacctctctacaataattaaactccatagttgatcctgaatatattcctccttgatgaactcgatatactcccatcctgtctcttaataacacccctttccctcgctttaacacataataataataagctaaatctataaagtttttaaacttttcccgtggcatggtatacaaataatctgcattgcgtaccatacatgctaaaggtgttgtaaaccaaccatcataataagtaaaaggtaaataagaaactgcaccatcttgtttatactcacgatgattgtaattataacaaggataagttttacctgtattctgttcgaatatggtataattgtgagcacacattacatattcaggatttttctctaagaaatctacctgcttttgtagtttcatggggtctgtccaataatcatcaccctcacaaaaggcaatgtattttcctcttagatattttggattccacgtgacttctctgaaactttggtcatgcttagaatacaagttttctttttcataatacggcttgataatctctggatatttctttgcatactcttgaataatttcagccgacccatccgtagaggcatcatcatgaacccacgcctcgaacttaaaattagctctttgcatgacaaagccatccaaacattggcgtaaaaatggctcatgattatacactaaacacttaattgttaccaaaggtaattcttccattattttctttttattacattcatcacttctacatactcatctttagcaaaaaatttacttaagataaagtatgtaataccgcctatcacaacagcaacgaatagtttaatccactctgtagaaaaaagccatgtagatgcataggcacaagcgcccatcaacagtgaaataaacacaataggcaacaagtctctcatctgtgtgaaatatcctaccttgatcaatttcccagcatagtatgtattgataataagcgcattgattgatgtgaataccattccaaaacacatcgctgtgacacccaatggaatcgtcacacacatgaccgacacaccaactactttttttataatctcaagccggagaaacaaatcagaacgtccctttacttgcaagagatttagattgatagcatgtatgggataccacatcttggcaaagcagattatctgcaaatacggtacacaagcgtcccatttagacgtgataaccactcgtaccaagggagaggcaatcgccgccaacaacatcatcaacggaaaaacaacaaaggcggacaatcgcaataattttctataattggtggcaagccgttcgttatcatcttgcatctcagttaggacaggaaaagtaacacgctggagaatacctgtaatattcgatgacgggagcgatgcccatccctgtgcacgtgagaaattacccaattgagccggactgtagaattttccaatgacaataggatatatgttgttataggtggtgtctaataatcctgaagccagcaactttgaaccatatccaaaaagataatggaacgagtctttagaaaaagactctcgcggtcgccattttgaaaatatccaaaagagtatcatacgcataaaagccccagtcactccctgccaaaccaaagcccatacaccataacctaagtatgccaatagtattccaagaatgccagatatgactgtacttgttaacgttacttttgcttgcgttttgaaatcaatccgaattgtaaattgagcttgctgaacgatgcacaacgaattgatgagaacgttgagtcctgatatctttacgataggagataagattggctgaccataaaattcggcaatgaaaggagaacacaggaacagcaaaatataaaaaacaaagccaaccaatatgttaaaatagaaacaagtagacaaatccgactcagtcctgtccttttttcttacgattgcattactaaagccactgtcaacaaaagtttgcgcgatagcaaaaaagattactaccatagccacaataccataatccgaaggggataacaatcgagccaaaataattgaaaagaagaattgaacgccttgattggaaaatcgttcaacactgctccaaaataagcctttagttgttttttgttttaatgattctgttgacattctatctatatatgtgtattaacataatatcatattcatatcctctcaacatgttctaagaactatgcatataataaacttatctacaatatcttaagaatagtatccttaaaatattaatataagtattacatttataataatcttagctgtctaaatagctgtatctatgaaatatattcgtctctgtgtccccaaatttttgcgaacggctcagtttcaagataatatttataatcaactatccactttttaaaatcccaagatggcttgtaatcaagttttattttggatttctcaatacttagaacaaactgtggagaagatggcttgtctgggcaatatataatttcagacttcttgtcataagcaaaagtctctgctatgaggtggatttgatcctcaatagatataggcttaccacatccaacattatatattccatacatattgtcagtcttcagacaacaatccacaagatgaacaaaatcttttatataaaccatttccttcattgacttaggattaccccatatctcaagtgtctcaccctttattgcacgttcgataatatagcgataacctaaccatttctgttgtccatctacataataataaggattcgtgtaatatccatagattgttggtaatcgaagaatataataagccattccatattttgcattataatgctctattaaatccacggatgcattctttgcaatagaatataccgaatgatctgtattcaaagggaatttcatctcagtgtcatcacttattggttctgtagacccaaatttgtaaccaatatcagctatcgactgagaaaagataatttcattacagccaatacttctcatatattcaaggacatttaaagttcccgtaataatagagtctatatactcatatggatcatagcctttcatatgtgcaggcattgcacctgccaaatgaatgacagaatctatatcagctggaagtttatcgaactctgacttatttctgatatctacggaataataaggaatattataaccctgaaagaagccattatctgtttttctacgccctacagccattatattatacccttgctcttttaacaacgtgcaagtatacactccaatagagcctgttgctccaaaaaccattatatttttcatccttcaacatttaaatgtaaccaattatcttgttgagctaaacaccatgtcatttcctcattagtattaaatctcaaaactaatgttcctatagttgtattagctccagtgaaaccttgcactttatctcctgtttttacccagagctctttcgttaatgtgagtaaagagaaagttgtaatttgcgaatctcttatttactgactgatgcacattttcactatccataagtgtcaatgaaattttagacattttatgacatgttatcccttttgctacactcgctactgcctctttactaagtctgatcgaaatatttttcaaacgttcatcgtttgtctcgaaatacctgcttcgtagatacattgcatctatctgtttttgtacaaaactgacattctccttaacaggtcgttgtattccgtcaagattattagtttcaaggaaccctccatcaggtgacttaaaccacttacgcaagctgcctatgaaataatcgaacaccttgggacgattattagtatacaaacattgagtaatatcttctaacaagacacaaccagtttgttttattttccataaaacttttagttcgatacgattcaattccataccgtggtagggatgaacgattactattgtaggtctaacttttttgaccagttgttctaaataatctgtgtcaatgcggagttttctcgtgatgttgtaataatatattttccagtctaactgcaccaaaggttctatgactgtctggcaggtataggcaggtatgagagcaactttctcagtatcagaatatttttctgctacagcaaacaaagcctctctacatagagaataataaattctatgattagattctggattagttgtgacagactccttctccagacataaatctactgttgataatggaaaaatactaccgatatctctcatagtactctttctctgaaaaactctccaccctttgtatcataacatcatataacatttatggatagccactcatcttgatgttccaaagcatgtgcaagttcctcgcgtgactggaatttcaaaaataatgtgcctatggctgcatttgctccactaaaagaagagactctggttcctttttgcgttcgtatttcttcttccagaagatttttgctccttatccgctgactgactctgactgaatcaaagattccatccttattagagtgcataacaagtatagcatagtgggcgtcgtaatcgggttcatgtatatcgccaaccggaaggccaagtgccttttttgtttcagcagcattgatgtttacatctgatatatagttaagcatttcagcaagtctattgcctcctgcacgaggcgaaacctccatcaaatatggcttgccgttagaacacactctgcactcgacattaaaaatacccgtagacactccaagtaattggaacagcctttgcatttcggactttatctctctctgatattttttatccatactcgacggccatatctcggctgaaggagtatatggattgacagcggattgatcaaagtactgatcataaaaagcattgtagagcaactttccattcaccacaaaagattcagcacctaccgaaaacccttttttttctaagaaatcctctatgataaaagtgccattgtgtgactcagaaagagcatagtctatagctttcggtaacgcttcgggcatctctactttacttacccctttgcttccagcagaatctaccggtttcactatcactggccaactgaaataattcacatcttttagagcatcctctttcttattataccctttagccttcggacagttaaattggttctctgacagaaactgacgaaaaagatgtttgttttgtaaaatacaagctgccttatatgagcattgaaagggcaaacccatcttctcagcaacataggcagctgacaccactcctggatcaacggcatgagagagaattccatctatttccagcttctgagccgcttttaaaacagcctctttgtctatgatacttacgttacagtattcatccgaatatctatgagcaatattgtcaggaagataatctgcagtgataacatatacaccaagtttgtgcgcttcttctatgattgggagcaaataactcaaaccaccaagcaacatcagttttttttgtttcatcccttacctcgtcttgataacatcaataacccggctgcattcctcctcgctgagagcatggtgcataggtaaacaaattacgctctccgccatttttgttgcctgcggcagattctctgatgtagcactttcaagtccacggtaagtggaaaattcactgataagcgggtaaaagtaacgacgtccccatacaccttggtctttcatttttaaataaagttcatcacgtgtcatgccgtatttctccgcattcacaaaaatgggaaaataagaatagttgtgcttcacgccaggcatatcgtcccaaaacgtgatgccctcaacactgcgcaaggcatcacgataagctatggccactttttttcgggctgcaatggcagcatccacttgcttgagattaagtaatccgtatgccgagcgcacctcatccattttgctgttaataccaggaccaacaacctctgtctcaccagcgaatccaaagtttttcaaataatcaatgcgctgtttcgtctttgcatcgtgcataatcatggctccgccttctatggtgttgaaaaccttagtggcgtgaaaacttaacgtactcatatcacccgcattcaaaatgctctcgccattgacctctacaccaaaagcatgcgcagcgtcgtaaattacttttaacccgtatttatcagctatgccctgtatggcatccacatcacagggcttaccataaacatgaacgggaagaatggctgtagtcttgggggtaatggccgcttcgatcttgtttgggtcgagattcccagtgtgcgggtcaatgtctacaaaaactggtttgataccgttccaccaaagcgcatgggtagtagccacaaaactatatggtgttgtgataacttcgcctgtgatacgtaaagcctgtaatgccgtgagcaaaggaagggtaccgttggtaaataagctgacgtaaggtacctttaaatattcgcacaacgcagcttcaagtttcttatggaaagaaccattattcgtaatccatttactgtcccagatttcttttaacaatccatgaaactcatcaaggtctgggagcagcggtgacgtgacggtaattatatttttatccattctattgtagtattgtaatttcttaagatagtgcgtattgtataataataaactgatggaaagatattttcaatacccttaccatggttcatacccttcgggttcaaccttttctacagatgctttagctgcttccaagtcaaagaatttagggtcgtcaatctctccgttttctttcatgtcttcatatccccacggcccgccacaatcttcttcgggacaggctcctttgccagctgtacacgaggcatggggatgcaattcttctataatatcctcaagcgtgatgtcgtgaatccagtcatcaccaaagtcgtaaacgtaacagagtttatgcttaggattgagcttttctccataaaactctcctaatgtgaatttccgagcatcgaagtcgggagcgttgccccaatcatcctcacgtacttcggctatgttcagcatacggcagtatggtccatcactgaaacaatacagatgttctttccaccaaccgaatgctttttgaatcacggcatgaaatcctgagaaggtgaagttggcaggtactaacacacgccgccatacgggtggtttgctgatacctcgcaacttaatcttgaattgataggtgagtttcagtcccttctttcctcttggacttgtcgtcgccatacgtgctatgaacttgttacctccagcgaatgatgccaaagtatccgccaacgcatcgatatcatgcggttgcaaatcgaatattggctctggctgtgtctgctttatgatttttgcctttttattcgtcattgaaatcagtgaatcttatcaatatcaaagttgaaaaatcactcaatatcgtcaaagtcatcttcgtccaggaacataaaccctttggaacaggcattatgagcatcatcttcttcggtgctgccgatgatattgacattattctctttattgatttgcttcactgaggaggcagataaaagagtgcatgcagcctcatccaaatgaatagttatcagttcaggagcagtatattgttgatgtttcatggttattagagaatgagttggtcaataggggttgtcttgctcctcatctttttattattttcttcccacctatcacataaacaccagctggcaagtgacggatgtccgctcctacttctacgccttgcaaattgtaaatatgctggttgcgtgttgaaggatgtgagtgctgcgattgtattccattcaccgtttcactgccacaatcaatagtatacattatctgctttgccgaagaactgctttgttcgtttattttgaaataggctcgcatgccatacatttgactcacctcttcggatttaggcttagcaagattgccagtagccaacaagaacaagtcggagccatcaacatttaagttgactgggtcgaatgtgccgacgaaggcatattgccctgtttcatcttgaacggtctgcggcatggcatcctttttataaactacgtttgagaagataggatttttgacctcgaccgaaggcttgatgagataaggaacaccagcttgtatcacagtatcattctcaaagttcgcatcagcattctcaaacttcaacacattgttttcaacctcctttttaaactctcgcaatgcgcaattctctcccattgcctcttttaatgcatcttggctcacatcaaacggcagacaaatggtgttccaatggtcagaagcgaacgtgcgctgcagttgataagaataaatctctcctaatttgatatgttggttttgtagctcgtgctgatcggataaaacggaagcaacttctataaaatataaaaatagagctcctttttcataattgtctcctttcatttcaatcttaagagttccactatttatgttaccctcagtaatataaaaattacttaagtcatcattgagatcttctttccttttcgtgtatttacgtgttttatagaatttgtctttacccgaaccgagggtcatgcttacttcgtaacctctccctcttcgtccgcttgctatatttgtggacactcttaccaaatccacatccttaaacggtgttgtggttgctaaacaaataatccgagatttttcgtctgttgtacccacatgcaggcaatccacatcgctcttagcaagcactccatctactgccaattcccattgatgaccgtatttatcagttgcataaaatttttgcggaatatgctttttattactatactcgcaatttttgaacaactctttaaaataaaacctttgcgcatgagtttctacagtcccaagaaataacagtatcaaacataatagccaaaaatttacatacgttttcatgagtaaagatttgaatggaagtgtttatctgtcttaagtagataaatgaatcagtctcgcttaaagatatctcgagtatacaccttctcttccacatcatccaagcagctgtcgtatcgattggcaacaatggcttgcgactcttgtttgaattgagtgaggttgttcactaccctactgccaaagaaagtggtgccgtctttgagcgtaggctcgtaaacaataacctctgcccctttggctttgatgcgtttcatcacaccctgaatgctgctctgtctgaagttgtcgctgttgctcttcatcgtgagacgatagataccaatcacacattttttctctttagaggtatcaaaggctcctcgattgaaataatcgtaataaccagctttgtgtaagacacgatcagcaatgaagtctttacgggtacgattgctctgcacaatagcttctatcagattctcgggaacatcttcatagttcgccaaaagttgtttggtgtccttgggcagacagtagccaccgtaaccaaacgagggattattgtagaacgagccaatgcgtgggtcaagtcctaccccctggataatatccttggtggagaggtttttcatctcggcgtatgtatccaactcgttaaagaaactcacgcgaagtgccaaataagtgttggcaaacagttttaccgcctcggcctcggtggtacccatgaacagtgtgtcaacattctctttcattgcaccttgccgtagcagcgaagcaaaatcgtgtgctgcctgctctaacttttcgttccccactggccgaccaatgataattctgctaggatagagattatcatagagagctttactctcacgcaaaaactctggggcaaagaggatgtttccacaactgtatttctcactgacgttctccgtatatcccacaggcaccgtactcttaataaccatgatggcatgtggatttaccttcatcaccagttcgatgacctcttccacatgcgaggtgtcgaagaagttcttcacgggatcgtagttggttggtgttgcaatcacaacaaagtcagcctgcttataggctgtctcgccatcaagggttgcttgcaggtcaagttgtttctcggcaaagaacttttctatatattcatcgctgatgggagattccctgcgattgattttgtcaaccttctcttgcaccacgtctacagccaacacatgatgatgctgactgagcaatgtggcgatgcttaagccgacataaccagtacccgcaacagcaatggtatattttttgttcacatccttgcacattttattaaaagttaaatgtattctatagcagtctgttacttctttatccttgcagcgactgcctgtaccagtcgtacaacttctgcacaccgtcttcaatttccacattgtgcgtccaacctaaagagtgcagctttgacacgtcgataagcttgcgaggggtgccgtcgggtttactttcatcccacactatggttcctgtaaagccaacagttcgcacaatgagttcggagagttgcttgatggtcagctcctttcccgtacctatgttgatatgacagttgcgtatctcaccaagtgatggaatagcaccgccacgtccctcgctattgttgcgatttacctcaccatcggtagcagtgccgtaaaacacgctcgaatacttgtctatgccgatgatatccttaaaatctacatttagaaggatgtgtactgaagcatccgccatatcctcactccaaaggaactcacgcaatggcgagcctgttccccagagtgttaccttgttgtcttcgatgccataaaacttcaatgccagcaagatgcgttcttttgagcatgctccgtcaacattttcatgccctatcttttctgccaaggctttaacggggttaatcggtcgtttgttcatgtctacccgaatggcatcccagtcatcctcatgtatcagtttagccaaatatatcttgcgcatcatggcaggcatcacatgactgttctccaagtggaagttatcattaggaccatatagattggtgggcatcaccgcaatatagttcgtgccatattgcaggttatagctctcgcacatcttcagtccggcaatcttggcaatggcatattcttcgttggtgtactctaaaggggatgtaagaagcacatcttctttcataggttgtggtgcattctttggatagatgcaggtagaacccaagaagagtaactttttcacaccatatttataagctgacgaaatcacgttgcattgcatcatcatgttttgcatgatgaagtcggctcggtacagactgttcgccatgatgcctcccacaaaggcagcagctaacaccaccgcatcaggacgttccgtcttgaaaaagtcgtcaacggcttgctgattggttaaatctaattcattatggctgcggcctatcagttggctgtatcctcttgcttcaagattcttccaaatggcagaacccactaagccgtgatgtccagcaatgtatatcttagatgtttttgataatgccatgattaatggatggggtttaagatttcctatgggatactaggagcactaggaatactagggatactaggaatactagggatactagggatactagaaaatctaggaaatctagggaatatagggaatatagaaataaaaaagctattctctattatttcacattcttcaaatcatactctgtcatcttcttcaccaactcttcaaagctggtttggcgaggattccagcctaactgttctttcgcctttgttggatcaccgagcaattgttcgacatctgcgggacggaagtatttgggatctacctcaacaagtaccttaccagtagccttgtcaatgcccttctcgttcattcccttatcacgccattcaagttcaatgccagcatgatggaatgccaaggtagcgaaatcgcgtacactataatattcgcctgtggcaatgacgaaatcatctggctgttcttgctgcagcatcaaccacatacattgcacataatcgggcgcataaccccaatcacgtcgagcatctaagttacctaaatacagtttgtcttgcaacccatgcgctatacgtgcagctgccaacgtaattttgcgggtcacgaaattctcgccccttcgctcgctctcatgattaaacagaatgccgttgcagcaatacatgccataactctcgcgataattcttcataatccaaaagccatataacttcgccacagcatagggcgagcgtggatagaagggcgttgtttctttctgtggcacctcttgaacttttccaaaaagttcggaagtgctggcttgatagatgcgacaactcttttctaagccgcaaatacgcactgcttccaacagtctgagtacacctatggcatccgtatctgccgtatattctggcacatcaaaactcactttgacatgactctgtgctgcaagattatagatttcggtaggtttaatctcaccaatgatacgaatgagagaggacgaatcggtcatgtcagcccagtgcaaattcactaagcgagactgtttcatatcccgcacccattcatctaaatacaagtgttctatacgtcctgtattgaaagatgaactacggcgaagaagaccatgtacatcatatcccttatcaatcaaaaactctgcaagataacttccatcttgtccggtaataccagtaataagagccactttgcgatttatcataaatataaaattaaaatatgaatattataggtgagatttcatctcatgttgaactacgtgagcgattctggatttcaataaacagaaaaaagtaacttgataacgaaaaaaatgtatcactcatcgcacaagaaaaaacctgcatataaacatcaatacacccatgaatgctcctccaaaggggttagaaaaacagagacacctccctctccttgtcagtcgttactaacaagcgatatagggtatcatctccatttttcacctccactgtagggttgttcaagcccgcagagctttcattatgaagtgtatttgttcagtttgcaaagataaatatttttatttacatcgcaaatgtttgtatctgttatttcacaccaaagaaactgcagatttcactaaagaaagggatttattgtaaagaacaatctgcttttggcttctgttatagccattatcctgcaatgaaattcaatcataaaatagcgttggtaaaattggtgatgcactgccttattcaaagaaaataaatgttgaattttctttacaaagtgcctctcataactcgcgtgaaaacatccaacggcaaagttggtcgcaaatacgctaaaaatgagtgacttttataattcgttgaaattgaatgtgttatgcgtaaagaagttattttcactccttttttaccgttcattagcggctaaagcattaagataagcctgcaatttgcatgctttaaggctgttatgtcatgtaaataacacctctaatgagtgtttccaagacggttaaatcaatgttctaacttgaaaagacgtctattttgagaaaatcaacgcatttttgtctgtcctttgcctattaaatttttctattttgaagattttagatggccgttttttggtaaaattacaggacaaaaacgtctgatgttcatagtaaaaataacaagaaaatacgcaactcttttattgatgcgaaattattgatacaaccaacgaagttagcaatgcgatacggtttattcgttagacacggtgctgaaagaatagaaaaaagattattttttacgataagctaccctatcttaaatgagaaagttgtgcattatccatacaaaatactaagcatttttgcttagctcttgcatctttttagtaactttgcacgcattacaaaaatgcagctcaaatgaaaacattaattgaccgtattttgaaagacgggcgttgttatcctggtggaattctaaaagtagacaagtttatcaatcaccaaatggatcccaacttaatgaaagctattgccattgagtttattaaaagatacagttctactgaaatcaataaaatattaaccatcgaagcttcaggtattgcacccgccattgtaatgggactcttgttggatcttcctgttgtgtttgcgaagaaaaagaaagcttcgactatggacaacatcttatccactactgtattctcgtttaccaagcaacgggaatataatgtagttattagtaaggactaccttaccccacaagacaaagttgtgtttattgatgacttccttgcttacggcaatgcagcaaaaggaatcattgacctttgtcaacaagcaggagcagaattggtaggcatggggttcattattgagaaaacttttcaacatggtcgtgaagtgattgaagcggcaggcgttagatgcgaatcattggcaatgattgaatcactcgatgactgtaaaatcaaattgaaaggaattgattaactcacaacaccagcgacaaatgacgacttcaacaaaaccacaagagcctatccttcatcatcaaaccgatttaatttatggtctgcatgataagccgcaacttagagaagccttgtttgcagcactgcaacatcttttggctatttttgtggcaattatcacacccccgttaattatttcgaatgcactgagctttgaccttcataccacaggctttcttgtatctatgtcattatttgtttctggcgttgccacctttatacagtgtcatcgcataggtccgataggaacaggactgctttgtattcaaggaacaagcttttcatttattggtcccattattggtgctggcatgttaggcatgattggtggaaaaatagatacagaattagcattagcctacatattcacagcttgtatgtttgcttctgtggtggaaatgtttgtcagtcgaattttgaaatacactcaaaagataatcacaccgctggtttctggaattgtggttacgctcataggtatgtctctcatcaaagcaggtattaacgcttgtggtggcggagcagcggctgaagctaacggaacctttgggtcgttaatgaatttggggttagctgcgttggttttgtttgccatcattttctttaatcgttcgtcaaataaaatcttaagaatgagttctatcgtcttgggattagccattggctgcttggtagcgtatttcttagatatgataccactcgatgcgacacaagattatggtgggttcaacattcccataccgttcaaatatggttttagatttgatatttcagcaatcatctctttaggattggtatatctcatcacagcgattgaggcctatggtgacatcacagcaaactcccttatctcgggcgaacccattcaagggcgtacatttgaaaagcgagctgctggtggtattcttgccgatggttttaactcaatgttggctgccatatttaattcattcccaaattccatttttgctcaaaacaatggcatgattcaactcacaggaatagcaagcagatatgtgggttattacattgcaggagccttaatattgctggggctattccctgcagtaggaattgttttctctttaattcctgctcctgttttaggaggtgctaccctcttgatgtttggtaccgttgccgcagcaggcatcaagattattgccgctaccaaaattaaccgaaaagccgtacttgttatggcgattagtttctccttaggattaagtgttgaaatggtacctgatattcttaatcaaatgcctgagaccattcgaaatatattttcctctggtattacaactggtggattagcggctattctcactaactcacttatccacatcaaagactaatcgatagaagaaatggtcagcaaatatagccattcgaaacaatatcgtgattatatttaccagatgacagttctttttataattatttaaatattttacaaacaacatcattcgttattctcgttatttttccttacctttgtacagattttctgcacgcatttttcgtgcgtatataaatatattgtaaccaaaagttagaagtaaggatatcaaagatgagacaattaaaaattcagaagagtattaccaatcgttcaagtgaagcattagataagtatttagtggagattggtcgtgcccctttgatttctatcgacgaagaaatagaactcgctcaaaagattaaaaagggcggaccagaaggcgaaagagcaaaggataagcttgttacagccaacttaagattcgtcgtatctgtagcaaaacaataccaacatcaaggacttaccctgacagacttaattgatgaaggcaatataggacttattaaagccgctcaaaagtttgatgagacacgtggcttcaagtttatttcgtacgctgtttggtggattcgacaaagcattctgcaagccattgcggaacaaagtcgcattgtgagacttccattgaatcaagtaggctcacttaataagattaatcacgaaatcaaccgattcgaacaagaacatcatagacgcccttctatctctgaattatctgatgcaacaaacatcgacgaagagaagattggacagagtatgatggcagatgggcatcacgttagcattgatgcgccatttcaagacggtgaagataacaccatgttggatgtcatgccaagtggagatgacagtaggacggacagacaggttgaccatgaatcaatggcacaagagcttaacaccgtattaaataaggtgctgaaagatcgcgaaataatcattataaaagaatgtttcggcatcggacgtcccgaaaagggactcgaagaaattggcgatcaattaggattaacccgtgaacgtgttcgacaaattagagaaaagagtattgccaaactccgtgacagtggtaatgcaaaaattcttatgaagtatttaggataagaaatctattgagtaggagataaataccaacagtgtatttatctcctatttgttaaattgcatatagagttctatcttataaatgctatttttccgaaggaactaaatatttatcgccagttcgtctgacaatttctttggcataagaagcggggaatccaggacgctttactcgtgagcctaatcctgttttggttcttgtgaattgtccgttcttcactggtttaacagccatatcattgtatctcacgattaagaagatagccagttgtttccaacgacttagcatttgttgggctgtctcattagaatattgattgagatactggattgcttctgtcttgttgtttttatacagacgcaaagcttcttcttccactgcctgttgctttttgaaatatgacaattctaacgagtcacggactgccttcacatctggaaacatttgctgatagcgaggataaaccatattgcttacccaattacatacccaataggcatttttatcagaaaatgttacagcatctgctcccggcgtatgatagcattcaggctgcgatgtgtttccacaataaataggcgtatatgctatcatatttccatcgtcattgccaaaccagagcaatcctcctatttcacgaggcaaccaacttcgcatctgacttacataagtaaatcctgactgctgggtggatgttggtctttcattaaaataggtctgctcaccaactttatactttagtggtgttggacgatagggcatttgccaaatacctcccccgatatcaacactatctattgccaagggtgttccttcatagtgatcgcgcatgcaaacctgtacatcttgaatacttactttcttttcagggataatccatagcggcatatcttctgcatttggatctttacctaacgcccatggcaaatacttggacatatcttgaaagtgattgaagaagctccaaactcgcgcatcacaaaacctacgtcctgagaaatcaggttttgcataagtttccttccatgagaagtctgcatctttaccagtgtaccaacctttctttcttgcaaactcaacaacgtctttggagtagagtacattcttcttgtccttcatattaaatttaccaattctgctttggttggcatgaccacataccgcattatcgggaatacgtatcgctacccatacagtacctttgcttccaggacctttacccatcatttccataatccaagcctcatttgggtcacagatggtgaaagtttccccctcactattatatccatattgattagtcagagttgtcatgatacgaatcgcttctctggcggtcttagatctttgcaacgcaatgtaaatcagtgaaccataatcaataatacctgttgtatctaccatttcttcacgacctccataagttgtttcacctatggttacttggtattcattgatgtttccaatcacgttataggtttcggctgcttctggtatctgtccatgataaacattggaatcccaatcataaatatcacgcattgtacctgcttgatgctttcctgcaggaaaatgattaagtccgataaatagcccgtaatcatcagcattgtaagtacaaatgacagagccatctacagaagcatttttaccgacaataaagttggtacatgcgtttgttgtttgagaactaaaaaggagagcgacgaataaagctataaaagcgatagctcgtgtttggtgctcataggtttgaaaaaattgtttcgttcttttcatagatataaagtttaagtattttttgatgattataatttgttattgagacacactttgtactggacgagaagcgtcagcttctctcctttttggttgcattcctcgactcggtgcagctctcagagagtcatgcatgagcgtgctatccacatttagtgaatcagattgttgctttgtctttttcatttgtgcatgtattttcaccaaagagatgttggtcaatatcatgagcttgaatgttgtactataagcatctgctggattgttattattcaataagaaataaccccgtatctctttaatgccaatattattgtcatctgaaatttgcgtagtatagtggttcggcgttgatacataaagagtttgagtagccacactgtcatttttgaattttactgccataatagccaccgcatcacgtgtaccatcttgataaatgaactgagcatcgaaattaagaaaaagacgatcgccaggcttaaatgttgaatctgcctgaatcgtgtaagaacttacattaaatggtctgtaaggactaagaaccattgaccgattatctcgccaaacattagcggtatctccgcttgcagagttcaattgatatctattgatttggcttgctgaagcacccaaagaaagagcatctttactcattctatttgataaagattcataaatatgttgcaggagtcgggtatgacgcgaataataaaccatcgatgaatcaaattcagcttctgaaacaccatgcttttttaagacagcaaccttgtattttaacatcaaagaagcatcttcataatttcctctgtacatcgcatctgccaaatggtaatcgtataaaatatcctccattttatcctcttgaatgtattgtttcggaacagagggcttacacgatatcaatgtcagcaaatagaatatcgaacataaacaatatgtaagaagtttcttactcatttttgctaatcgatgtttctttatcttgaatggtactgccaatatgctctaaatctttgcgataaaaaagcaagaggattatcaccccaacactgatgcaagcatcggcaaaattaaaaatcggagaaaagaaaataaagtcttgtcctccaaagtggggaacccaatcaggccatgtagacacaataagagggaaataaaacatatcaaccaccttaccatgtaagaaagacgagtatcccgaaccaaacggaacaagctctgcaacttgataaggtgttgaaggtgtgaagattaacccatagaacatagagtcgataatatttcccatagcccctgcaagaatcatagaaaggcagatgatataccccttcgtatgtggtcgcttcaagagtttggtcatatagaagataatcacgccaatagctactaatctgaataggctcaagactaatttgttgataaaggttatgccataagccattccgttattttctataaatcgaatatagaaccaattggtaatccgaatggaatcatccaacgccatattggttttgaccgctatcttaatgacttggtctatcaacagtatcaatacgacaataatgacagccagttttccgtctgtgatgtatcttttcatactccgttgagttaattagaatgcaatagagaaaatattaatgtttccttgcattcttagatgcaacgcttaaagtagcatgaggtaccactcttaaacgttcttttggaatcaactcgcccgtgatacgatcaattccgtaggttttattctttattcgaaccaatgctgcttccaaaccttgaatgaatttttgttgacgagccgccatctgaaccaaatcttctttagactgtgtcgtgcttccttcttccaatgctttataggtaggagacgtatcatcagtgtcattaccatcttcattcatgatttgcttcatcatgctggtataatctctacgagccaaagctaatttctcgtttataatagcctggaactcttcaagttccgcatcgctataacgtttcttctgttccatacagataaattttatcaatctaattaatcaattgagttcttcaaactctattctcttttatattacattcttttttcaataaggatatgaagttggaaatcatcaaaatcagtctctactccatcgttctcgttgattttaatttgattagcaagaacttgacttttgatgtaatcactgtaatcttgaattgcagcatcactgttttcatttggtgaaatgaccacatcaatcctgtcagtaatttcaaaattgttttcttttcgtaagttttgaatacgattgatgagttcacgagctattccttctttcttcaatgctggagttaattcaacctctaaagcaacggttagattgccctcattagcaaccagccatcctggaatgtcttcactcactatctcaacatcctcccgactaacggttacctcttgctggtctacagagaaagttagctcaccgttcttttcaagcattgcaatatcatcttgtgagacattattcatatagttcgcaatgcctttcataagcttgccaaacttctttcccatagtgcggaaattacactttatttttttgacaagcattccttgtccctcaataaagttcacttctttgatgttcacttcatttttcaccaagtcggcaactgcttcaattctgcgtttttgttcttcacttgttgcaggaatcatgatttgctggagcggttgtcgcactttgatatttacttttcttcgtagtgccaaaaccatactggttagcttctgcgcaatctccattcttgcttccaaatcctcatcaatgagcgactggtctactttagggaatttatccaagtggacacttgctaaggttccacctaaatctgcatacagttggtcggcaaagaaaggtataaacggagctgcaagtttgctaatggtcaataagcactcatacaggatgttataggcagacaacttatcttcactcatttccttaccccagaagcgtttgcgattaaggcgtacataccagttactcaagtcgtcattcacaaaggtatctatcaatctcccagctcgagttgggtcaaagttattcaaatcatcttcaactcctttgatgagagaatgtaatttcgaaataatccatctatcaatttctggcgcatcttttaactttgtcttatcaaaacagcctgtcggttgaaaatcatcgacatttgcatatagtgcgaagaatgaataagtgttgtagagtgtaccaaagaacttcctgcgaacctcatctactccttcttcatcaaatttcaaattatcccatggacttgagtttgtcatcatatagaaccgaacagcatcagctccataccgttcaatcatatcaaacggattcttgacattccccaaatgtttgctcatcttattacctttggcatcgagaaccaaacctgttgaaatcacattcttaaaggctacggaatcaaaaaccatggtggcaatggcatggagcgtaaaaaaccatccacgtgtttggtccacgccctcgttaatgaagtctgcggggaagaaagctggtggaatcggtgaaccgatataattactctgtaccatcgcctgacgagcgtcctcgcctgtcagtgtttgtccttctgcattctttaaggaaagtccttctgccatttctccttcaaatggatagtgcaattgggcataaggcatagaaccgctatcaaaccacacatctatcaagtctgattggcgatacattggtttcccctcgtcattgacaagtactatctgatcgacatagggacgatgcaaatctatcttatcataattttctttagagaaatcacctggcacaaatcctttttccttcattgggtttgaactcatttgtcctgcagcaacacttttctctatttcatcgtacaattcggctaagctacctatacacttctcccctttttcatcatctcgccaaataggcaaaggcgttccccaaaaacgactacgactcaagttccagtcgttcaagctctctaaccagttaccaaatcttcctgttcctgttgactctggttgccaacgaatggtattattgagttctaccatacgctctttcttcgcagtatccttgataaaccagctatccaacgggtaatataagataggtttatcggttcgccaacagtgaggatagttatgtacatgcttctcaatcttgtaggcagagccttccattttcatttccaatgacatcacgatgtttaaatcatcggctttttccgaagcttttacatcccaaataccatttggattaaattgaggatcgtaagcattctttacatagtcaccttcatgcttgtggtatttgacaacatcaacacatttatccacaaaattttgatccagttctacaaggttatagtatcttccttgaagatcgaccatcgggcgagtttctccctttttattgatgagataaagtgctggtatatgtgcatcttttgccactttagcatcatctgcaccaaaggtaggtgcgatatgtacgatacctgttccatcgtcagtggtaacataatcgccaagaatcactctgaaagcttcactttccatttcaacaaagtgatctttgttgttttctgccacaaatactttttctgggtgagcctgcgcataattggtgatgaaaggtgctgcattgctgtccaccttttccgtgggttttacccaaggcataagttgctcgtaatgaagtccttcaagttcctctcctttgtggtgattgataatcttgtagggtactactttgtctcccttactaaaagcaggcaggtcgacatccttcgccacttcaccctctgcggaaagatatgcactcactctttcgtacgccatgatgatgtttattggctgggctgaatatggattgtaggtctgtatcgaaacataatcaaactttggacccacacacagtgctgtattagaaggaagcgtccatggtgtggtagtccatgcgatgaaataggtatctccccatgagtttaattcttgcgcctcatccaattgtgacacactggcaggagtaagtttgaacagacctgtgacagtcgtatctttcacatcacgataacatccgggctgattaagttcgtgtgaactcaatcccgttcctgcagcaggagaatagggttgtatcgtataacctttatataatagaccttggttatataattgttttagaagccaccaaagggtttctatgtatttattatcataagtgatatatgggtggtctaaatctacgaaatagcccatttcttctgtcaagcgacgccattcctccgtaaatttcatgacgttttcccgacattttctgttgtaatcctcaacagagatgtagtgttcggatgctttgttgtcgatatcctttttagtaatacccaactctttctcaacgcctaattcaacaggcagtccatgggtatcccatcctgctttgcgcaagacatgaaacccctgcattgtcttgtatctattgaatgtatcttttatcgcacgtgccaacacgtgatgaataccggggtgtccatttgccgagggaggaccttcaaagaatataaattgtggacagccttccctttctttgatggagcgatgaaaaatgtcgttcttttcccatttcgccaatatctcttcgttagttttcgtcaaattcaaaccttgatgttcggcaaatcttttacccataaatatactttgttagatatgtgttgttatttagagcgcaaaggtaacaaaaaaacttatcattaacaaacttatatcttctttttcagtttgctgtttgtttacttattttagggtctaaaaggattcatattggtagccgcacaattgctatacgcacttacaacggataccaaaattctaatcaactcggtagaaaatctcaaattatttataagcttctcttcttttttaacgaatataagcgacacaacaatttctgctttttcttattttttatgcgttttttatttgtgtaatttgtcctaaaaaatgacaataaaatgagcgttgaaaaaagacgaaatagaaaaaatcaagccacaaattctatgctattatgcacaaaaacgaccaagaaaacttattttctgtcctatagcattgagttaaggcggttggaaacatgttataagggcactattaacacgacttaaggggcttgaagcatgttaatagtcgcattgaagtaatgcatttcaagcaaaagaagaccatttgagatgccaaatttcttatatttttatatatcgcattgaaatacaacactttatgaaaagtgctcaaaatttcaatattttgaacgaaggaggaaggtagttgaaaatatggcagctatgcaaggggtgttgtaaaatattttctgaaaacaaccaaaggttttaactaacaaaaaaaacttattattttcgtttggcacaaagacaaaaccaaaaagaaagtaagtttttgaggtaatgttggaggacgcttattctgatccatacaaacataactgcgcattggcgttgaattgttcccaaagaattaaatggtctaaaattttggagattgcagaattatgtttacttttgcaaggcaaattaggaagattggcagagtgaccgaatgcgctggactcgaaatccggtataccctttttgggtatcgggggtttgaatccctcatcttccgcttcttggatatagcaaaaggatacgatttccgtttttgagttcttctgctattccaatctttacaatagattgataagctttctttgttcgcttttaagtacatggttacagcttgctgttacttaatgcgttaccagtctaaaactgacaacatcgtcaaacacaagtcttccatctcgggcatgctacgaaagaggacataaaaaaaagaccatatcttactttgttattcagtctaatatgatctttatgggaaatctaaaataggagtaggtgcttcccccacgcactcattacctctctcctattgataattaattatttatcgagccaccaacaatatcaagcaactcattggtaatcgcttgctgtctactcttattcaactgtaagtttaaggagcttagcaactcatcagcattgtctgttgctgtttgcatcgccaccattcgggcagcatgttcactggcaacactatctaacaaggcggtataaaacatgagatgcaactgcttgggaattaatgaacttaacacagttctaatatctggctcaacaataaaatcatcattcaatggctttgcttcttctgcagccttcttgcttgctgtctttttattctttcgcaagtattcttgcgctttagcggttgcaagatccgaagacaagtcacgatcattatccacacccacctctgtacttaaatcaatgggtaagaatgtcttgcgttttagaatttgtgttccagcactcttgaagtgatgataaatgagttctacttgatcaagctctccttgcgcaaacttctttgtaatttcacgagctaccttttgacactcgtgggcaatcggtttgtccgccaaatgattaaagtttcctgcagttgtaaatcctaacttctttactttatcaaaaactttcctaccaatgggatagattacaatattatcttttcccaagtggcgatactcttcgataacctgcatcatgagtttgagaacattgccattaaaactaccgcacaaactgctattcgatgcaaaaacaaccaaagcaactcttttaatttctgaacgctttttatcaaaaatggtatcattttcgggtgtcgaagccaagaatgatttaagaatatgttccaacatattttcgtatggaagcatgttctctatttgaatttgcgcatgatgaagcttacttgacgaaaccattttcatggcactcgtaatcttccttgtgttctttacactggcaatgcgggttttaatttctttgagtgatggcataattatgaagcttgatactgtgcagtcacatcagccattgtcgattttatcgtttcaatggcttcgtctgttaattgacctgaggctaaagttttcaaaacatcggcatattttgtcctcattgtttccaagaaagtgtcttgacattcacgaacgctatcaattggaacgtcagcaaataagctatttacaccacagtacataatggcaacttgctcgcctatgggcatgggactatactgcggctgtatcagaagttggttgtttttacgtcctctatccaatgtcattgcagtgacagaatccatatcacttgagaatttagagaaggcctctaactccctgtattgcgccatgtcaatcttcaatgttcctgccactttcttcatactcttgatttgagcgctaccccccacacgagaaacagaaattcctacattaatagcaggtcggaatccttggttaaacaggttactttccaaataaatctgtccatcggtaatcgaaatgacgttggttggaatgtaagcagaaacgtcaccagcctgtgtttctataataggcagtgccgtcagcgaaccacctcccttgacatgtcccttcagagattctggcagatcgttcatcatttcagcaacttcttgctggtcattgatacgagcagctcgttccaataagcgggaatgaagatagaacacatctcctggataagcttcacgccctgaagggcgacgcaatatcaatgagatttcacggtaggcaacggcttgtttagaaaggtcatcataaacaaccaatgcagattcgcctcgatcgcggaagtattcaccgatagcagctcctgcaaatggcgcataatattgcattgctgcagggtcagcagctgtagctgatactactatagtataaggtaaagccccgtgttctttaagtatttgaacgagattggcaacagtggatgccttttgacctatcgctacgtagacacaatatacgggctttccttcttcgtaaaaactcttttggttgataattgtatccagtgcaatggctgtttttcctgtttgtctgtcaccaacaatcagctctctctgtccacgtccaataggaatcatcgagtcaacggctttgatacccgtctgaagtggttcttttacaggttgcctataaataacaccaggagcctttctctctaaaggcatctcgaaactttcggtcaaatcaagctctcctaacccatcaatagcctctcccagtgggttgataacgcgtccaagcatagaatcgtttacacgaatagaggcaatacggtgggtgcgttttgctgtcataccttccttaatgccggatgtaggacctaagaggatgcaccctacattgtcttcctccaagttcatcacaatggccatcgtaccgttttcaaactccaacaattcattggcctcagcatttctcaatccgtaaagtctagcaacgccatctcccacattgagaacagtacctacttcttcaaatttcaaatctgtttgaatgcctttcaactgctgaagtagtacttctgatacttcacttggttttattttatctgacattttatgctttgtttaaattatttttttagctgtttcagaattttgttaagctttgtttgtacactggcatccatcctatacgaatcgtattcaaggatgaaaccgcctatgatatctggatttacttctgactggaaattaattgttcccttcgattggctatgaaccaccgcttccattcgcttttcgatatcttctgtaacagctgtagcagtaatcaattttccgctaatgatatgcttctgttgacgatacaaagtaatataagatgtgaaaatgtattgcaagacattttctcgtcctgcacttaacaccaagcgaataaaatctttcgttagctgtgtaggatttgttccgcaagccaactcaatcagttcctgcttcttatcttgatgcagcatgggattgtcaatcgtttgcctcaaatcggagatgtgagcatagctgtgactgagtgccagcatctcttgaaatacgttgtcctctacatgcttttcaagtgcacatttaagtaatgcacgagcatatctaacagatattacgcctgtgttcatcttatcttctatgcttggttcttttcaaccgatatatcattcagtaacttgttaatcaactccatctggctatctttggaagcaagttcttcacgaataaccttttctgctatttgaacagaaagttcagcgacctgagaacgaatatctcgaatggcattttgtttctcaatgtctatttctgttcgtgcttcactgattagacgagaactttcatcctttgccttcacatgtgctttctccacaatagagtctcgagtagcagcagcctcttttaacataaccgcttgcttttcacgagcatcatgaagaattgcatctccttcttgttgaattttggctaaacgttcagaggcctcatgtgctttacgaagactgtcgtcaatataggatttacgtttttccaccatattgatgatgacaggaaaaccgtatttcgaaagtacaaaaaagaccaccaagaaagccaagaacatccaaaagaggagtccaagatcaggagttaatattgatggtaaattctccattctatgatagtttattatttaataaggaaagcacaagctgcaattgcgaagagcgcacatccctcaatgaaggcagatgttaaaatcatgtttgatgtaatcttacctgaagcctctggttgacgagcaatggcatccatggcattaccaccaattctaccaataccgatacctgcaccgactgttgcaatacctgcaccaattccacagccaagctgtgctaatccttctgctgctaataatgttgaaatcatcataattcgtttattttttgttattaattttagaaatctattctatgaaagtttatatggatgtttctggttctggatgtgctaatccaatgaacaccgcactaagcatcgtaaaaacataagcttgtataaaggcaactaatacctccaacagattcatgaaaagaagcatcaccgcactaaagaaattcaaccctaagccatatcctacacccatgttccaacctaagaagatgacacaggtaaaactaagaatcacagcatgacctgccatcatattggcaaagagacgaatcatcagtgcaaagggcttcgtgaatactccaaataattcgataacaggcatcagtggtacgggtagttttagaaacagtggtacgtgaggccaaaaaatatctttccagtattctttggagccaaagcaattgatggctatcatcgaacaaacagctaagaacagtgtaatgttaatattgcccgtaatattggtaccaccagggaatataggaattaaacctatgaggttacaagttaaaataaagaagaataccgttaatagatagggagcaaaacgttgataattcttttctcctacagagggacgaatcaagtcgtcatgtatcgtcatcacaaacatctccatgactccaacaaagcctttaggtgtttccgttttttcatcggcattcttataccatttggcacaacttaaaaataccaaaatcagaatagcaacaacaatccaaatttgtacaactacctttgtaatacttaaatcaataggacgaacagtttctccgttgcctacatgttcgtaaatttttccgtgatgttcttcatcaaaaaagaactgttttggtaaattctttgccgtacccacgtaccattcacctgtcgtttcacttctcacaataataggcaatggtaagctgagatgcttacccttaaaagtagcaatgtgccattcataagaatcggacaaatgttccagcacaatctctggaatattcaatgcctctccctctgaattactggccattaattgaacaggtgccagtaataaagataagcaaaagagtatcgttcttatttttttcatcctttattcaatgttatcgtgtcatttagtttcacttgattgcgccttacttttagcaatgaagaacaatgagtgatgtatcaaaatagtcaaataataactaatgaaagttagacatgataccaaaatgctcgctttttccatcacaaggaagaaaacaaacatcactccgattgctgcaagcgttctaacacttgatactgccatgaagaatgttggaagatagtctgcctgtttttgagcaatcctactccacactaagatatcagccaattcaattgtcaaggcaaaagtcaaccccacgatgagtggtgtaaccatatgatcaacttttcctattttcattaccaagacaccaatcaaagttaatgctgttaacagcaaaaagctttgtgtcatgtagcgtctcttgattagcttaatatcattcatcctttgtggctatagttcaacacataaactaattacattcttttgtacctcaacaaatccactctctatttctaactgcttaagctcgcctgtcgctatttcgtagctcacctttccagactcaagagaagagatgatgggcgcatgattcactaaaatttcaaactctccaagagttcctggcacagttacacgattaacttcaccgtcaaagattcttttttctggagatataatttttagtcgaagcattattgttggtcgcttttatagtttctatatgttagcttttggctgctgcgagcagcttcttgcctttctcaatagcatcttctattgttcctacattcatgaatgcttgttctggaagaccgtctacttcaccgtcaagaatcatattaaatcctttaatggtatcttctatcggaaccattactcccttcaagccagtaaactgctctgcaacagtaaagggttgcgaaaggaaacgctgtacacggcgtgcacgattcacaatctgtttatcttcatcggacaactcgtccatacccaaaatagcgatgatgtcctgtaactcttggtagtgctggagaatttgtttaactctttgtgcacagttatagtgctctttacccacaatcagtggatccaaaatacgagaagtcgaacctaatggatcaacagctggataaatacccaactccgtaatctttctactgagttcagtagtggcatccaagtgtgtaaaagtggtcgcaggagctgggtctgtcaagtcgtccgcaggaacatacaccgcctgtacagacgtaatagacccatttttggtagaagtaatgcgctcttgcatcgttcccatttcagaagctaaagtaggttggtatcctactgcagaaggcatacgccctaataaggctgaaacttctgaacctgcttgagtgaaacggaagatattatcaataaagaacatgatatctccaccttgtccatctccatttactcctctatcacgaaactcttctgcaacggtcagacctgataaggctaccgacgcacgagcacctggtggttcgttcatttgaccatataccaaggtggcttgcgacttctgcagttcttctaggtcaactaaagacaggtcccacttgccttcatccattgctttcttaaatttttcgccatagcggataacgcctgaatcaatcatatctcgaatcaagtcgttaccttcacgggttcgctcaccaacacctgcaaacacagaatagccattatgtcctttcgcaatgttgttaatcaactccataatgaggacggtcttaccaacaccagcaccaccgaacaaaccaatttttccacctttcatataaggctctaacaagtcaatcactttgatacctgtggccaacatttccttatgcgtggataaatcttcaaaaacaggtggctgcctatgaatgggataaggattctccttcgacagttgttccattccatcaatagcctcccctatcacattcatcattctacctttaatctgatctcctgatggcatggttatcggactacctgttgcaatcacttccaagccacgtctcaagccgtctgtgttatccatggctacacagcgaaccgtgtcctcgccgatgtgctgttgtgtttcaatcaccaaatcgctaccgtcttcacgttttacgatcagcgcatcgtatattttgggtaagacagactctggatcttgacctttcgtatcaaaataaacatcaataacaggtccaataatctgggaaatatgtccattcacttgtgacataactttttatatttatatgaaactattttctaaaaataaaaaaactttagctgtgcaaatatacaaaaatactttgattgcttacttgtacaaatattatattaacagaacagtttgttatattaacatattttagacttcatgtcttaggctacctttttatatactcagttcgtcgagtaccttgatgagcttcttgtcaaaaggcttatcgctccgaatagcctcagtcaatggtatataatctatttcgttgtttttaataccaatcataatgttgcgctgtccttgcataatggcttctactgcgccaacacctgtcctgctggctaagattctgtcatgtgccgacggtcttcctccacgttgcagatgtcccaagatagatacacgcacatcgtaaccagggaactcttttttcacacgatcggcataatacaatgcaccacactttggactctcactgacaatgacaatgcaagaacgcttagatttgcgaatacctcgttccataaaatgccccaactggtctacatcagtgctatcttcaggaatgatagctgcttcagcccctgatgcgatcgcactattttgagctaaaaatcctgcatcgcgccccatgacttcaacaaagaaaatgcgctcatggctctgtgctgtgtcccgaattcggtctacacactctacaatggtattcagtgtagtgtcgtaaccaatggtagaatcggttccatagaggtcattatcaatagttccaggaagcccaatacaacggacgtcatattcgcttgcaaattcaattgcaccacgcaacgatccattaccacctattactaccaaagcaccaatagaatgtttctgaatattctcataagccttctttcttccttcgggtgttaaaaattctaaagaacgagctgtttttaagatagtacctccagacatgatgatgccgctcacattttcggtcgtgaaatctttgatttcatcgtttatcaatccatcataacctttatagataccttttatcttaaaaccgttacagataccagcacgcgttaccgcacgtatggctgcattcataccaggagcatctccaccagaagttaaaataccaattgttgtaatctgcttcatatattcgattttctttatcaaatcccaatgaggggaaatctatagattagttcttaacatctatataactatagtgcgctctaaaaacttcacaaaggtaataaatataatgtgaattgggcaaaacatttatatgaaaattctttgaagaccttatttggtagctcttttgatgtcagtgcttggggatatttcactgattcttagtctactggatgccctttcgaaaaatagacctgagggtaaaatagagttcttcttggattctgaacatcctccatgaaaagcgtagtggcatatatccgaatttatattttagtcttttgtataacctgtgcacctcgataccactccatatgcgatgaagttcacgcatgcccatcgtagaatcctcaacagaaagctgttttctgtaggaataatgaaaataatataaatctatcaataccagccagcgcacattttcataaatcgttaaaacatcatcgcttacgttaagttgtatcaactgcttcttcatactttcgttagcacgaagataatcaaacctgcttccaccaataacatgtgttaccgagtggggattgtagtggtagtagtactctccatgacaacaactcacttgcttagaaaacaaataatgaagtcgtgtactgttgtcatcactgtaggtcttacacgtgtcatcgtacgggaattgtttaaaaagggaagttttcgcagcataaacgccatgaattttccacgtcaagctgtctttgaaagcctcgtatccagaccttttttcaaaaaaatccatagcatattcctgcgccgttgaattgcctcctccaagggtgaggagcttgaaaagcacacagtccacttgtggatacttttcaaaaacctgtaaagcctgttccaaggcatcgggcgcaaaagtatcatcgcaatctaaaattgtggtgtaacgagcgttgatatgtcgaacaccttcgttgcgggcatgtgctgctccatagttttgacttagatgaagaatctcaattcgctggtctatagctgcatacgactgtaatatttcccaagaattgtccgtagagccgtcgtctatacatatcacttgaatgtctttgagggtttgttgcagcaatgaatctaagcatcttttcagatactcgctaccattataaaccgccaccaatatggcaaatgatgctattttttccatactcgtgattttagacgtgtccacaagtcggtcttttttctcaatatacgcaaagacacccacagacttaacaggacaagcacagcgcctccactccaatacaaccagccttgggttgacaacaccaagccgtaagtcaccaagccaaacatgagttggatgcctaaatattgccacaccgaataagatatattatattgataggtggtgtgcataaaataaaatagcataaaaaaatctaatgctgaaaccaaggtgatagctattcctgcacctaataactcataatagtagaatcctgcaataacagccagcaccaggacaacatcgtaaatagcctctacgaggaggtacagcctcgaattgccttttgccaacggaatgtaagcaatgggtagtttgacagctcgccaatacatcgccagcaccaaggtctgcaccatgacttgaagcgacacgaactctcgactatacagcagcggcaacaacaccggtacacctaccatgaacaccaccaacataggcgaaatgagcaacaatgacacttctatctgactgttgaccgtttcgttcaacagcgcacctgtgtgcttgatagacgacaagcgtgggaagaaatcggtttccatggcagaaaacaccaaacccgcatacgtcattgtcatcatataagctgcattaaacagtccaacggtttctaccgatcccagtacattaaggtaacgacgtatcaagaaatcggcaccgcttcccaaaatacctgccatcacaaaagctactccaatcttgagcataggacttccctgcaacaacaatgttttgctccagttaaaatgtatagcgtattgtctatgagagtaataaatagtgagcagcatttgtgtcaaagcgacaatgatgagtgaaggaacaatagcggcctgacgccagatgtagaacaatggaatggaggtaattaatgcgcctacgatgttgagaaaagagattttcgctaacgatttgagttgtcgtaaggctttcaaaatggccaattctccccccgtcactgccattaggaataccactatcgacagcaaaacaaaatgcaaagagtggtctccccagccaaaaacccaccgactgagtataggacttatcaccatgcacaccgccatacccaacagagccgtcaacatgttcaacagtctcacactgtcaatacaacgtctcatataggtctcgtcgtgctgttcgaaagcagcagacagttccctgacggcactcatgcttaatccaaaattcgtggagtcgctaatcagtttggttgtggaattgaagagcgacatcagtcccattccctcggcaccgagaagaagagccaccaacttattgcgaacaatgcctaccaagatgccaagaccttgtacaccgccaaacagaccagtgtattttaagatatgggtataggttttgttgcgattctcgtttgtcatctttgaatgaacgaataaaagtaaattttattacgtctttcccttaaaaaccttacgcgtctcaactcctgtggtgtttcctgccgccgaggtgacaatgacaacgaaccgataggcggaagcaactatgagcgaacgctggcagaattctattctcacgaatcttgctatttcttgctggaggattagagcttttctaaaatagaaatgcttttacattgttcgctcacgcaaccaatgtgaaccgaaacatcgtccgaaattcgtccgacctttttactgcaaacgctcggaagccctttgtacaaaggacttccgagcgtaatagttgcggagacatgactcgaacatgtgacctccaggttatgagcctggcgagctaccaactgctccactccgcgatgttatttcttatttgcggttgcaaaggtaagacttttttcttaaaaaccaaaatatttttatacttaatttgaaaacacatgctcaaaaagacaaaaacagttgaccatttctgtctgtaataagcaattattcatcaatctaaatcttccataaaatatttagtgtgctcgctttttttgataaatatgcttgcatcggtcaaataaaaaatataattttgcacatggtacgactgatgtgcaacgataaaaataaggaggaaatacgaatgtctatttcaaaaacgcgacaaatattggtagatgtagcacgcaaattatttgctaaaaatggtgtagccaatactacgatgaacgacattgcgatgacctctggaaaaggtagacggacgctctacacctattttagtagtaaagaagaggtattctatgctgtcattgaatcggaacttgaacgattaagcgacaaattagatgaggttgccacaaaaaagattgcaccgcaagacaagattatcgaactgatttatacgcatcttagcatgattcgcgaaacagtggtgcgaaacggtaacttgcgagctgagttctttcgtaacatttggatggtagaaaaggtaagaaagaagttcgacgctgacgaaatagacttgtttcgtagagtgtactcgcagggaagagcagatggcgatttcgatattgataatgtgaatttgattgctgaaattacacattattgtataaaaggacttgaagttccattcatttatggacgtttggggcatggtcttaccgaagagagcagcaaacctttggtcgcaaagatggtttatggagctttgggaaagaataattctaaataaacaacatcaatagttttttttgatatcattctattaattttaattatacacttaaaaatatgggacttttaacaggaaagacagccatcgttacaggggctgcacgtggcataggaaaagccattgctatgcgttttgcacaagaaggtgcgaatatcgcctttaccgatttagttgttgacgatgaacatggaggaaaggagacagaacgtgagttatctgctttgggtgtcaaagcaaagggctatgctggcaatgctgcagattttaacaatacagccgaattggtagcacaaataaaagaggatttcggttctgttgatatattggtgaacaatgctggcatcaccaaagatggcctgatgttgcgcatgaccgaggcacaatgggacgctgttatcaacgtcaatctaaaaagtgcgttcaactttatacacgcatgtgtacctattatgatgcgtcaacgtcaagggtctatcatcaatatggcgtcggtagtaggcgtacatggtaatgccggccaagctaactatgctgcctctaaggctgggatgatcgctttggctaaatcggtaggacaggaaatgggacccaagggaatacgtgcaaatgccattgcgccaggctttatcgatacagctatgacccagtcattgccggacaatattcgcaaagagtggatttcaaagattccattacgtcgtggtggaacggttgaagatattgccagctgtgccttgttcttagcatgcgacctttcaagctacatcagtgggcaggttattcaggttgacggcggaatgaatatgtaagaatggatgagttgacgaggtaacaaggtaaagagttgacgagtttacaagataacaagttgacaaggtaacaaggtaacgagttcacaggttgataaacagatttgttgacttttcacttgtttactcgtcaactgtatcaacaacaatcatgcaagtcgtttacgaagacaatcacatcattattgtctctaaacgtagtggcgaaatcgtccaaggcgacaaaacgggcgacctaccgttatcagagaccgtaaaacagtacatcaaagagaaataccaaaagccaggaaatgtttttctgggagtggtacatcgcttagaccgtcctgtttgggggcttgttgtctttgccaaaacctctaaagcactcacacgactgaataaaatgtttagagagggcgaagtgcataaaacctattgggcgattaccaaagaggcaccaccagcagaagaaggtttgcttaccgattggctggtgcgcaacgagcggcaaaacaagagctatgcgcattcgcaagagacaccaaatgctaaaaaggctgtattgaaatacaaagtgattgctcattcagaccattatcatttattagaagttcaattgatgacggggcggcatcaccaaataagatgccagttggcaaatatgggatgtcctatcaaaggcgaccttaaatatggcgccaaacgaagcaatcccgatggaagcatttgtttgctggctcgtagtattgcctttgtgcatcccgtttcaaaagagaatattgtggttgaagcacctctcccaccccaagatcgtctatgggaggcattggcatcagccgttatttgatgaattatatatgaaaaaaattgtgatagccatcgatggtttctcatcgtgtggcaagagtacgatggcgaaagatttggctcgccagttaggttatatatacgtagacactggtgcgatgtatcgtgccgtaactctctacgccctgcgccatcatttgtttttagaaaatggtgccgtgaatgagcctgagctacaacagcacatgcctaatattcacatctcattcaagttgaatcctgcgacatcaaagcccgacacttaccttaacaacgaaagtgtagagcaagaaatacgttctatgcgtgtgagccaacacgtcagtaagattgctgctatcccatttgtccgaacagctttggttgcgcaacagcaacaaatggggaaagataaaggtattgttatggatggtcgcgacataggaaccgttgtctttcccgatgccgaactgaagatatttgtcacagcttctgccgaagttcgtgcccagcgccgatttgacgagttgcaacaaaaaggaatgccagcgcaatacgatgacattttgaagaatgtgcaagaacgtgattatatcgactcgcatcgccaagtgtcccctctttgtaaggcagaagatgcaatagagttagataacagtcatctcacgatcgctgaacagcaacagtggctcgttcaaaaagcgaatgaagtactcctacagtcttctaaaatgggataactgttttaacggtttttttcaaaaacaagcgttattttattggttttctttcaaggattttatttcaaacaccctatgacaaacaaatttttctcttttaattcctcttttcggtttttgcttgcagcggtatgtctcatgtttgctcttcaggtaagtgcgcaacgtcgacacaccgattatcaagtggtagaaaatgttgtactttaccgtggtgctcctttgctgaccgctgacccctattcgtttgtagacttaggctacggctatgccaaggatgctaaccatgtttattatcttggcgaggtgttgaaatatgtagacccttattcgtttaggctgaaacgaatgtctcctcatgacggttaccgtccttatgattcgccattttaccactcacggggatataaaattatgtcgaatgtggtactattcaatggtcataaagtgtatgacacctccgtaaatagtttccgtgatttgggtggcggttatgccaaagacgctttcaacgtatattttatgggtgagaagatgtctgaaggcagcactcattcttttcagtatttgggagatggctatgccaaagattcttttgatgtttatttcttaggccgtaaggtgaatggtgccagtgccaactcctttagaatcgttggtgagggttatgccgaagatacctttaatacgttctatcaagggcagaaagtcaattgagaagacgagcactcttctttcctcggcagttcagagagcaggcattacatacgaaagaacaaagaaaaatcctcaagtataaggctatcctacaaatttcctacacttcatctttacatcttgtcattggcgtacaggtagcaagtgattgtccatgtttccacccttgtgagggtcgtatttgattccagaaagagctttagtgccttgcttgttggtaatgacaaacgtaaacatccacttatcaagtctaatgccgtctgcgtcagtgttgggcaacaccatcaccaccttattccaccctttgtgcagttgcaaaataagcggtggtctggcagttaggttttcgttgcccatgggtgtttcgttagctacacgtttccctgcatgtgtccaaagtggtggtagtaattctttgtcgttccagtatatcaccgacccctttctgtcccacttgccatcttcgggtgctacgtcttgttctgatctgctgtagttttgcaactctaccaaagctcctgctgtttgtctttttggcgagtacacatacgtccatacataggctgtgtcattggagtttttatcgtcgtatatggctggtaccgtttttcgccaagtgtggttcagataaatgcctgcccctgttaccacctgctcgtcaatgggttgattgtccgacagcgaacttgctattgcccagcgcacattggtttgccgcacatagggaatgggctcgtccctcagacaatggtgtttatgaaagagaaaccgcgtctcccaatcgctaaagtcttccagctcgtctccagtattgggcagcatcgttccgccttgttctatgtattgcttacctccgccttgccatgcccttgatgccgatgcgatgacactggcgtagaaattgttatacttcaagatattgcgctcgccgtctatcttgtggtcattccatgtggcacaaatctcgccagccacttctggcgaccctttttgctgataataaatattacttttgtaaataccaacgatgtcagcaaatacatcgaagtggttgatgtagttgtaccgacagtcaatattcgggatgtttgcaaccaaccttcctgcggtactccatagttgaaccatgtcgacttgtgcaaatcctgcctgattgggtatccataccacagctttcttaccaagcttcctcacccagttggtcatcgtctgcaaaaagtctgggtaggttataggttgctcgtcgccacctatatgaatatatggagcatgtgggaaacactctacgagttctttcaagatgattttcagttcagccaccccttggtcagtttgcatactgtgtcccatggcacgtacaaaggcttcactgtgtccaggcatatcaacctctggaataatcttcacaccgtaacggaacgcataactttctaagtcgcgacactgctgttgcgtgtaatattgtccaggaaaacgagtcatggcactactggcagtgagttgtggaaaagcctttacctcaaatctccaagcttggttctccgtgagatgccaatggaaagtattcaccttgaaatgggcgagcagccttatttgtttcttcagctcttcgatagagatgaacgacctccccacgtcgtgcatgaatccccgtagtttgaaagcaggatagtcgataatatcgaccgcctcgaggcatggcgtggagccatagccctctgccaacatctcgagagtttgcgttgcacggataacaccaacaggcgacaccgcctttattgctatggtgctggggtgaatggtcagcctgtacgcctcgttttcatatcccgcaaggtggtagtcttcggtgccttctatgcgatctgtcaggttcaccaccactttcgcgcgagcgttttgcttgatagtgcatccatgttcagtgaagaattcttttaggatgagggtatttgaactgtcggctatctgtatgtcacgtgatagcctgaaccctttggcattgagttttttcgcaaacttggcacgaggcaaaaggtctttgagcttggcatccattgtattggatgcaatgacgaatgtaagcaataatagaatgaaacgtttcatcagtacctttctttaattctaatgtaatcgtttgaaaatgagagagctaatcaacttaacatttcttgtgaaatttatttgagtagctggtcattatactttacattagactaaacatcaagtaaatgacagtagaactactcaaccaatatacggaaatctgcagagttgctatcaaaagctcatctgcaaaattaggcaaaactttcgagaatctactcttggaaataatcttattgttcgtgacgatacaaagaaagataaattttactcaaatggagcggtactgtacgcattgccaagcaaaacacaagaataagctgaacttctcctacaacgccttattagcatcacagaatgtggcaaaggtgatgatgaaggaaaataggctaccgattttcatgacttctttcaaggaaatcatggcaagcacatacatcgcaaaattatttttcgacaaatatctgagcgtaccgaaccgaaagttaattggtcatactatcaaagaactctttggctggcagcggaaagctgtgtagtcattatctcaaacttaactattgttgtaatgaaactatagaaattgctccatgacccgaaaatattcctcccaaaggagtgagtttctcagatttaatttgtatttttgctatgtcatattttcaatattatctatcatggcaaagattaaattatagattgcaaaggcacagagtaacaatagtggtgcagcaaaggggacggcggagaatccttacaccgaggcagaattcgaggaaatgctcaataatggacaaaagttgaacaactctgtcgttaaaggatatttcatggaacgtccctatgacgcaaaattggcagaaaagtcaggaagcgaacgcgccattcagcttggagtatataacataatacccaaaacacccgggaaacgataccaatggtatttggaaggagtgccaggatgcgatggaattgccattcattcagggaattatgcagaggatagtttaggttgtctgttgacaggaacgtcattagtaaaaatcggtgactcagattacatggtgcaaaacagtaagaataaattggctgctttgtttgaacttttcaagatgtacggagcaggcaatatcagtataaatattattcaatgaggaattacggacttgtaacattgctcttaataatgctgtgtccggcactgcgggcgcagcacggaggagtgtcggcaagaaggttgcgggcagcctatgaggcgtcggtcggagagggcggaagagcgcggcagaagtttttcttcgatgccttccccacaaacggagaggattacgagctcatcttcggctattatccggaactgcgggactcgtcgctttacaattgcgctgccgacatggtggaggccttctggtgtcacgatgcgattcccgactcgctcttctacagcaaagtagcagtcgtgacttgcgggctgaggtacgatgcggacgcaccgcgctactggcaggcacgcttggaaagtgtgctcatgcggcatggcagagatgcggaggctctcatcgaccgagtagcaagccttccgttaggtgaccagatgcgcttctggagtttcgtgtggtcaacaacgctcgctgacgagggacagagcaagcgagactttcaccgtggttacatccttagacggcaccctcagatggtgcccgtatacgactcggcacgcaagctctttttcaatggtgtaaacctttcttcggagccttcgccacgaaactttcccgaatgcgaatgattatgtacacgacagcatcatacttcaagcgggcggccatctgcctgcttgccctcgccagccttgtcaaggcatcggcgcaaagtcaagacctgcgtcccgaggagattgcagccgcctacgccgccctcctttcctgtcccgacagcctcgcggaggcctgtttcttcaacgcctttcccgaccgtggggaggacttcacgctcctctacgaacctcacaacctgacggccggtactactttcgacctctccggcagttcctgttgccacacctcggccttttggaatctcaagcagatacctgccgaagtactggccgtgaaggcggtacgcatcacctgtggtctccgcttcagccaaggtgcatcatggtactggcaatggcatctgcgccaagcgcttgcccagcccgagttgagaggtgtgattatagatgaagtagcacgcctgcgcagcggccatcagttggagttctggggcatggtgtggtcatcggcagaagccgacagccgcgacctgctcttcgaatcccttcagcccgacctcctcacccgccatccccacacagcctccatctccgcctgcgccttccatctcttccacaacgaagtcagaagcagggaatgagcaagtgatgaaatgcctgcgagcaccccgggagatgcaaactgggcattaagggcaagagtcccaacttttatggttattccattttgcctataacagaaatcaaatatgataaactatccaaatattacatgacaagtaataacagatatttaatgttaaagcgtatcggaaatcgtatctctttcggttgttattattatctttacgatggaaatagaagaatttaagtaagagtatttgtaacaaactttcaatattatctatcatggcaaagattaaattatacattgcaaaggcacagagtaacaattcgggaagcacttgtgcaggcggaagcggtagtagttctacagtttatagtgtttccaaggcggtttcttatttgaagagtcattcacagccttactatatattcgttctgctactctttctcttatatgtcccgaaagcctgggcacaacatttaacgacagccgaacaaatcgaacacttttacgattgctatatggaatgttttgagaaaggagaccgtagtatggagaacgatttgctgggtaagttcttgacgcccgaaatgcagaaaaaaagagtacgtttggcgaatgccacagattcagaccctatattgcgtgcgcaggatgtgtcggagtatggtcgacagtccttgacatgccggcatctggatggcgattggtacgaagtggcatatcgctgggatgcgcaggataccaccgccattcacataccagtgagagtagaagaggacgagaaggggcaggtgcgcatcaactatatcacacccgagtggggagggagacgctatggcaaccatctatttgatattcctgccccaaaggtggtgaatcgaaaggatgcccgcactttcgtggaaacctttttcaaagcctatacctatccctatgtgaagatgtcccacaccttggagcaggatttggaacaactgcgcaaacgatactgcacatcatcgttcctaacagggaaatatgcagccatcaaacaggagtatatgaaggattatgaggacatagatccgttggttgactgcgccgacttcgatgcattctggtatccctccatcaagattgactctattgatagtcacaccttccgcttcggttatgatacatgtgtcaagggttggcaccaagatataaaggtggtggtgacacgggaaagtggtcgtttcctcatttcggacatagaagcggaataagggttgaggtaaggttgtattttacaggaatgcttatactaattcaataaaataataccacagtgacaattaacaaaacaatttttactttgattattttactgtcatcacatgttcatgcacagcaagtttctttccacacattcctgtccgagcacgaaaaggtggagaggttggacagtgcgtcctttggctgtccatacgagtttattgaaaatgaaaatcggtattccaagttccttccccctgccaatgatgactgcttatgcaaacagaaagatataagatggcaaaggggaagttacgttgagttcaagaatttcatagcagttgccctacaacgctattgcatggactatcaagacggcaacaacggatggttcatggagaatgatgggtttgactacatgctcatcacatattcacgcgatggcaagatgattgattgcaagtccatcggtcattacggtacgactgcttacaaaataggcataaaggcatcggacgatggaaaagccctcgtggtggagcaacggacattagacgattgcagcctgttggttcaatacaagaatctggaatacacgtcctgtacgcgcaagtacacccttaattcggacggaaagataaaggagagcgtcaccgttgctccccacaaagagattgtggatgtcctttcctcggtaaagcaattttcctttgagcaatttaaggcttactttcaaagacaggacaaccccaagatagaccacacgctgttcaccagggaaggaggggacaaggaactgcccttcgaatcatgccttgcactgattccatatcctttggactacaactgttggcctcgcaacatttggtggacagcctaccagtacattgaggacgaggaacaattctcctttttcgttatcaaatcttgcgacaccccaaagataggattttatccatatagtgacaacatgatactggagttccacaaagatggaactttcaaaggcgcaaggaacgtctatcatttcgatgacaactatttcgtagacgaagatatgcagaacaacatgataacaaaaacattaaagggtatttttgcagagagggcaaggaaataatgaccaaattataatcatatcaaagatgtaatgtagaattataattctggaaatgtgttcctcaatgctaacctactatcctatctgtatagaaaaaaaaactaacaataaagccagcagaactactcaaccaatatacggaaatctgcagagttgctatcaaaagctcatctgcaaaattaggcaaaactttcgagaatctaatcttgattacttgaatattaaattggtcagctactcatcaaaagttagtttggtctcttgacattaagatgtgggtgtttttgtcacatcgcacgcatcttctcatcgttgttgctccgctctatggaatcgtgttgtttccgttttccctttgtaaaggtataatagatggagaaggagaaaaagggaatgaacctgccatacatataggttttccgataaatcttattggttaaggtataactccagttcttctgcccgcaaatcaggtcattgaccgacaatttgcaggtgagtttgtcgttgaagaatgtcttcatgcacgagaagtccaactggtggtaatccctgctcttgccatatgccgacttggattcggagatatagcggtagagcaactgcatgcggatatccagcggaagaacgaaggtgtgctgcgtgtagattttccagtcgaaattgttgacggaagtctcggaagtgatatatttgtcgaaactcatcctcgcttggttcacaatcgaccaccacgatgctacgttgatggggacatagaggttgagattggtcagccggttcttcaccccatccacataacttgccacggtcattgcctgtccgtccacggtttctgtcctgttgtaattgtcaagaccgttgttgctccacacgtgcgtgagggtaaggttgtatttctgcgccaactggtaagtaacgctgatgtggttgctgtagtcgggtcgcaaatttggatttcccatatttagcgtataacgagagtgataataacggtatggcatcagtcgtatgaagcccaccctctgcgttcttcgggatgcggaaaatatcatagtgtggcatttgctcaagcggtaagtgtagtacaagctggggaacaggtctaaatggcggtaggagaagtcgtagccatcagctttggcgtagttgtactcaccccgcagccctgctgtcaggttccatttcttgcccgaaaggtcgtatttcagatatgccgcttgcaggtcttccgcatatttaaacgagtagcccttgccgggactgccgctccaactaccgtttgtgagtgtttgctcctcgaactcgttgtcttttaaggaatggctatatttgatgccagccatgagactgccatgcttcaagaagtcccattccactcttgtttcgcccgaaagaatgaaaaaaggaacggattgatgatggcgcaggttctcggtggaaaggagaacaccgttgcggtcgtaatttttgtactcaaactcatcgtcattgggataaaaactttttgtcacatctgccagcaccagcagtttgttgcggtcgtccggtccaaacttgtgtgtaaagttcatcgatgcgctcagcgtgttctggttttggatggtttcatgcttgatgtcggtgtgcaccgttttaggagcgttctccctatccaccaaggtgtagccgttcacatgctcatctttgtaccagtgtgaatagttgaggttcaaggcgaatttgtttctcgcattgaaatcgtagtagatgttcgaattgacagttcctatcacgtcgtccattctatcaactatattgttttggtagttgactaacttttcataattcttggtcaattcatccgcacacaaataacctttgccgaaagtgccgttggcagagatatcaaacccgaactttccttttccgtagccataggagacgtatggtctgacggctttgtaattgatgaaatctacagagccaccgacaaccagttgcgtgccgctttgccgttctttggtgagaatcctcaacacaccgcccatgccctgtgccgcaaattcggcagaaggattggggataatctcaatcttgtcaatggtttccgaacggatgccttttaaataagccacgagttcgctgcccgaaaggtggatgctgcgatcgtctaccatgacatgtgcaccagaaatgccattgatggaaatgtcgtttccgttgagccacacgccgggaagttgcgtcaagagcgattccgccgtgttgccaatcccaagaatggtgttgccgatattgaccgaataacggtcgcctttataagtgaccgtggggcgaagggtggtcacctttacttcttttagtgttttcgtgtcttcatacaggcggagtgttcccactctgttttgtgaaaaacgcacataagttgtgcggtagcccacgaaagacagtcgcgccaatacgggatgaacgtcgcatggaatgacgaacaatccgtcgctattggtcacgccacccgtgatgaaagaactgtctttgggattgagcaatgccacgttggcaaactctatgggacgattgttgcggttcaccaaatgaccaatgtatttccgctccgccttctgtacacactccacatagatgtcgttgctttctccaatggtcattagaatgggatagaagccaatcaattgctgaatggcatcgcccacacgcttgttttggacggaagccgtcaccttgaaatcttccagttcattgtaaatgaacacgattttataatgtgtgttttgtccttggataaatttgagagcatccgacatggagacgttgcgaaactcgtgcgtgatgcgctgtgcaccgacattgaagacgagagcacacatgagaataagaaacaagacttttttcatggctcggtcgtgctttgtggttcaacaatcagttggttctcttccaattggaattgcagggttttgaagtggttgagcatttccaccaccttttctatggggtacgagggattccattcgaagaacaagcgcagttgttttacatcctcgttgcggtaaaccacattgatgtgatagtggttggatagttctgcaagaatgttttccaaaggcacattgtcgaaaagttttacagcgggtacggcaatcgtgtcctttcggacagtatcggcagcgacaaccgttcttgactctttcgcattgttcaccgcagcggaatgtccgtttgtggaacggaaaccgaaaaagcccgtgctgatggtggcaatggcaatgcccgaaaccagcaacacgtcaataaatacggctgccacttttcgccaaagcgtaacgacttgtgcctttaccggatattcgtgagccaatcgtttccactctttgtccacgtcttcttccgtcagtcgggaatcgttctcgctggcactggcggcacttttcgtcttggagagcaaggaatacaattgcctacattcctcgtcttccaacagctcctcccattgctcatgagtatattcatgggggtgttccatcatttgaagcagaagttcagtcttttccatttctacctttttttagttgttcacgtaactgtttcattgcatgacgcaaatgtttatagacggcagtctcgcttatgcccatcatttgggcaatctctttgaaagtgtgcttggcatggtagtgcatcaacaggatttcccgacatctgggcggctgaatcctttccaattctttttccaatgcctttatctcctcctccaattttctcggctcttggcattgctccaattcttggtcgagaagataaagtctttccacccgctcctgaatttccatgttcctgatgcggttcaagcatctgtttcgcacgcttgtcatcaaatacgcaactgccgtatccgccttcaagtcctttccactctcaagaatgtaggcaaagacgtcgtgcacaatatccttgctctcggcatcatcatggagcatgatgcttgccaagcggtacatttcacggtaatgttgcttgaagagcgatgcaagttgttttctgtccgtcatacatctatattacacatgaaagtggatttactgaaccaaaaatggaaacttttttacgaaagtataaaaaaatcgtcttattcgtggcggttttccaattaaaaagacgatttttcacttcttttctctgataccaacccgctgttaattctcatataatcggttgaaaatgaaggagttcataactttatacaactaataaaatttgataaaatgactgaaatcagcaactttatggcagattaaacatcatgtaaatgacagcagaactactcaaccaatatttggaaagctgcagaggcattatctcaaaatttaacgagctattgtttcataacaaaacaaaattacagcttttctctctaaatgaagcctaatgcccaaaatactttttggagactatgccctactctttcattaaaggacgatatttttacaacaaaaaacacggtatcaaaacagcttttgtaaaattagagatacgctttgtggattaaaaataaatgctgaattttctttacaaagtgcctctcataactcgcatgtagacaaccaacgacaaagtgggtcgaaaatacgcgaattttgggcgaatttcgtaattcgttgttattgaacacattacacctaaaaagcttcttttctttcctatttttaccattttttggcagttaaagcattaagataagcctgctatttgcatgctttaatgctgttgaaacatgtgaataacaccgctaatgtatgtttccaagcccaaaaagtcaatgttttagactcaagagacgtttattttgcgaaaatcagcccatttttgtatatcgtttgcctattgattttttctattttgaagattttagatggcggttttttggtaaaataacaggacaaaattgtaattttgaaagtgcttttgttggttcaaatttaacatcatccaaatattaagttagggagtcgtaaccatagatagaaggaacgtacgagacgtggggacgatgtagaaccacttgaaaagtgtgctgtttcagcggaaagtaaccgatggataagaataagttgcatggctctctatagcctccaccatgccatctataggtttacaatatcacagttggtacgcagcgttgatgacaaccgagctactggaaacatgatatttgccataagcaagattgattttgaagcgatgaaggttgatgcctgccccacacgagaagcctgccccatgattgctctcctcgtcaatgctggtaatgctcatttcgttggctcgcctaaagttgtaaccagcgcccacccatacttggtcggagaataagatgtctatcccagcaaccaaatgatgtatcagtttgtagttgagatgattgagatccaccaaagtggcatgaaaccttaaaggagtgtgtatcaaccgtttgctcacacctaattgtacatccagaggcatgctttcgtaattatcatcgtaggctttcaactgtcctcccatgtttttggcaaccagggatgccgaccagcctttgtcagggttgtaataattaattccaacatcaatccccattgccaatgagttgtagccaccaatataagatgtgagcaacttagccgaaatgcctccagaccataagtcggacaacatataggagaaatagccagacagtgcaatatctttggctgaaaattctcctatttggacattttcagctgtagtttgtttcatctttccatagtcaacatattgggcagcaagagctacagatgccctttctttgatgagtttgttgaaagccacactcagcatattgacgccagacatgtaattgaggtagttcaggttgagtgttttgtcactcaccgaagtgagcaatgcggggttatggaaaacaagggattcgtcatcttcaatcacagaaacgttatcgccacccaaggctgccgcatgcgcactcatgggtacacgaagaaagttgtatgttgtctgactttcttgtgcataggcggtgctaacaagaaataaagagaagaggacgaatgcggcttttttcatttaattttcctaatttatgtgcaaagttacaactattttcaaataacttattatctttgtgtactaattcgtatactgaataacggaagaaacagcagtttattgcagtggctcaagaggatgcggatgaggaaaaagtaatcatggtagtgcatcagaaatcggataaaccctctcatgaagagagtaagacaacaggttttttgttaggtctcattctcgttttgtcgctcttgtttgttgggtttgaatataacagccaaccacaagaggacacaccgtcggaggatatgttggacgaattggcgcaagacattgagttacatccagccatagacgaaaaagaaatggtgagtactgcttctcaacccaccacacaggtggttactgaccgtatcaaagcggtagatgctcccttgaaacaacaaatagatagattgctacccaacacagccagtccgctacttattggtgatggaagtgcagaggcattaaatgcgaagatatcagaagcccttcctcctatccctttggtgaacaaccagactcagaatatccgaatagtagagcagatgccagagtttcctgggggtgggtctgctttcgtacgatggctgactaatcagttgcgctacccgccagttgcacaaagtaagaaggtgcaaggaaaggttgttgtctcattcattgtcaataaagacggaagtattgccgatatcaaactcgaaaagtcggttgatccgtatttggatagagaagccttacgtgtgatacgcatgatgcccaattggacacccggtgtacaaaacaatcgtccctgtcgcacaatggtggcagtgcctgtggtctttaaattataaaaatcaattaaatacatacattcctatgatgacatctaatgaaatgctgaagttaatcaatgagcaactcgagcgtttgtctgacaaccgagagccacgtcatctttacgaaccgatagaatatgtgttgtcgttgggtggaaagcgcattcgtcctatcttaatgatgttagcttacaatctgtatcaggagcatccagaagaaatcctaatgccagcctgtgccattgagacttaccataattatactttattgcatgacgacttgatggattgtgcagacctaagacgcggttgtgcaacagtgcataagcgttgggatgcaaacactgccatacttagtggcgactcaatgctggtattggcttatcaacgcatggctacttgtcgggctgattacttaaaagaggtgatagacctgtttacccaaacggctttagagattggagaaggacagcaatatgacatggactttgagaagcgggatgatgtgacagaggacgaatatattgaaatgattcgtctcaaaacaagtgttcttttggcttgcgccttaaaaattggtgccattttgggaggtgccagtcaagaagatgcagagaatttgtatcgatttggagaaaaaattggtttggcatttcaattacaagacgactaccttgatgtttacggagataccaaggtgtttgggaaagccataggcggagacatcatcagcaataagaagacttacatgctgattaacgcttttaatttagcaaccccccaacaacgtgctgaactctccgaatggatgcaaaaagagcaattcgataagcaagaaaagattgaggcagtaacagcactttataatgccatgggaattgagcagttggcaaaagataagattgcttattattttgaagaaagcaaaaaatatttagacgcagtgaagttgcctgccgagcgaaagcaagaactgctatcgtatgccaaccaactaatgaatagggtgaaatgaaaagatgtgaaatccggctgttcgacttttttaagaagagttgagtagctgttctttagcatgaatgaacctcattgccaagttcaaagtagaaacctcgaagaattagaaagtctcgttagatgtccaacgctcaaagtttgaagtttgttgatactcatgcccatttggatggagaagagtttaaggacgatttgcctgaagtgatagtacgtgcgcaatcggcaggcgtaggcaagatatttgtccctgccattgatttggcacacttcccagatgtaatgcgtgtgagccgtaattatcctgatgtggtgtacccgatgataggactacaccccgaagaagtaagagaagattgggagaaggtgctggaagaaatgaaatgtttgctacaacaaaatttacaagcaccgaatgacaatcctcgcatcatcgctgtgggagaggtaggtcttgactactattggagcagagaatatgaaggtgaacaactgaaagcttttgaagaacaggtaaagtggtcgattgcatttggactacccttgatgattcactgtcgaaaggctcaaaatgagatggtgaaattgttacgaaaatacgaaaaagacttgcctggtggcgtttttcattgctttacaggaaacgacaaagaggcggcagaactgttaaccttcgaacgatttgctttgggaattgggggcgtgctgacctttaagagtagtcatcttcgtgaaatgttacccgccaacgtacccctgaatcgtattgttttggagacagatagtccatatatggcgcctgttcctatgcgtggaaaacggaacgagagtgcatttgttgcttatgtcatgaagcaattagcagagagttacaaaataccagaagaagaagttatacggcaaacaaatgcaaatgttcaacgtatttttggaatacgaatggatgaaatgttgtaggagcatgagattattgaacgccatcttcgcattgttgattctttctactactgttcaggctgatgagactgattcattacaccattataactattccctccacatcatgccgggtaagattctcgctttggacaagtatgcagcgaagtggattagagagacgaacaacctatcaatagcagcggaaatagggcgagtggcattacccacagacagcgatgcttatgcgtcagactttggatatccatcacttacttttggtgtgagatacatgcttaatcatcaggtacgcttacgacgcagcccagatacggcatggggaatggcagaaatggtggactacgactcacacttggggaatacgctctccttatacggcaaattctatcgcccatttgctcgtcatcaacattgggaaacagcctattcgttgagttttggcattggttatagccatacaaagtacaacaagcaaaacaacatcgacaatgagttgataggaacaaacgcactgatttattttggagctggcatacatgcaacctatcatctcaacgaacaatggggcattagaggcggattggagtttgtacatcatagtaatggtgcgctttaccgccccaacaaaggttccaactctttaggaacatctatcggtgtggtatatgagccttattacaacctgttggaacatcaagcaaaagcctactcgccacagccctttgagcgatattggtatctgaatttatccgcaggactgggagctaaaacgatgttggaagattggctcacaacacaatttcgaaccccctcttctcatcccgattatcgtacggaacacttcaaggtttacgcagcctattcgatgcaggcagacgtgatgtgtcggtatgcccgtcgttgggcatcaggaatcggcatagattggttttatggcacctatgcctcgcacattgccgacttagatgcgcagcaaggaaatgtcgcaaagcacagcccatggtcgttaggaattgctgccaagcacgaagtattttatcatcaattgtccttgggaatgtcctttggttggtatctgcatcgtcagatgggctataatgccctgttcaacgagtcacgattctatgagcgaatcggattgcattatacattttcttcggctggcggactgaaactgggggttaatatcaaggcgcatgaaacgaaggcagaccttacagaactcgttatagcctatccgttccggttgtgataatgcgcatctttttgtgcgtttcttcagaataaccgcaaagttttatcgttttttcgtccgaattaaagataaatatattacttttgcaccagctaaacgctaaaggaaaggtgctcgagtggctgaagaggcacgcctggaaagcgtgtaaccgtctaaagcggttcgggggttcgaatccccctctttccgcaaagcatgtttttatgtagcttgcaattttatgagaaattgccatttccactaagctgaacatttttaagagtccttcttttataaataaagcaacatataaaaatgacgattgcttccttccaagaaacttgagtcatgggaaaatttactgctttttattgacttgtaaaacacaaactcttgctatcgaccctctgatgggatgaatttggtaagtgataatttatttttttcgaaggatgtgctataaattttgtagggataaaactattgtagtacttttgtataaagaaaaaacgaatgtattagttttgcactattccttggtgaataactgagtacctaagctgtctccgtaggcagaagtacatagtgcggataacaagaacggaaaggaataaaatggaaaaagacagtttgattattgtgagtgggggcatggattccattaccatgctttacgagtatcaacagcgtatcgctataggcgtttcgtttgattatggcagcaatcataaccaaaaagaaatacctctggcaaagatgcattgcgaacgattaggcatacggcacatcgtcattcccctgtcgtttattcacaattatttcaaaagtagcctgttggaaggtgatgatgctattcccgaagggcattatgaagaagagaacatgaaatcgacagtggtcccttttcgcaatggaatcatgctggctgtgggttgcggattagctgtaagcaaccatttgaaatatgtgatgattgccaatcatggcggagatcataccatatatcccgattgtcgacctgagtttattgatagtttttcgcaagccatggctgctggaacctttgaaggtatcactattttagcaccttatacacagctgagcaaaggtgaaatagccttgcgaggtaaaaaactgggtatcaattatgccgaaacttggtcgtgttataagggaggagataagcagtgtggcaagtgtgggacatgcgttgagcgcaaagaagcattagcatttgcagacatcaaagacgacacgccatacgaagactaaaagacattgaaaacaaatagaaatcaaaagaggcaaggaaagaaccaataccgttctttcaacgcttactcgtaaaacaaagaaatatgatttattgcgtatccaaacgtatggaaattagtgcggctcaccgactttcgctctcttacgaaagcaagtgtcaatgtttgcatggacataattggataattacggtatatctttttaagaaagataaattgaatggcgatgggatggtgttcgattttacgcacatcaaaaaggctattcacgatcaattagaccatgcttacatcaacgacatcattccttataatcctactgcggagaatattgcgcgatgggtcgttaatcaattcgacgaatgttataaggcagaggtacgagaaagcgaaggaaacgtagctcaagcgatagacgaaacaaagatagtaggtatagaaaaccttgtcatgtaaatatagcaggaatgaatcacgatgtacgtacctacaaagtaaacgaaatcttttattcattacaaggcgaagggcatcatgcaggtaaagcagctgtctttgttaggtttgctaaatgtaatctacactgttcgttttgcgatacgaattttgatgagtatacagaaatgtctgcacaacaaatcatagaaaatgtgcaacaatatgcgccctgtaactttgttgttatcactggaggagagcctactttgcaagtaacggctacgctgttgcagatttttcatgtacatggctattatgtatctatggaaaccaatggcactcatcccattcctaaaggagttgattggataacatgttcgccaaagaaagcatttatagaggctggagatgtgcaaattaagcaagccaatgagattaaagtggtgtatgacggcatacaccctataagtacttttggcattgaggcggaggaacgatatgtgcaaccttgtgacgtaggtgatgaatcaaggaataaagaaattctgcaggaagcaattcagtttgtgaaaacgcaccctcaatggaaactttctttgcaattacataaactcataggaattcagtaatatatgaatgtttatttgactttgatttacaatgaactgatttgatataaatctaacgaataaaagtccgaggaggagaaatatttttatcatggcctttgcataaaagtaactaattttacacttattataacaggcttgtttggttttcttcttcaaaatatgtacctttgaaaattctaaaaaaggagtgctatttaatcataaaactttattggcagaaatacaaaatgacaagattcattattaaacaaatactgtgtttgctttttctttttggaggaagtttttgttgtatggctcaaaatgcggtaagtcaagattcagtcagcgtgcaagaaagcgatagtgccgcacattccgagctaaatgctgcgttagctgatgtagctgacaccactgttgccgaacctcaaacaggaggtttacaccagttcttgaagacaaaattcatagaaggaaatgcagggttcatgtctttggttgcttcggtgttagtattgggattagcattttgcatcgaaagaatcatctatttgagtctttcagaaatcaatgccaaacaatttatgaaagacttagaaaagaaaatctatgcgaatgatattgagggtgcaaaacaacagtgtttgcagacacgtggacctgtagcgtcactctgttatcaaggattggatagaattgacgatagtattgaaaatatagagcggtctgtcgcagcctacggttcggttcaggcaactaacttagagaaagggtgttcatggattacgctctttatcgcaatggctccttccttaggcttcttaggaactgttattggtatgattatgacattcgaccagattcaaatggctggcgatattagtcctacaattgttgctgctggtatgaaagtggcactgattaccaccatctttggaattattgtggcactggtattacaggtattttataactatatcttgtcaaaaatcgaccatatcacagcccaaatggaggagtcggccatcacgttattagatacgctcatgaagcataaacagtcttaagatgaaacatatagatttgcatcatcgctctacggaacggatttcgcagcttattttttattttttgataggcattacgtttgtggtgtttgcgcttttttatcttttgggttaccagcagccttatcttgataacccagacttcaatgaaccattgctgactaatttgctcattttcgccatgtatggattcatttttatcgctctatgcgtaaccatgtgggctgtacggaaggaaattcgctgtggaagaaatcagtcaagacttattcatggtatccctgttcggctcattagaagatgcgtagctggtggaacttgccttctcatgttaattacatttgcttgtgcctccaccaatccagtggtgagtaatggcaaaaactttacgaacaacttgctcttgcgtattgcagaccagttgatttatacctcctctatcctactcatcgtagctattggtgctgtaggatatggcatcacaagatatcgaagaaaacataactcacaacatgttcattcgtaaacgaaaacatcagattccaggactgaatacaacttctacggcagatatttctttcatgcttttgatattcttcctggttaccacgtctatggatgtggataaggggttacgtcgtcaattaccgcctgcacaaccgaagactacacagcaagaaagtattgtagataaagacaaattactggaacttagcattactgcagacaacatcgtgatgcagaatggacacaaaataaggatacaggatttgcaggtacaagtggaagactttataatgcgacttggtaaagaacatttaattacgattaagactgctccagaatcaacatacgatacctatttccaattacaacattgtttgatggcagcttacaaagaggtgcgaacaaaatgggctcaacagcatttcggacattcatttgatgattgttctgatagtgaacgacaaactgtcattgagcattatccgcaacgtattgccgaaacctatcaagacgcggaaggaggaatgagccgatgatacaatttagacgtaggcttcgaggtgtaccagaactaaacacagcatcgttacctgatttgattttcactgttttgttcttttttatgatagtgacgcacatgcgcgaggtaaccttgaaagtaaagtatcgagttccacaaggtacagaattaacacgacttactaagaagtcagctgttgtttatctgtatatcggaatgcccatcacaagttttggcaaagcgacagggcaaccaatgcaggtgcaattaaacgatcgattagtacgaattgatgaaattgctgactatgtcagtgcagaaagagataggatgtcacccgaagatcagcagcaaatgattatttccataagggctgacaagcatacatccatggcaactatcaatcaagtgaagcaagagttgcgtaatgccaaagccttgaaaattagctattcagccgaagatgtgaagcaaaaatagcaacaagaacatttttacagttcaaacaaaagtggttgtttacccctttatagttacgcatatttttatctttttttattatttcctttttgaagtaataatctatcacaaaaaaaacttaaatcgttgtgaaactcaacactttattgtatatttgcaaaggaataaaaagaataaaaatcttcacaggttttccatgaggtatctttaagtcaggattcaacgaataaagctaactaaaggtaaaagaagagaatgcaaataggtctggagacacgcgcctttttaggtagaattgtttgtcaggaatcttactgtatggcaatcacttgtgaagtcgataaacttaactatgggacatcataatttagacgcattggataagaagatcctcactatgatagcagaggatgctcgtactccattcttagaagttgcccgtgcatgtaatgtcagtggagcagctattcatcaacgtgttcaaaaacttatcaacttaggagttatcaaaggctcacagtttattttcgatccagaaaagattggttatgaaacttgtgcctatatcggactgcatttgaaagatccaaatgatttcgaccgtgtagccgaggagcttcaaaagattcctgaaatagtggaatgtcattgtacaacgggcgattttgacttgtttgttaaactgtatgtaatgaacaatcatcatctgatgagtatcatacatgacaaattgcagcccttaggactttcaggcagtgaaaccatgatttcatttagaacagttatagatagacaactgcctgtttctcaaattcagatagagactaaaagcagcgaacttgaggaagaagattaacaatattggtttaacaagtttgtttatcaggatgatataactacaattcatttgatgaggtgtattgcttaggtgatacaccttttttatttgtgcactatcacaaccgatgcaattagataagaaaagacaaaaagttaaaaggatgaagaattttctaaaaaagttttgataaaaatttgaattgttgtaatattgcgatataaaagtttattgttaatctttcaaccatgtattgtactatgatgaaaaacttaaattgtacaaaacttattgttgcactttttgccttgtgcctcgttgcctgtgaaaaacctgtgttgaacgatgattcttcgcaagagaatccaacttcagaagacttatatcatctcacttttcgtatgagtcattatgaacagattccttttgaggaaggactgaagctctcgcgctccaccaatattaccaagatgtgtacacgcatcagtatggcaatttttaaggaaggtactaaggtgaaggcaattcatcaaagtcagaaagataccaattttggagtgatagaagcaaatttgccagttggttcttatcaaattgtggctattgcacacagcggagacggctctgcctccattacatctcccgaagctatctcctttcctaagaacaagttaacggatacgttctattactttcaaaatataacggttggagagaacaagacttacgatttggaaatgaagcgagctgtagccatgtttagattgataaccacagataaaatacctgatgctgtacaaaagataaagttctattacacgggcggcagctctacttttaatgctgtcacaggttatggttgcaagaattctcgtcagacagaggagcgaagcatcgccaaagaacaacgaaatggtcagggtacatttgatgttttcaccttcccacacgaaaaagcaaatgccttgaaaatgacagtttccgccttaaatgctactggagatgtcattacagaacatgagtttctggaagttcctgtcaaacctaatcaaattacacagtacaaaggtgcttttttccaaaatacttcatcgatggaagcaaatcatttcacgtttttcgtcaacgagcaatggacgcaacaggaatatccgtattaaagcctattgaggaatgcgaagccgatcatagcacgagagtcgtggttttatcctcatcaaagcgaataggataatatcgaaacagagagggatttggtaactgtaaagtacacttggattgtccaccttattatataaagctggatatggggctattcgttagaaagtttcttttcggtaaacactcatcactaagagcgtagcggttaaggtagcgacgccgcaaagggctgtgaacatgaagaaacgtcgatagcccaatgccatttgtaaagtccccgagagaatgaaaggaatagccatggcaacagcagctaaagcaacacaaagcataaaagtagaaaaacgttttacctcactgtaatacacaaggaagtgtagatacgcataactaccaaacccatagcacaactgttgaataaaactacaccaacaaatccatgtgaagttattaggtagcgcaaaactcaagtgtatgaacacaagcgaaggcaccaagatagcgagtgccatgagtagcaacagttttttcagtccgtagcgatgaaccagccaaatgcctaaaatgtctcctgccaacaatccaaatactcccactgttccgtacgcatatccaaactcttgtggtgataagcctaatccgccactactccctaagtctaattgaaacaacatggatacgggtaaaagcagatttgttggtaaaagatagcaaaccaagaaaaggactcctggccacgaacttggcgtgcgaataaggtcggcactggtattgagacacgcataaaacatatcggataacaatatatctcgctcgcggtaacttcgggtaaagcgtggcaataggcagacatgccatattgacaagatgaacaagaaagcacttagcaaatagtaggcggtactccacgacgctcttatcaagcgagttacaacttccaaattacctgcaaccatgcagacaatgcccacggcgatgagcaatgccagccgatacactaagcgtttgaagattcgtagcaatgatacttgctggcagcggatagaagtgagtgtatatttgtcgcttgctatgtcatgaaacacgttgctactcatcaatatcacataaagcagtactgtgtaatttgtccacgattgttgtgtgatagtgtatccaatggctgcaatacaaatcacatttatcatttctgtcgccaatatccaaagcttgttgaaatagcctttgtgtacaaaaattgataatactgggcggaacatccacggcaacatggtacaacctatgtagaaggtgatttcactattttgatatcccaagcgtttcagcatcaccaacgaggtgaagagaagcaccgcatacgacagtcctttgaacaggtacagcgtaggcatccacttccatggcagcctgtcaatagtcccctgttcaagcggagaattgaatatcattcggctcatctctttcattcttttccgtaaagctttgttgtcaatgcaaatactgtctgtagtgtagcctatagctatcctaatttggcataacgagtgtgtcagaggaggttattcatataatttttgcagctttgcgtttcggtaataatgtgtcaaaatttcatcgtatgtatatccctcttctcccatgacggcagcaccaatctgacacagtccaactccatgcccccaccctgctccagtcaaaacgaactgctgcggaataccattgattacttcttttttatcaaccacaaaagctgaactataaagatgtgagtctgagagggttctacgaatttctaattccttgccaatagtaaatgtcaagagacttcctactatcttcagtcttgatatcctgccgctctttcctctttcaagggcaattaagtctaaaatatctccaaacgtcttctttgttttttcttctatcaacgatttaagcttcgcttgtgaataggttaccttccagcgatagaagtcggtagtttcttggtcataatcgttcaatacttgtgccaacactttctgatcagacgtatgacagaaagcttctggggttgtccttatccatttttctgcattcttttcattggtcaagtcgggcaagatatcgagctgtgcctgtgctttatttggcatatcgcgcactgcccgaagatagggtttagagatattttcccagcaataaggatattcttcgctaatgcctccacagcatttgctaaaccgtgcatcacaaatttcattttcgtacatcaacacttgccccttggtttgcttgatagcttccgaaacatattggttgggtacggtggtgatgccttgataacgctgacaatggtcgtccgcacacacgtcaaagagcgtgtggtcttcacgatcataccatctaatgagttcatcttcctttttgatgaaagagaaaaatcctgtggttgcctcttcaagatgttgacgcttttctatttgtgccaagagccaactacgggaaataaccgcatgcgccttcaacaattccaaagaagaagtggctttcatctcgctggaaataacactctccaaatatcgctctacggaaatgtcattgatggcgaagatttttccgccttccacaacaagtctgagggtgccataaaaagtttgcgtctctttacgttcccagtgaaaattcacgccaatagtcacatcgttgagggagaatgttccctcttgggattgtggtacaaaggtgagttctctatagtaattacctttccacttaatggcgccatccactaattgtacctcttgctctccattaactacctctccttttgccaaaaagttttggttcaaagaaaacaggattgtctcggcacccactattcccacagacaccttcggttctcgctgattgacaatacattttagggttgagtttttggaatcggtcgtggatgtaagttttgcgatgacttgctttatctcgtcctgcgacaatgtcatctcccttaaaatttcctcaatctgctgccctgaaatcttttcaaagtcctgcaaacgtggtgttatcaacaatcccgacatatctaacgcacccggactaatgagcatttgctggtctccctgtgcgaaataacaagctggtcgatgtttcttgcgtggaaaaataacactgataaaattatcttctctacgccaactcacgatgttcaacatcggttcggtgtcgtcatcatgaagtggaagggcattatagagttgtaggaacagcttttcatcggcggcttccgacctgctctgaatcacgaacgctggacagggatagccactaatgaacgacagagattcctctgtgtttagcactgtcagtggttttagcgattgcgctaacatttcccaattgagcattaaaggcaagacattggcactccccccttgaaaatgcatgtgatcgggtgctgatgcaccgcatttcggaccgttataaaaaaacatcaaatcgggaaaaatgcttaataaccgatgcagttctgtataatttttgcgtatttgctgtggttgatgctgacgcaacggaatcgtaaaatgttgaggaagaatgggaaaaggattgattaagagttcaaacttgtcatctatcacctgcttcatctgcaccgctggacgattcttttcgcataagaaacacggtctggcagctaacgcttttttatctatctttgcccctgtagacaccattcgagcagggttgtattgcactttcatgtgtagcgagcctacttctacatcttttgtctccacctgctgaagctcattgaaccgttgctgtgcatcgttccattgtttcagttgttcttccacaaagacttcgagcgataggtcattcgcttttaagatagcagtgcctaaagttgaatgtttctccttattcaaatcagatattgaggattggttggttttttcattcatagcctcaccatttaagtcatattagttgttgtgcaaagatacttaaaattaaagataatgcagaaagaattgttgtgtttttaaggagaatgcgccaaagcacgatgcacgaggagaagtagctataatgactactcttgcagacaaaacaatactgctaacttcggtatgcactcttcggttgaagccactcatcattatcgtgagtggaaatttcttataagtccacactgtagacagagaaacaaggtagaccatatgaaataggaatttcttagcggtggattgatactgtcaaacgaacgtttcttaaccgattagaaaaagcacattttgtccaataaaatgacaataaatcgactatccaaaaattgcaaaatagaaaaaatcaataggcaaacgaaatacaaaattatgctgatttgaacaaaaaatacgtcttttcaagttgaagcattgacttaacagccttggaaacatacagtagcaccgctattcacatgtttcaacagcattaaagcatgcaaatagcaggcttatcttaatgctttagctgccaaaaaatggtaaaaataggaaagagaagaagctctttaggtgtaacgtgttcaataacaattgattatgaaagtctctcatttttagcgtatttgcgacccgttttgcagttggttgtaaatacgcgaattatgagaggggtgttgtaaagaaaattcacagtattattagcttctattgatgcctgcaatcggcatgtcggttgtacattcatgcagtgatttaacaattcgagacaagccttcacttttccttttttagcaacaagttaaaaaatatccagtctttttgcgtatctttgcagaagataggtttcgccccaacaaagtaagtaaactttctttgtcttgggcttgcactatctctgcaaataggatagataatattttagcgaataaggttggtgaattggttatcagcttgccttactttttataaggaatcacgatgaatcaagcaaatatagtaaaaaagaagttaatgggaatgaccctttctgaacttcaggaagtggtacaccacttgaatatgccgacatttactgcaggacagatagccaaatggctctatctgcagcaggtgacgagtattgacgagatgactaatctctcgaaaaacaaccgccagattcttcaagcgtcttttgaaatagggtgcatgaaaccactggatgcgcaatattctaaagacggaaccataaaatacctcttcccaacagcatcgggaaatttggtagagacggtgtacatccccgaccaagatagagccacactctgcgtgtccagtcaggtgggatgcaagatgaactgtcttttttgccaaacaggcaaacaaggatttgaaggaaatctgacctatacggacatcttgaatcaaatatattccttgcccgagcgcgagaagctcacaaacatcgtgttcatgggacaaggagaaccgatggacaacatcgacaatgtgctgcgtgcaacacagatattgacagccccatacggttacgcgtggagtccaaagcgtattacggtgagcagtgttggggtgaaaggaaagttaaaacgcttcttagatgaaagcgattgtcatgtggctattagcttacattccgctatccctgaacagcggagagaactaatgccagcagaaaaggcgatgcctattcaagagattgtggaactgttgcgagagtatgactttgcacaccaacgacgactgtcgtttgagtacatcgtttttgacggagagaacgattctattcggcatgcacaaaaagtggtagaattgcttcgtggattggattgtcgtgtaaatcttatccgttttcatcagatacccaacgtttcgttgcgtggaacagacaccgctacgatggaacggtttagggattatcttacatcgcatggcatctttacaacgattcgagcgagccgtggacaagacatttttgccgcttgtggcttgctgagtactgccaagaagaagacaacacatgcgtaaggagtggatatggcatttttccctcttatgccttgtcatgggaggagtgacggcttgccgacagcaaaagacggttttgccagcgagtacgcaacagccgtatgaaatattagtggtgggcgatattgacagcttgctgtatcattgcttatcagtgccaatggttggcttgccacaggtggaacccacatttgacgtaacatgcgtgaagactggagattttgatgcgcaacagcgactgatgcgccaaatcattgttgtgagacaacaccaaggaaaagggaacaaatctgctatttcccatgaacgcaatcgttatgctcaaccacaattggtgatggacattgacgtaaactcgaaggaagagctgcaacgtatctgtgagaacatggggaaagaaattcggcaagtgtttattgcacatgaatatgagcaatacatcttgcatcttcgacagaatcatgaggtaaaaactgcacaaagggtacaacggatgttcggctatcggctgatgttgcctgcggacatgcaatcgtataaggttggtaagaactttctttggctctctaacaatgcggtgcaaggcctgcaaaacatctgcgtttatgccattcaaggactaaaacagcccaccttacaacaaaccgacagtgctctgcaagcgaatataaaaggtgaaacagatgagatttttatgcagaccgtgaggacatcaatgcaaaacgagtctttcttctttcatcaaaagagacaaaattggcaacgtggacaatgggagatgtgcggcgatatgatgggtggacctttggtgagaaaggtggtcatagacagcactgcaagacaagccgttgtctttgatgcttttgtatatgccccagaaggtaaaaaacgcaatcggatgcgagccttggaaactgcgttgttgaccattcagaagacaaacaaaaatagaaaagaggaacaacagtgacggaagactggcgatgcgcccaatgggtacgattcaaatgtttgacgaactggcttgtcgttccttgaactacgataaaaaaataatatacttatgaacaacagaaaaattcgtgtggcaatcacacatggcgatactaatggtatcggatatgaactaatttttaagactttctcgtcacccgagatgctggagctttgtacacctattatttatgggtcgcccatggttgcagcttatcatagaaaagcactcggcattcaggcaaactttagtattgtcaacaatacggacgaaatcaaagacggacgcttaaaccttctaacctgcttcgaagatgaagtgaaagtggagcttggaacgcccacggaagaatcaggacgtgcggcaatccgtgctttggatcgggcaatgaccgattatagagaaggggtgtatgatgttttggtgtgtgcgcctattggtaccaataacttaaaagtcggaggactggagtttaagaatcttgcccattacctgcaaacttgtttgggagagggacatgaggctatgccagtgttcatgaacgactttttaagagtggcgttggtttccaatcaattattgatgaaagatgccatggaggacatcaaagagcaaaacctcatcaatcgagctactgtcttatgcgaaacaatgcgtagggacatgcgtgtctcaagtccacgaattgcagtcttggcattgaaccccacagcagatggtgtagaagaaaaggaggttattgccccagcgataacaaaactgatagaggctggcgtgtatgcctatggtccctatccagcagaggaattctttggaagtaaccagtatgaggcatttgatgccattctctccatgcattatgagcaagccattttaccttttaagacactgacaattgatgaaggtgtgtgcttgattgctaacctgccattggtatgtacaacaacgaatgacagtcctgagtttgcaaaagcgggagctggggtcatggatgagcaaccgatgagacaagccgtttatttggcaatagatgcttggcgaaaccgcatgagctttgaggagcctctgaaaaatccacttcctaagctctatcatgaacgtagggaaaacagagaccgtggacggtttaatggggtgaaacgcaatgacaaggacaaccaaaaactgcaagaagcagaataatcgatgaaaaagaaatatcagaacgcattctttatattcggtttgtgcgttttactcttcatgataacgcagctcaacttcggtgaagtatgggaaggtgtgcgccatgctggctattggttttttgccatcttggtgctatggatattcttatacctctttaatactggtgcttggtatttgattatcaagagttgtgtgtccgaaaaatcatttcaagatgatgaaaaagagcttgaaacgagcaatgcgaacaacaaaaagaatgtaggtttctggtggttgtataagataaccgtatctggctttgcactcaattacgccacaccgggtggactaatggggggcgagccttaccgtatcatggagttatctccaaagattggaacggaagccgcctcgtcatcggtgatactctacgtgatgactcatatctttagtcatttctgtttttgggtcatctgcatcttcctgtatctttttacccagtctctttcacttggaatgggagtgttgttggcaagtgcaggtgtgttctgtggtttgggactatggttctttatggttggatatcaaaaaggattagctgtaagaatgatgaaatttctgcgccacatcccattggtaaagaaatgggcaataccctttgtagacaaacatcgtaatcagttagatacgatagattgccaaatagccgcattgcataaacaaaatccaaagacattcgtagctgccgtgggacttgaaatcgtctgtagattttgttctgccttagaggtgatgttcattctgatggtgcttactccttcggtgagttatctcaattgcgttttagtgattgcatttacaacgttgtttgccaatcttctattctttatgcccttacagttggggggacgcgagggcggtttcctgatgtcggtatctaagttgggcatgactgccagtgctggtatctttgttgctttgttagtgagactgcgtgaattgatttggacgggtatcggactgttgctcattaagtttgacaaaaaacagaaagactaacataaatttactgccatatttgcagctatgtcgaataaattatgtaattttgtcatccaatgaacacctcagaattgcaaaaaatcaaacagcgttacagcatcgttgggaatagcgatggactgaatcatgccttggatgtagccttacaggtagcacctaccgacctttccgtcttgattattggagagagcggtgtgggaaaagaaatctttcctcgagtgattcacgaccattctcctcggaagcgtgaacgctattttgccgtaaactgtggttctatacccgaaggaacgattgacagcgaactctttggacatgaaaaaggttcgtttactggggccattggggaacgggaaggctatttcggaatagccaacaaaggcactatcttcttggatgaagtaggtgagttgccgcttgcaacacaggcaaggttgcttcgtgtattagagacaggcgagtatattcgtgtaggtggacaggaagttcgtaagaccgatgtgcgcattgtggctgctacaaacgtaaatatgcctaaagctattagcgaaggtcgctttcgagaggacttgtattatcgattaaatacgattccaatccaaattcccccgttgcgaaatcggggtgaagatattattttactctttcgactattctccatgcaaatggcagaaaagtatcgtttgccaaagattaccttgacagaggatgccaaacaattgatgctcaagtataaatggcctggcaatgttcgtcagctcaagaatatcacagaacagatgtcggtgctggtacaagacagagagatagatgctaagctgttgagaaactttattcctcaggatcgtgagagtacacaattagcgaccattaacacgcacgggagtcactcgtatgagaacgaacgtgagatattgtataaaatattgtacgaacttcgaggtaacgtgagtgatcttcgtcgtgatttaaccagtctgagaaaacaattggacgatgcgaataatgttcattctggcttatcctaccctaatcaggttcatgcgcttgaaggaagtgtgacaagtcttactgacttatcacaccaacagaatatgccttcgagttcaacagtaatatctcgagcagtagattctgaagatgccattgttgaagaagtgaaagaacctgaaagtctaaatcttaacgacttaggtagacaaatggtagaaaaggcattggaacgtaatggtggtaatcgtaagaaagcggcaaaagaacttggcatttccgatcgtaccctctatagaagaataaaacaatatggtcttgagaaaaaataagattgtgcagctttgcgaaattcagcaccgatatcgtgttgttttctcttgtctgttattaagctgcttgcttgttggatgctctgttagttataaattcaacggtgccagcatcgactatacgaagaccaaaacgattcagatatccgatttccctattcgtagtgcctatgtttggggacccatggcacctatgttcaacaatgaactaaaagatatgtttgccaatcataccaagctcagtcaggttaggcgaaatggagatttgaagattgaaggtgagattgtttcctacactcagcgcaataaatcggtttccagtgaaggtcattcggcacaaacggaattgacgataaccgttaatgtaaggtttaccaataacaaaaatcacaccgaagactttgaacgacagttctcatcggctaaaagttatgaaacaacaaagaatcttaattctgtgcaagaagagttagtttcgcagatggtgaaagacttagccgaccaaattttcaatgctaccgttgccaactggtaattgacagctatgataaatcaagtatggaactaagcagattgatacaacatcccgaattgatggacaaggagacgctttatgacttaaggagtttgcttgcccttcatccgtattaccaaactgtaaggttactgatgttgaaaaatctgtatttgctccatgatgcaactttcgatgatgaattgagacgagcagctgtgtatattaccgatcggaaagtacttttcaatctcatagaagcagcacattaccgattcaataaaccttctacaggagaaaagcaacccgcagttgaggaaattggtgacagcagaaccatctcgcttattgacaattttctggaaacagtacccatagaagaggaagagacacctcaaaagagaaaaccaactccagctgatgcggcaatagattacgtttcttatcttcttgaggtggagagtgaagaagaacataaggctaatgcagcctctccacacttaaaaggtcaagacttgatagatagctttatacagaaaaatggagatggaagaatacagttaaacgacaccccagagtatctgccagaaatagatgaagataaagaaacacccactgaagaaggttattttacagaaactttggcaaaaatatatatcaaacaaggaagatacgaacaggctcttgaaattattcagcgattaaatttgaattttycaaaaaaaaatagtttctttgcagaccaaatacgttttttagagaaactaatattaaataataaaataaacaagtaaaaaaatgatgtacacattatttgtgggacttatagttcttgcctcgattttgatggtggtaattgttgtaatccaggaatcaaaaggtggaggattagcttctaatttttcctcgtcaaacgccattatgggagtccgaaagacaacagatgtgattgagaaaacgacatggggattggctatctttatggttgtgttgagtgttgcttgtgcatacgttgtaccaagagcatcttctgaacaaagtgttttagaaaagaccgctactgaaacacagactaccaatccgaatacaactcctggttttggcgcaagcgagcagcaagcacctgcagcaggttctcaaaatgcaactcctgctaaccaaggaactcagcaagctcctgcaacacctaaagcaccagtagctcctgctaaataaaaaattaaaaagtaagggatttatttgcataattagaataaatcccttacctttgcactcgcttctgaataagaagagttttataaatggtggccgtagttcagttggttagagcgtcagattgtggttctgaatgtcgtgggttcgagtcccacctgccacccaccccaatcgggtaggaggtaaatgctattcatagaaggcatttacctcctactttcacatttaccgaccttccacaccaccgtacgtgccgttcggcatacggcggtttcgtacttttacacctcacggtgtgtggcaagttgttttcagctatccctttgagtaacgtcacttctatcctattgtcggattccgtcctatcgtcttggatagagagctcctttcggacatctgacgaagtggttcgcagggtagcattcatttactattgcactgcacgattcggtccttccctgtaggcacacgtaccttgggtactatgacctatactgacttctcacgacaagctttactccatgactttcataaaaatataatcatcatgtccgtgagacctcctcggataagggcattgtctttccatcttatgcctacttcatttacaccaaccgttccgaatagctatcgggctttggtttgttaggcaaccttgcccacggtcatatgccttatatgaagtttctgttcgttaggccagatgtttgccgccagcttccttcagatttcacctcacgatgaacacccttgctcttggctatgtaattcccgctattagggcttactcgggacttccacccgttagataatgctcatgccgagcgtacctaataagcggaaagcccgataagtaaaggctttccgcttattgcttttatagagaaaagtcttgaaaataattgaaagtaagttctgaattcagaaaatagtaaataaaaagggactaaaaaaaacggaaagtagaggtcagtcctaaaaatacacctattcgccgaacacagactaccgtgagtcaaaagcaaagggctgacttcacagccaaccctatacacattatacaaaaacattatgaatacttatttagcgaacaagatttaaaaagtttcgcaactatttatatggtcatattttaatttactgtttgataatgccatcgcaatcagcacatgctacttgacatttcttacatttctttttgcaataccgctcacactgcaaacgaatatcgtatccgagcatggcacccaagataaaatcctcttcaggcgttaactcgttgagcggtttatggatgatgaaacgtacagcatcaatacacgcctcggtgccaaaaaacaaatttagactattgtttcctacgggctgtataagatagtttatatgctgacttgcaagtcgttctacagcaaatgtttcatattttttatgaaaggtatagagtaccatttgtcgaactcctttcttatactcataaatatgattcatgagtacctttaattcagctggtaaggtccctatagtcttcatgtcaatcgtgtttcaaatattttctttgatggttgtatttataaacttggcttgatttctgcgagccatgtatcaattcgttcatcagttttatcttcttcattgagatcgtcaagtgctaaaccgacaaacttaccatctattacagcgtcactgtcatcaaaagtgtaaccatcggtagacactgcacccactacatgcgcaccctctacagcatggtaaagctctgccatacctccacaaaacgtgtctgaataagattctgcatcaccacaaccgaacaaggctactgttttgttggacaagtcaacatccttcaaaacctctaccccactgtaccaatcgtcttgcatttctccagatccccatgtagacgtacctaatataagattgtcatgactttttaatacatcttcattgagattagctacatccatagcttcaacacctaatttgcttgcaattttttctgcaatagcctgacaggttcctgttgatgaaccgtatattacaactgttggcttcatgttttttctatttagttttacgttttataattgtctgatgcaaagatagacactatttgacactcatgcaatacctaaatgtgatggtttttaagtattccgtactcataaaacaaaacatatcatgaagcctatatacataaaaatggttattcgcttcactggaacaccattatattctaataagagtcgagcctttcagcaacggattagagctattcagctggataacatacacccctctgggatatgatgatacgtctaacaaataagaagaaaagcccgcatcaaaactctttctctccaaaagtacacctgaagtactgtacacacataccgaaaaatgatgacatgagagttctttcagctttatttcaatttttctatttgctctcacttcaaattgcacacctgcaggttgatgagaaaagatccctttcacgccacttacacctaatatatataagagtcccttatacacatctatctgcccatagccataccaattatttggataggtcaaagaagtatcatagtgggtacaagtttttgcaaacacatcaattatgtcctcacgagttagcgtaggcttggcttgtagccaaagcgcaacagctcctgccaaggctggagtagacattgatgttcctgcattgctattccaagcataggtacgcccgttgaactcaaaatgtgcaacgtctgacttgatatcgtttgcctttggattcttttccagataataactactatacgaggaaataatattcgtccctggtgccatcacgtcgggtttaacacgcccatcgtaagtcggacctacagacgaataggctccacgaacaccgccaacgccctgattatatggacgccactctcctaaataattggtgatacctgttcggtaagaggttgctcccactccaataaccgaagataatgaggcaggcgaatgaatgttatgtgtgcactcgccagcacacagacgttcatccaactggttagctgtccaaacgccacccatcctaaaaacttcgacatcggcttgggctcctaaaatctcaaatgagaatggaacagcatgccctatctcgctctttgaccacattcgcacatcgtacaccaactctgcggagtcgtaacacgacttgtatcctaccatactgaacacgtattgcttattgcccaaccgcacggtatccacatagatagaatctttacacctcaaaatatctggcgtaaacacctcatgactgtgcttcgtatcatcataggaagtaaatctaatttgaaaaggcgatgctgattttaatgtcacataaacgttatcaggtctgccttccacaaacgtacccagccctgcttgtcctatgggcttgtgaaaatacgacttcacttgtccatcgttacccgccgaagcaataatgatacgccctggacccgataagctgtccagtactgcattgtacaaaacatcatcgccatggaaatcttgatgtgaaccttcgctaaacgagatgacacacggctgattgctatatttcgcataatccatgatatacttaaacccaagagcatcggtagcataggtatatttgtagcaatttgccgaatctaccaacgcttcatcaccaaccacaaagttactgaccagacaaatatcgctctcatacgccatacctctatacgcactgttatatccgctgcctgcggctatgcctaaggtgtgcgtgccatgcgtctgaatcaatccgtctctcgaatgggcataagccaatatttccgcccttccctcgtacgaagctcccacatacattttgcttttcaaagtgtctaccgacaattgatcccaaaaacgctggatgcgatagtttgttgcagtagcatcaaaaaagttggggtgcgtcaaatcaaaccccacatcttgcactcctacaacaacccctcgtcctgtataggcttgcggtaagggagacgtgcctgcatacacgggcattgcatcaaggcagtatgccaatgaatctgtatgcaagccattgcttcggcgcgcttctattctatcaacatacttttcgagcgacagcttggcaagttgtcgcaatggtacactcacaataaagatatctccaaattgagccaatgacttacaatgatgttcttgaaacactcgttgtgcatctttgctaaccttgacaaatgcacacaattcttgggactggttggaacaaatgggctttgaacgtgtgccttctacatctccttgccgtcctatcagctcttgctgtaaagccaactgtctcaccattgccgacatcttggcatagttcgcatgctgtgcacttacgcacaccgtacaaaacatggcgataatgaagaaaaattgcaaacgtttcattacctgcaaagtaaagcaaaatatctgttagctacaaaaaatccatcacttttatttaggatatactacaactcttgcacttaaggctggttctataaattagctttggtagcttttgaacttatttttgaggtcaaaatgcaagagagtgaaggagtgtagcgagctacacgactgaacgaaattacattttgaaccaaaaagaagccaaaagataacaaaacgtatttcataaaatttaattattatattgcggtggtaattgatagaaccagccttaagaacgacattcctacaacgacaaaatcccctcaaaaaacatcataataaaaattgcgtgtacgcagcatcaaatgaaaaataatgctgaattttctttacaaagtgcctctcaaaactcgcgtgaaaacaaccaacagcaaagttggtcgcaaatacgcgaaaaatgagcgatgtttgtaatttattgttattaaacatgttacgaaaaatcaacttctttcctttcctatttttaccattttttggcgactaaagcattgagataagcctgctatttgcatgctttaatggggttgaagcatgtgaataatgcctctaatgcatgtttccaagagcgttaattcaatatttcaacttgaaaaggcgtctattttgttaaaatcagcccatttttgtatatggcttgcctattgattttttctattttgaagattttgattggtcgttttttggtaaaataataggacaaaaacaattaatgcctttaccaagaaggagaagaattaaaagatgctgctcatttattgaagggagcattgttgttacaaccactgaacagagaaaggtctaaagaaaatgcacttttctttattcccacgagcttgtatgtcgcaatttttatgtaaatttgcagtaatatagcttttatataatgaataacaaacatttctaatctcataacaaaaccaatggaaaagaaaaagaatctatttatagcggtgacttaccaactttataccctcaataacaacaagaaagaactcgtagaagaagccactgcggaagtcccctttcagttcatcagcggcttcggcattaccttggatcattttgaaaatcagcttatcgaacttcaacaaggtgatgaatttaatatcaaacttacgcctgaacaagcctacggaagttttaaggaagagaatatctttgatttagagaaagaaattttcactgttaacggaaagtttgacgaagaaaatatctacaaaggtgtcgttgtcccacttcagaacgaggaaggtactcgatttatggcaagggtgatggacatttcagacgcaagtgtaaaggtagatttgaatcatccattggcaggcaaagaacttgaatttaatggcaaagttatcgaaaatcgtgaggctaccaatgaagaaattgctgcaatggtgagtcaaatgagtggcggaggatgccaatgcggaggtggctgtagtggtggatgctgccatgatagcaacggttgtggcggtcactgctaataaacatccaactaatagctatcaattgtcaattatctgaagcctatgcgtaatacctttggacatctttataccctcacaactttcggagaaagtcatggagaagctgttgggggcgttatcgatggcatgccgccaggcattgttattgacaaggattttgtgcaacacgaattgaatagacggcgtccggggcaaagcgacatcaccaccaatagacaagaacacgatgtggttagttttctcagtggcatttttgaaggaaagtcaacaggtgcacccatcgcttttatggttgaaaacaccaatcaacacacgaaggattacgaatcgttgaaaaacctttatcgtccttcgcatgccgattacacttatcaacaaaagtatggttgtcgcgattatcgtggcggaggacgcacatcggctcgtattacgcttagcagatgtgtagcaggtgccttagccaaattagtattgcaaaaacatgggattcagattcaagcctacgtttcacaggttgggcaaattgctttacagcaagattatcggttatacaatcttgacaaaaccgaagagaatgccgtccgatgccccgatgaggagaaggcaaaggagatggaagcactgataagacagactaagttggatggcgataccatcggtggcgtagtgacgtgcgtcatcaaaggatgtcctgtagggttgggagagcctgaatttggcaagctccatgcacaactcggcgccgcaatgctctctatcaatgcagcaaaaggttttgaatacggtaagggttttgcgtttgctacgcaacgagggagcgagatgaatgattctttttctatgaagaatggtaacatacacacaaaaaccaatcatagtggaggaattcttggaggaataagtaatggagaggatatttattttcgcgtagctttcaagcccgttgctaccctactgcagtcgcaacaaacagtagacgttgcgggcagtgaggttacttacaaggcgcaggggcgtcatgattcgtgtgtcgttcctcgtgctgttcccattgttgaagcgatggctgcgatggtcttgttggattcgtgtatgctacatcaggctatattgaggtaaaatagaaaataaatatgcacgtaatataacaattaacatctcttttgataaggatctcagaaacttttgtagatttgcaggcgctaaatgaaatttgtgaaaatctcaatttagttgagttaagtctaatttagtttttgtgttgatggagagttaccaattggtagctcccactttttattttttagttttgcagtctctaaaacaagcggaggtgttaaaattgctccaagatagcaatgcgttttttggtgtctggatgagtcgcaaaaagagaattcataaatcccatgattccactaaccatttggtctggatggacgataaacaactgagccacatcttcttgttttacttgatcaagaccgggatcagaagatatcttcctcaacgcatctgctaaagctaaaggattgccacatagttcagcaccccctgcatcagccatgtattcgcgttttcgagagatagcaaaacgagtaatcaaagtaaaaaaataagcaatggcgcaacagataacaccaacaaataagatgaccaagatagataatcctgtcccccgttcatctttgctacgccttacagaaccaccaaaccacatggtttgatacatcatacgcaccaccaaggacatgactgtagatatgatgcccacaaagataatactaactaccaaaagacgagtatctttgttgcggatgtgagtaagctcgtgagcaaccactcctttcaactcttcatcgttaagtcgattgataattccagttgtcaacgtcactgtataacttttatcgtttattccgcttgcaaaagcattcagttgcgggtcgtcaacaacatgtatctgcggcattgacatgccacaagtcatacaaagattctctacaatattatagacacgtgggttctctcttcgctctaaagggcgagcacccgtggcacgctgaatcatggcgacatttgtaaagtaggcaatgccaaaccatatacctactcccaaaacgacccatggtaccgttgtcataaagtaataatttacggatgcaacgtcaagcgcataaaccatctcaccatactcattataataaccgtttccaaagtagttaagcaatgccaaaaatacccatatcatgcccaaaataatgataggaaacatgagcaataataatacactcattgcattattacgctgaatttgggtttgaaggcctacgtacttcactcttagaaattaatctgtggtgcttgctccatctctgtacgttgagttggagcaatctcatacatgggttctttcttaaaaccaaacatattggcaaagatattcgaggggaatgtttgcaccgcattattcaactctcgcgttgcggtattaaagtaacgacgtactgccgacaatttattctcaatatcggaaatctcattttgcagctgcaaaaagttttgattagccttcaattctggatacgcctctaaagagatacgaagacctgacaaagcttgcgtgagcatgttatctgcttgcatcttctcattgatcgttgttgcattgacacccatcgtacgtgcttctgtaactctttgtagtacttctttttcatgagcagcataacctttcactgtagatacaagctgtggtataagatctgcacgttgcttgagctgcacgtcaatattagcaaacgcattttcacgattattacgaagacgcacaagattattataaattcccgcacagaataaaacaagcagaaccaatactgctatgataatcccaacaaccataattcgattatatttaatgatttatatatgtttacaaatataactaaaagaagcgataaaataagaatattaagaaatattaggataaaaaaagtccgattgtctcatctgattcggtgatgacaatcggacttgtactcgtttaatcgcttaatatcctcattacttttcggaagtattggtgcgttgcatgaatgctgtaatttggacctccattccacgaacgtattgcttgctcaatgttattcgaaggattgtgagcagactgaatcaaaagaaacatttccttagatttcgaaatactccaacggtctgaaagcttgtaacgcttcttacttctacgttgttttaggatgttgttacactctttaacgaggattggggtaatctgtaatacaccaacagaattcccacttttagcatttgcttttcctctactctctacatgaataatcgcgtccatcactggaccccaattaaaactgctacttgttcttatattccccttctgtcctgcaaacgcaaaaactggaaaaaacaataaaatagtcaaagcaacaagagcaatctttcttattctctccatcattgttaatttatggaacctggacaatgaaatgctaactaatttgtcaacaatgcccgcgatgatagaataatgagaatgagttttctatacatctcagctccgttagatacttagtagatagttcaaaataaaaaataaaaactatctctatttttatcgtttgcaaaggtacgcaaaaaatataaaagacacaaataatttagcctttttaatgcttattgaagaattgtaatacattgattatacgcaagttaaagaaaaattaatgtaatctaatttcgacttattgcttacttctatatttgagaatttcgttactaatacttgtaatcaacaaaacaattttgtggtttgtttgtaagtatccacaccttgccatcctttcctggctatccacaccgtaccaccctatatctctgcagcctataaacacaaaaaagcctccagcatcggttgagacactggaggcgtgaagtaaaaaaggcagctacctactctcccacattgcattgtagtaccatcggcgcaagcaggcttaacttctctgttcggaatgggaagaggtggaaccctgccgctataaccacctgataaaggggttgacaaatcttcacaagcaaaacataaataaaataaaatgtacctttttgttgacgtgtctattttcatagcactacaacacacgatacaactgaaagaatggctcacaaaagaaagtcttgggcaattagtagtgctcggctttgccatcgctggctttacacctgcaccctatcaacgtcgtcgtctacaacgacccttatatggagttctcatcttgcggatggcttcgcacttagatgctttcagcgcttatcctaaccagacttaaatacctgtc

SEQ ID NO: 111 - DNA, 2899 bp, Prevotella timonensis
  source 1..2899: mol_type = genomic DNA
ggtcttttttttttgtctgctgcaatctgctaagctcggagcattatcttcgcacaactgtctatccttcttggcacacgcctgaaggcaagtgccgttcttagaagcccggcacccacgtctgcgacgaggatgcctctcactgcctgtcaccttgcggtcacagtccgtgagtcaagggagagcggacgggcaaagaccaaaggtcactgcccaaacagtctgtatttaggattatcgacaggctgtctataacagcgcaccgcacttcgtgcgccaatacatatagccgtatatatatatacggctatatgtctatatggcaatacgggcatgtgtatatacattgcccctcttggtgcttaccatacttaaccaataactatacttccgtttccgtttctgccttcgacctcactttccgtcacctttgttgtcatcatcgacttttatagtgcaaaggtatcgtaggcagggaacacggcaagtaccagctgaaagcctattggcggaaaacttttcatgaccctccgaaatcaaagattgcggtttcctgaaaactttgccaccaatttcttgcctttcattccctttsatgccgacgatcttaccatgcacataaaaggttcgagatgacggttacaccggaataataaaaaaaagttcgggtcgaagaaacgaaaaatccttaaaggttgagaatcgggttgcccagaataaataataacttcataaagcaataataaaatgaaaacaacaacaattcaatttgcagtaccaatgtggaacatagaaaagatgacaggttataaacctctcacaactttttggagcgatttctcaatagcggaaaaatttggagcggaagcggtaaaagataccttcaaacgagcttttgaggaatggaaggataattacaaattcctgacagagcttgttatggtactcaatcataagatttggcaatggtacgaggaaaacgaagagttagcacgtatttacaatgccatttgggaaaaagcagataactatgggtgcgagaacctgaaaggcaaggaattggactatttttattcaatacttgattaaacaacaacgcaaggtgggtaacaccaccttaccaaaaaatacatcacaatgaaacattttaattattttcctctttacgaggatatccgcaaaaggcaaaagcaggaacttatcgacgcattgcaaaagtttcccaaccacgagtttcattttggcatggactatataggcaacgaccaaaaggaaatggcagagcatccttacatcattggatatttgggagaagagcccgttgatttaaaagtaatggctgtgaaagagaggaacggctcgttatatattatggcaagagacgagagaagtggacttgagggaactattacagacgtgaacatggatgtcgttttgggtcatatagagaatatacttgatgaattacccgacaagtagactatattaagtaaaattattagaaaagtttggcataagaacttaaaattatttatatttgcattatgaaaaaagaattaggcaaatggttgatggatattgcaaagtacatggttacagctttgctcctttcatctgtatttggcgacatcggacagacctcagtctttatatgcgttattgctgcttcagctataacattggggtggggtttgtacttggtaaaggataataaagatattaacaaaaagaagaaagggaaataatatgggagcaattatcgtttcaattttcgtgtctgtcgttgcgtgtgtaggcggtatttacttctacattcaagatcacaaatctgaacacaacgaggctaacgcctgatgtttttgatttgcatgtaaacgaaagcgagtgccgaatatcggaacactcgctttctctttcctaaaagtacattcctcgcctcttgcgatcaccattagggtacgccttccaatgaacatcttacacaacttacacatcatgcttgtggatatttgacgcagtgttgttgatggacgaaacttttatagttagttagaaaaagacacttttctgtatcaatttccattcgccggggtcgctttcacctttaggcaggccttacaggaaaaagctcccgaaaagcggtatggcagagtcttgcagacactgcctccattgttaaacaggaaagtttacttccctttccctatatagcggtatatacttattgttatatgctcatattgccgtatagatgtatatatgtatatgcgtctatacggcaatataaattcacgcttgcgcagattactttgcagaccttatacggatcatacaccttttccgtctcctcgccatggagggcttttcaggccttctttggcatgccttttcagacaactacgctttctcaccagactgacggtggtacccaatagcgataaggaatcatggaatctcttgctgtccatgttctcgctcccttccggcttatctccctgccagttcctttcctttcttcggcatcgacagccatttttacaactcaccgttcacccggtttcagggcttaatagaagtggtggtatattcttcccccctatgtccatgtgcatttcctgatgctgtaagcggtgtcagccccctctcctttttcatcctctctccaccttccacttcaaatccgtttatgcgttcttttcatttttcagataagtccgacatccattttcctttgcaaagttagcgcaagcggtgttccgcaagggtcgccttccaggacttgcctcgtgattttttttcaagtttttggggtgcggttgctcctgatccaaaaactcattggtcggagatgaaaaaaaataacggtcatcccttgcctttgcacaccttcatacttgcc

SEQ ID NO: 112 - DNA, 1271 bp, Prevotella timonensis
  source 1..1271: mol_type = genomic DNA
ttgtcccattcggaaatccttggtttaaaggttatttgcacctacccaaggcttaacgcagcttatcacgtccttcatcgcctccatgagcctaggcatccgccatacgcccttatttactttctttcgccacgatcatacgtcttcacacagatgtaaacatcaatggaaaaatcgcatgaatggttgctcatactttcagctgtattgtttggttgataggcatcttaatcaataaaatgctttatcaaggttcatttgaacttttattttactctacagttttgcttgtgtcaatatgtcaaagatcgtttgtcttggatttcataattcatcattcataattcatacttttgtgggtatgaaatgaatttacatgctttacgaatttaagactgaagtggagaataacggattcgaaccgttgaccccctgcttgcaaagcaggtgctctagccagctgagctaatcccccaggtttaattcataattattaattcataattcataatttttctttgcttgcatgactttaatgggttgttagcctgaatttcattcttatcgcattgaaatcattcttgtcgcattgaaatcattcatgtcgtatagcaatcttacccaagattgtttgggcgtgcaaaggtacaaattattaccataaatcaacaattgattgaattattttttcagaggtagaagttaattcatatcattcattcatatcgcatcatcctaattaacttaagtatgaattatgaattgagaattatgaattaaagattgtagtcccaggcagacttgaactgccgacctccacattatcagtgtggcgctctaaccaactgagctataggacttcaatgctccggtctgtcgtatcaagtcgcagggctgcaaactctattgcccggcttcctttttctcttttgtatcttaaaaaacagaggtggtgtacaaaaagcactattgacatgcaatagcaggctcgtcttacaaaaccttgataagaaatatcgtcttataaatcctttgtgtaattcttatatcattcttcaacctgtaggttgctttaattatgaatgatgaattcttaattatgaattaaaaaattgcactcgttgtttcgtctccagaaaggaggtgttccagccgcaccttccggtacggctaccttgttacgacttagccccaatcaccagttttgccctaggccgctccttaacggttacggacttcaggcacccccagctttcatggcttgacgggcg

SEQ ID NO: 113 - DNA, 1143 bp, Prevotella timonensis
  source 1..1143: mol_type = genomic DNA
atcagccatggcgcggtgaataarkwsccrggccttgtacacaccgcccgtcaagccatgaaagctgggggtgcctgaagtccgtaaccgttaaggagcggcctagggcaaaactggtgattggggctaagtcgtaacaaggtagccgtaccggaaggtgcggctggaacacctcctttctggagacgaaacaacgagtgcaattcataattcataattaagaattcataattcataattcatacttttgaagtcatcatgaaatcaactcacgggttgaagaatgatacaagaattacacaaaggatttataagacgatatttcttatcaaggttttgtaagacgaccctgctattgcttgtcaatagtgctttttgtacaccacctctgttttttaagatacaaaagagaaaaaggaagccgggcaatagagtttgcagccctgcgacttgatacgacagaccggagcattgaagtcctatagctcagttggttagagcgccacactgataatgtggaggtcggcagttcaagtctgcctgggactacaatctttaattcataattctcaattcataattcatacttaagaagtcacacttaagaattcataattaagaattcataattcatacttaagttaattagggtgaagcgatatgaatgaagcgatatgaaatgatgtgaatgaatgatatgaattaacttctacctctgaaaaaaagaattcaatcaattattgatttatgataataatttgtacctttgcacgcccaaacaaaaatggggcaagattgcaatacgataggaatgcaattcaggctaacaacccattaaagtcacgcaagcaaagaaaattatgaattatgaattaataattatgaattaaacctgggggattagctcagctggctagagcacctgctttgcaagcagggggtcaacggttcgaatccgttattctccacttcagtcttaaattcataaacacgtaaattcatttcataccgactaaagtatgaatgatgaattaagaattatgaattattagacgttcgatctttgacatattgacacaagcaaaactgtagagtaaaataaaagttcaaatgaaccttgataaagmattttaatgattaaaa

SEQ ID NO: 114 - DNA, 384756 bp, Prevotella timonensis
  source 1..384756: mol_type = genomic DNA
atttatgatttgccgcaactatgcaaaggaaacagtaggattgtttacaagaattatcggtaaaatcagtgcctttacggcaatgcaatatttaaatcacattaataatagacccattggaagagtcaagtatgcactggcttaattccgccaacgggttattggtaatgtcctgatattcttcaggatgttcgaatttgaaactaagattttcaagctcggtcttaatcttattcaaacctaacctgtttgccagtggcgcataaatatagagtgtttctccggcaatcttgtattgtttattagcaggttgcgactctaaggtgcgcatgttgtgcagacggtcgcagatcttgataagtatgacgcgaatatcatcgctcatggtgaggagcagcttcttgaagttttccgcttgggcagaagctctatcaccaaaaataccaccgctaatcttcgtaagtccatcgacaatttgggcgattttgtgaccaaagatattttcgatgtcttctaccgtatagtctgtgtcttccaccacatcatgcaggagagcagagctgatactggtagaccccaatcccatctcctcgcaggctatttgtgcaaccgcaatagggtggaggatataaggctcgcccgatagacgccgtactcctttgtgcgcttgacgcgcaaaattgtaagctttggtaatgatatccaccttttttctgtggcgtgaagccaagtaggtatctaacaggtgttgaaatgcgtcttgaatgattttatcttcatcgacctgcttttgcgtatctttcatattttgctcgtccataatcgtcctcttacaaaaacaatggttatttaactctgatcttctttcccttgcgaatattagaccccttgatgccgttcaatttctttaatttcttgacggttgtattattgcgtgctgctatttcggaaagtgtatctccacttctaacggtgacagactttttagtagagcgccgctgacggtgctttctgctcttgctacgttttgacgaataggttttacgtgtggagttgatgttcgttctattgccaacgaagtcaggtatatcttcattgacttttacctcagtgcgcttggaaagtagcacgtcagcttggtgtgcatagatggaatcctgctgatcaataaaggcattaatcatcggaacgggcaatctgagcgtagaaggtttggtgtagccaatgacaatatcacgacggtactgtggattgagggacttgatgagttctttgtccatcttgagtacatcagcaatttgctgaaaatgtacatctttgctcaccacgatagtatctgtcttcgcaggcaaatcggtcgtcattggacagatattgtgctcgcaataatagttcattacataattggcagcaatgaacgctggcacgtacccacgcgtttcgcgcggcaaatagggatatatcttccaataatccttgcttccacccgctctgtgaatggcttgtgtgagtttatcgggaccacaattgtaggcggcaatgaccaaattccaatcgccaaagatgcgatataagtcttttaggtaattggcagcagcgtacgatgacttgataggatcgcaacgttcatctaatagtgagttcacttccagtccgtagttcttagctgtagccaacatgaattgccacaatccagtagctcctactcgtgagacggctaagggattcaatcccgactcaatgacaggaagatattttaattctaaaggtaagctgtatgtctctaaggcttgttcaaagataggcatgtagaaattggaagccccaagcatgatgcttaccgaatttcgcagttggttggtatatcggtcaatgaacttttggacaacgtcattgtaagccatttccataattgtaggaaggcggcgtaagcgttgtttgtaaacatcgggctcgtaagttctgttgacattcggtaagttacaatcagcgtctttccttagataggttttggtgttgtacaaatgaagcagactgtcgatctcagacgtcagcgcctcaggaaggtcaatagtttcgttttctcctttttcgttggtcactatgatttctgtctcgtcatctactatctgtgcatgtagagaggttgagaagacagcaagcatagttgcaatgtataaacaagtttttttcattattgaaatattttctgtataaaatagttctgtccgaacattaaaatgtgagtcggcattgtatgccaaacccctcaggtagtagctgtcggtgaatggcatccttttgcatgatggtgggttcgattcttaaacttaaatcatcagaaatgtcgaattcggacaatgatgcatctacataggcatcaatcacagatagcgcataaaccccaatgatagagaaaacactcaagtcacgccatcttcggtagcggtctttgcgcttacggaacaattctttatatcgttctatatttgattcattgatttgattacccaaatgtagaaactgtttgtagctttctgaatgggggtcattatccatcaggtcgatgtatgcttgtgaataatcatggtacatttggttgttccaacgcaaagcatacatacatccaacgaatccaccatatacaatcggtaatttccagtatttacgattgtatatttgtcctgctccgggtaaaacgatagccagccacatcgccctttttgcgtctggacgccacttgttccagtcgcgctgaacctttttacttactttcccattgtccttgaaaattaatgtgtcttgaggagaaagcgcagcttcagcaggaatgactttagtgtcaatgtcgcctaagataacgcgaggatcgctgtcagggatgctgtcattggtcgttacctgcgctcttacactggtaacggaaagcaacagtatgagtaggcaacaatactggatgacgcagaaagtatgttcggtggatattttcacaatcgacggttaatctttcagatgatcaaagatgttcatcagtctttctaattccgctgcgttagcgaaagggatgcttattttccccttgccattggcagaacaagttaattgaactttggtatccaagaaagaggacaaacgctttttcagcatgtcatattcttctggcatgctcttttttgtgttcatcttctttttagctgtttgtaaatcctctccatttttgagttgttgagctaactcttctactttcctcaccgagtaggcattcttaactacctctttgaaaagtttgatttgttgagaaggactgtctattgccaacaacgccctggcgtgtcccatgtctatttctttcttctgcaaagccatttggacttgtgcaggaagtttgagcagacgtaagtaatttgtaatggcagtgcgacttttccctacgtgcttggacactttctcttgcgtcatgccactcttttccatgagtttttcgtaagccagtgcaatttcgatggcattgaggtcttcgcgctgaatattctcaaccaacgccatctccatgacagtttcgtcatctatcgttcgaatatacgccggtatagcctccaaaccaactatttgtgaggcacgccaacgacgctcaccagctacgatttggtatttgtcagtagcgacttggcgtagggtgatgggttgaatgataccaatttctcgaatacttgatgccaattcttccaacgcctcttggtcaaattcgcggcgaggctgattgggatttgcttcaatttgttctattggaatttcattaatagttgaactaccttgcgtctggatgtcatctgtggaaatgagtgcatcaagtccgcgacctaaagcactaccttttcccgactggctgaatttcttgcgtactgccatgaatatctattgtttatatgctgatgttgaataatcttagtggaggtgtctctttgttattgaggaagctccatttcattcgtttggtgcatctcaccttttttgaatgttagtcccttctttattttgaattaaacgttcttgctcataatttctttcgccaatgccaagtggtttttagcacctgaagaccctgcatcgtataagatgacaggcaatccatggcttggactctcactgagttttacatttcgttgaatcaccgtcttgaaaactaattcttggaagtggcgtttcacttcgtcataaatttggttggctaacctcaaccgactatcgtacatggtgagtaagaatccttcaatttctaatttggtattgagtttactcttgataatcttaatcgtgttgagcaacttgctaattccttccaatgcaaaatattcgcattgcacaggaattatgaccgaatcggcagctgtgagggcattcacggtgataagacctaatgagggactacaatcaattaaaataaaatcatattcttctcggatgggttctaagatttgtttgataattttttcacgattatcaagattgagcatctctatttcggctcctactaaatcaatgtgacttggaatgatatctaagccatcaatatctgtggtatagatggcatcacgtacatcagccttgttgataatgcattcgtagattgaacagtccacctctttgaggtctactcctaaaccactggatgcattggcttgagggtcagcatcgacaatcaatacagacttttcaagtgtggctaatgaagctcctaagttgatagttgtggttgtctttccaacccctcctttttgatttgctaatgctataatttttcccatatctatgaatccttcttaagacattattgatttgcaaagttacatattttggttgagaaagccaccttttaaaccttttttcgtacttttgtaggtaaatcagtaaaaacctattgattcgacaatgctcacgtactttctatgttaagaaaacttacgtagcagtttgcgatgttttataaatgatagaaaaagatgctaaacgaaactcctctcattttaatttctaatgacgacggttatcattctcctggaattcgtgctttggtagacatggtttccgacttggcagatgtcattgtctgcgcaccagagcatgcgcggtctggatactcttgtgctttttcttcggttgaatatctgcgtttgaagcgtagaaataatattggaaccgtcccagtatggtcttgtagcggtacacctgtcgactgtatcaaattagcgatgagtgagttgtgcactgataggaagccctctcttattttaggcggcatcaatcatggagataattccacggtgaatacccattattctggtacaatgggtgtggcaatggaaggatgtttgaaatacattccctctatagcgttctccagttgttattacaatgaagatgcgaaccttgagcctttgcgaccttatgtggtacaattagttaaaaaagtgcttgcagaagggctaccaaagggtgtttgcttgaatgttaacttccccgcaaaagaatcttttcaaggcttaaaggtgtgccgtatgacttatggaaggtgggtggatgaaatcgtcaccgcacatcatcctcgtgcctacgattactattgggtagtgggaaggtatcaaaatgatgaacctgaaaatgccgataccgaccaatgggcgctcaatcatggctatgttgccgtcacacccaccaccatggatgtgactgcttatgagtttatgtctaaaataaaacattgggaagtcgagtaatccgtgcctcttttttgtctaaagagcagaagataagaggcgttcaattaaagtgtagtttatgcggtattatttaatagtaggagaagccagtggagatttgcatgcttcgcatttgatgatgtctttaagaaaagtagacccagctgcagaatttcgtttctttggtggcgatttaatgcagcaggttggtggaacattagtcaaacattatcgtgaaatggcgttcatgggctttatacccgtactgatgaatcttccgacaatttatcgcaacatgaaacagtgcaagcaagatatcttgacatggcagccagatgttgttattcttgttgattatgcgagtttcaatctaaagattgcacattatataaaaacacatacagacatccccattttttactatatcgcccctaaaatatgggcttggaaagaataccgtatcaaatcaatcaagcgagatatcaacgaacttttctccattctgccgtttgaagtagctttctttgaaggaaaacatcactttcccattcattatgttggcaatcctacagcagatgaggttcggcaattcaatgaaacgtatgctgaaagttttgatgaatttacggttaggaatggtcttgacagacacaaaccgatcattgctttgctggcgggaagcagaaaacaggaaataaaagacaatttgccacccatgattgaagctgcaaataaggtgtctggctatcaaattgtattggcgggcgctccttccattgatgattcatattataatcgctttctgttaggttcaaacgtgagcatggtaaaaaaacaaacgtacgcattgctgtcacatgctactgtggctttggtgacaagtgggacggcaacgttagagactgctctcttgaatgtaccgcaagtggtatgttataagacgcctgtgccacaacttgttcgttttgctttcaatcatgtcatgacggtaaaatatatctccttggtaaatttgattgcggataaagagattgtgccagagctgttcgccgaccgttttaccgttcctcaaatagcagatgcgttgcagcaaatattgcccaatcatgcgaataggtctaagatgcttcagggatatgctgacgtcgctcatttgttaggtgacaaaattgcttccaaaaatgctgctcagcttatggtgaaattgttgcaacgtaaacattagataccatttcttcatgactgtttagagaacaaatcttttccatgattcttttattgtctttttgaagattgttacaaaaaaaggtagatgcgtgtaacattgtaataaacgaaaattactgaataacttgcgagatgaatatttcaaacttaaataataatgagattacggttctgaagaccatgacattattatacgaaataagtatgaccgagaatgagtggaaaaaagtggcaggtcgaataatggtagatagcctttttgaaaaaacattccaccatttgtacaaacaaggatttttcgttatagatagtggattctatggcacagctaagcggttcagagtgcatccgtccatttatttttgtcttctgagagaaattaaggacgatttgttcttccccctgtatgatagcctgtattcatattatcatgacaaggtgaagtataaggatgccatcaagcacactgagattctgtatggattgttttccgaaagaataagtataagaaataaagaacgtataactgtcatcttaaaagatctggttgatgaggtgtcttacgtctttggtaatcctggctatgagacatttgtgaaaaatattccaacatcatttctaagtactcagcttgataatatcttatataacatgttgttaaaagacatggacgttgactgggagtatttacgggcggtgatgcttggcgaagaacggaatttattgattcattccaccactgttttcgccttctattattatttgggaacaggaaagatgtgtattgactcggagaaacaacccattacgtcatacgccctgcttatttacgcaattgcctcgctgtatcaatctgattatgcaaatgcctacaaactctttgtaaaagtaatatcgacaagaaaaaaagagttgacatacaataatgcagtttatggaaattgcattattaatttttactatacgctatctttattgttgttaaaagaagaaaaaggtaaaaataaattagaaaaactggtagcgttggaatgtatgcgttcctcggcggaaaatcaaatactgatagtccctctttattattttttctgtaaaaagcggaacgtaaatcttatgaacggtgttgtgctcaaagtgttcgatgagaataatgaaaataacaccataaaacatttagcatgcgcaatcataaagcaactgaatataaaaaacgaattaatcacactttttgagcaaacggcaggaactacccatgcggctttcttaaacaccgaaacacaatgctgcaaaaccaatgacgaagatggtgtgaagatgcggcgtttggcaaaaagctcattgttagaacggttggacgtcaagcctttttgggtaactaaattagaagatttattggcatacacacaggagcaaaagcaagacacgaaaaaagatagcagcgatacgcaactggtgtatcttattatgttcgacaggattatccctatcttgaagaaacgattaaaaaatggaacttggtcggtagggagggaattaaccataaggacatttaaaaatctacatgacaattgtatggatgaaacggatattgcattttcaaatagtgtagaaccatgggaatacgacatatatctacgaaaatatatttatctgttagagaactgcaatcgtgttttttgcggaaacagctatgacatgcaccccgtgtcgatacattcagacagacctttcttaattattaataaaaacaaagacaacagttttggcgtatcatccaacattgccgacgagatacaaaacaatgcgataggaaaatgctttgttaaaaactcagaaacagattactcgatatttaatataacgccatatgagcaaaaggtttatcaaactatcttgtcacaaaagacataccctgcagaggccgaacagatgctaatccgtctcatacagtcaatcggaggaaaaacacaggttcactcgaatatggtagaaggattggaacaaataaaaaaggtagaaggcaaagcggtcatcgctttgcgtgttgcccccatggaagaagaatatttcaggctatcctttgttgttcatcctattgaacacttcgactttgtgccagggcaggggagtgtaagtacgattacggaagtcacgggagagaagtgcatcgtggttagaaagttaaagaaggagaaatctaacctgaaaaccatagaagataaactcgcagaattagaaatcatggatgaggcacagacacttgaattatcctccattaccgactccattacaatcagcatcgtgcaattgttgcctctcattgaatgggtacagcagaataatgaaacatgcgaaatggaatggctcgaaaactgcaggataaagtataggggcaaactgaattgctcgaactttaacattgctctgaagtctaagaacaattggtttgaggtcgtgggagatgtgtgcattgataacgagaagatgatgtcgctgtaccagctgttgcaacaaatgcacctaagcgataaaagcaagtatgtaaagataggcgacaatgaatacataaaactgagtaacgacttaaaacgcattctgcaacaaatcgatacagcaacaacagaaaataggtcgcatttgttgatggttcctgcggcaataggacttatggatgaggttgtgaaccattctgatattcatgtgaagcgaaatgcggcagtagatgcattgatacaaaaaatgaaagatgcggaaaaactgcatccgcaagtacctaaaacgcttaacgcgcaattaagaaactatcaagaagtgggatttgaatggatgtcaaaactcaccgcgtggggagcaggagcgtgtttggctgatgacatgggattaggtaagacgctgcaaacgattactttactgttagaacaagcacaaagcggaccttccttgatagtggttccggcgtcattagtgccaaactggagaaaagagttaagccggtttgctccaacgctcaacgtctttgtgctgaatgacgaggtgaatagggaacaagccatagagcagataagccgtaacgaggtgctcgtcaccacatacgcattgctgacgattcaccaacaacaactgtcacaaaaaagctggaacgtggtagttcttgatgaggctcataccattaagaaccccaacacgaagatgtctaaagcggcaatgacgctaaaagccgaacgaaaggtcatactcactggtacacccatacaaaaccatttgtcagaattgtggaatttgtttcaattcatcaatcccggattattggggaacgccgagcaatttaagaaaaaatatatcataccgattgaggaaaataagaataaagagcgacagggacagctgaaaaaactcatttctccatttctgttacggcgcacaaagggtgaggtaatcgaagagttaccagagaagaatgatatcaacttacccgtagaattgtctgacaacgagctggcgatgtatgaattgcatcggaaaaaggcagaggaactggcattggcggaagaaggagtaaaactaagtacgttgtctgagataacaaagctaaggcaaatggcatgcagcatctcattggttgacaaaacatggaagaaaacaagtagcaaattatctacgtttattgctttggcagagagcttgaacgacagcggaggtcgggctttggtgtttagtcagtttacaagtttcttggcagaagtaagacaggtgatggacaaaatcaagctaccttatttatatttagacggagcgacgcccatcagaaaacgagaagagatagtggatgagtttcaaaaaggcaactatcctttcttcttgataagcttgaaggcaggcggattaggcctcaacctgactgccgccaactatgtcattcatctggacccttggtggaatcctgccatagaacagcaagctactgaccgggcttaccgcataggacagcgcaatgatgtgacggtctaccacttgatagctcaacataccattgaggagaaaatcatacgtctgcacaaaaccaagcgcgacctcgctgattctttgttagaaggtggggatatggttcggacgttgacgcaggaagaaattttagatttgcttaaagaggtataatcaggcggataaaaaagtgatacaatatggtaaagacgcgcacttcttttgtcctgtatttttactaaaaaacgactatataaaaacgccaaaatagttacaaaagtacagaaattttctttacaaagcccctctcataactttcatatttgccaacacacttccacttgcttgcaaatatgcgcagcatttcgaagaagttatatctcgatgaatatcagaaggttaaggcgttaatagcactttttgcgacgaataaaaagcagggataaggcattaaagcaatgagttagatggattgaagtaatgggttaaggagtttgtcaacatatactaagcggacaaaagtatgtattttggcgtcttatctccatgggtttgtctaattagttgcaatttttgctcgttttaaggaaaaaatctatgctcataaccccatatttttttctatttcgcaaaaaataaacacccgtttttttgtcattttttaggacaaattacaaattaaattgtgccctctttcatgttacacatatttataaaaaatatgaaataataggcacattcagaattatttcgtacttttgcatcaattggtaatgccacgcaaactccaccatcaaccttggagttatcgttggcatgattctcacatatataaaaatagctataatcaatatatgaacgttttagaattgagcgaacaagagattggtcgcagacagagtcttcaagagttgcgcaacatgggtatagacccttaccccgctgcagagtttcataccaacgcattcagcactgacatcaaagaacaatatcaggaaagcgaagagaaacgagaagtggtgatagctggccgcatgatgacacgccgtatcatgggaaaagcaagctttatggagctgcaagactcgaaaggcagaatacaggtgtatatcactcgtgatgacatttgccccgatgacaacaaagacttatacaatgtggtatttaagagattgatggacattggtgattttgtaggtatcaaaggttttgtgttcaagacacaaacgggcgaaatttctgtacatgcacaaagtttaaccctgctcagcaaggcgttgaagcctctccctattgtgaaatacaaagacggtgtagcatacgataaatttgaagaccccgaattgcgctatcgtcaacgatatgtagacttggtagtgaatgatggggtgaaggatacgttcttacaacgtgccaccgtactgcgtaccatgcgtaaggttttagacgatgctggctatacggaggtagagactcctacgttgcaatcgatagcaggaggagccagtgctcgcccctttaccacgcatttcaatgcgttgaatatagatatgtacatgcgaattgccacggagctatacctgaaacgtcttatcgtgggcggtttcgagggcgtgtacgaaataggcaagaacttccgaaacgagggaatggatagaaaccacaacccagaatttacttgtatggagctatatgtacaatacaaggactacaactggatgatggaattcacagagaaactgctcgaaaccgtatgtattgccgtaaacggtagtcccgaaaaagagattgacggacagttagtcagcttcaaggctccttaccgaaggttgcctatccttgatgctatcaaagagaaaacgggctatgacctgaacggaaaggatgaaaacgagataagagaaatctgcaagaagctcaacatggagattgacgatagcatgggaaaaggcaagctgattgatgaaatctttggcgaattttgcgaaggaacttatattcaacctacctttatcacagactatcctgtagaaatgtcgccacttaccaaaatgcaccgtagtaaaccgggactcactgaacgatttgaattgatggtaaatggcaaagaattggcaaatgcttattcagaattaaacgatcctatcgaccaagaagaacgctttcaggagcaaatgaaattggcagataagggcgacgacgaagcgatgataattgaccatgactttttgcgtgcgctgcaatatggtatgcctcctacttctggaattggtattggcattgacagattggtaatgctcatgacaggaaaaacgtttatacaagaggttttgctcttcccacaaatgaaaccagaaaagaagatacctcaaagtaccattgaagagtgggcggagattggtgttcccgagcagtgggttgctgtctttagaaaagcaggatacaatttgatttcagacatcaaagacgtaaaagcacaagccttgcaaatgaatgtctgtggtatcaacaagaaatataagttgggttatgagcaacctaaagtagagcaattccaagaatggattgacagaagccaaaagaattcataatttaccattcaccattcatacattactttctcctgtgtatgaagaataatagaggtaagaaaatgaagaacgaatggcaatgtagtatgcagaacgaaaaataatgaattacaactgtggtaagatagcaatcattggtggcggtagttgggcaacagctattgctaagattgttgtatcgcatacgcatcacattggatggtacatgcgacgtgacgaccgtatcgctgatttcaaacgactggagcacaatcctgcttacctcacgagtcttcatttcaatatcagggaaatcttcttttcatcagacatcaataaaattgcagaggcttacgatacgcttatctttgtcactccgtcaccatactttaagaatcatctgaagaaactcaagactcgtttgcgtgacaagttcattattaccgctattaagggtattgtgccagatgaaaatgtggtatgctccgagtactttcatcgtgtgtatgacgtgccttatgaaaaccttgccgttattggagggccttcacatgccgaagaagtggctttagaccggttgtcgtatcttactattggatgttccaacattgagaaagcagaagcttttgccgagctgattgccagtgaggtgataaagacaaagatttcaaccgacgtgttaggaatagagtattcatccgtcttgaagaacgtgtacgccatagcttctggtatttgtagtggtttgaaatatggcgacaacttccaagcagtcttgattgctaatgctgtacaagaaatgaatagatttttgatgtctgttcaccccatcgaaaggagtccttacgattctgtctatttgggcgacttgttagtgacttgttattcaaacttttcacgcaatcgaacatttggtacgatgattggcaagggatattccgtaaagagtgctcaaatagaaatggagatgattgccgaggggtattttggaacgaagtgtatgaaagaaatcaataaacacatgcacgtgaacatgcccatcttggatgctgtgtataacattctatatgagcatatcagtccacaaatagaaattaagttattaacagattcatttagataatagaaaatgaaaagtattagtttagacattacaaaagccacccagttcttgaaaccaggaacagtggaagaatttgaatcaaaggtaaaagcggctcaagatgcgcttgagaagggcacttgtcccggtaacgacttcttaggatggcttcacctgccatcgtctatcactcccgattttcttaacgacattcaagcgtgtgcaaatacactacgtgaaaattgcgaagtggttgttgttgctggtattggtggtagctatttaggagctcgtgccgtgatagaggctttgaacaactcatttgcgtggttggttaatgatcaaaaaaatcctaccattctctttgcaggaaacaatatcggtgaggactatttagcagaacttaccgattatttgaaggacaaaaagtttggagttatcaatatttctaagtcgggtacgaccaccgaaacagctcttaccttccgcttgctgaaaaaacaatgtgaagaacagcgtggcaaagaagaggctaagaaagtgattgtagccattacagacgccaagaaaggagctgcaagaacatgtgccgacaaagagggatacaagagttttatcattcccgacaacgtaggtggacgtttctctgtccttactccagtaggtttgttacccattgcgtgtgcagggttcagcatcaaagaattagtacaaggtgcaaccgatatggaaaaggcaacgggcaaagacgttccttatcaagaaaatatagccgcacaatatgcagctgttcgtaacgctttgtacagtcaggctggcaaaaaaatagagattgtagtgaattatcagccaaaactccacttcatggcagaatggtggaaacagctctacggtgagagcgaaggcaaagaacataagggcatcttccctgctgcctgcgatttcacaacagatcttcattccatgggacagtggatacaagagggagaacgctccatctttgaaactgttatcagcatagagcagcctcagtgcaaaatgttgttcccaaaagatgaggaaaatcttgatggattgaacttcttagcaggcaaacgagtggatgaagtgaacaagatggcagagttaggtacacgtttggcacacgtagacggtggtgttccaaacctccgaattagcgttcccgaactgaatgaatactacatcggacagcttatctacttctttgaaatagcttgtggcatcagtggcaacctgttaagcgttaatccttttaaccaaccgggggtagaagcttacaagaaaaacatgtttgctctgctcaataaacctggatacgaagctgaaagcaaagctatccaagagcgtttggcaaacgagaaataagataaatgtttcaacaaacaataaataactatctaaaaaagcatggctttgggacattcgcacccaaagtcgtgctttttgatatggacggggtgttatataactccatgccacaccatgtcgttgcatggcagaaagcaatgcaatctttcggcattgaaatgacggaaaaagatgtatatgctactgaaggaatgaaaggaattgacaccatacgaatgttagttcgtgaacagcaaaaccgtgagatgagcgagaaagaggcgcaagcaatgtacgatgagaaaggtagattgtttcatgagatgcctcaaacacctatcttcgaaggggtgcttaccatcatgcgcaaaatgaaacaatgtggcatgcgcattggcgttgtaacaggaagtgcacaaaaaccgcttatcaatcgagttgcgaaagattttcaggacttcgttctgcccgaacatatcgtgacagcttatagtattcggcatggaaagcctgcaccagacccgtatttgaaaggtctggaactcacaggaggatttcacccttgggaaggaattgtcgtggaaaatgcgcccatgggagtacgggcaggtgtggcagctcaaatctttaccgtggctatcaacagtggaccgcttccaaatgagctgttacttgaagaaggagcagatttgatttatcctgacatgatgacctttgcacagcaatgggacgaactgatacaagcggcaactcattaagccacctgtaccgaaatgacattccaattccttgcaagaagtctattgccatcactgttcacatggacaccaaaacataaagtggctaacaacgattgttttagtcactttatgatattccgattgaaaggcaatctcttccatatagctgtgctatatgacaacagccgtgccactaacggctaccattaacatactattgccttcgccaatagtttcgtaatcaatatctatccctacaatagcgttagctccaagttcggctgcacggtcctgcatctcttgcatggaggtttcttttgcctgtcttaatactttttcgtacgcattgctacgcccaccaatgaaatcacgtattccagcaagaaaatccttgaagacatttgcaccgataatggtttcacccgtaacaacgcctttataggaaagaatcgtacttccctcaatcgttggagttgtggttataagcatgttttatgactttttgaaaagagaagctatccaaagtaacaacactgcacctaccactgcggttcccaaagaaccaatggttccgccccaagagatgttcaacagactcagcgcccaaccaccgacaacaccgccaatgatacctaaaatcaaattccataaaaagccgaagcctccaccacgcatgattttacctgcaataaaacctgctaaactaccaataataattgatccaataaatccaaacataatttctttctttaatttagtatttaattaaaccgtccataaatacagagcacctgtttactttgataatatttattctaaagagaaggctctctatggaacgtaaaattaagaagtatcatctctacagtctaataacgacagagacagatatctttcctatttttacaaatataataaaacttctttacttatgtaagaatttttacataaaataactaaattttattattcgcgaatcactcacctattatatagtaaagaagtcgctaaccgcaaaatctacattaccgatagttctatagttttgtgtccgaagacgctattggtttgccagcttgctcccattccaaaataccacccttcaaattattgacagtgaagccagccttttgcaacttacgtgcagcattcaggctacgctttcccgaacgacaatatacgaatacaggcttttccgttgagaactttgcctgtacctgacgaagaaaatcgggctgcaggacatctatattggcagcattacctatcttcccagccgcaaactcatcagcagttcggacgtcaatcaattggacatcaggtgcctgaatggctttttcaaacgcatttgcattcatcgtatggattccatccggctgaatacatcctccaaaaatactgcccatcatcatgattagcaatccttttaatttgttcatgttcatagatttatcttttttgttagacttcaaagatagtgataattgatgaaactcagacacctgaatgcgaattatttcactttcgctgtccttagaactaaaacaaacacaccttcttttgtgcggtttccgtctatacgtctcaaattccagcagcgtagaaaagctctttctgtcagaaagaagataaataaatttgcttttagacgggtcaatatcatattttttcgttacctttgcaagtgtataacaaaacattccaaagatgtcttgaacgaaataggaatcacagcacctcgtttagttatacaatagcgaataattataaaacatatatggacgattatcattcggaaaaatgtaaacggaacgttgaaggataggctttataaagactaatcttcagcaacattaataatggagattagtcatcatgagaacctattggaatacaaacgatatattacgtcccattgaagaatggcaaccaaattgctggattcaagtaacttgtcctaccgaagaagaccaacaggaattagttgagcacttcaaagtcccagattatttcttccaagatattagtgatacggatgagcgtgcccgctatgaatatgacgatggctggatgctcattattcttcgtattccttatgtgaaggaaataagatcgcggactccctatacgacagtcccgttaggtatcattcataaacgtgatgtcaccattaccgtttgctattacgaaaccaatatgatgatagattttgtgagttatcaacaaaaacgcaattctggtttcaccgattatgttgatatgattttccgattgttcttgtcaagtgctgtttggtacctaaaacgattgaagcagattagcacattgatagagaaggccaaacacaatctcgatcacgaagtaaacaacgagagcctgataggacttagtagattacaagactctctgacttattttatcacttctatacgtggaaatgagaatttgttggcaaaattgaagttcaaactacaagtggacgaactcgatgttgacctcattgaagacgtcaatattgagatgacgcaggcccgagagacaacgagtatttacgcaaacatcttggaatcgacgatggatacttattcgagcatcattaataataatatgaataccgtgatgaagacgctcacctcggtatctattctcatgatgtctaccacgttagtggcctcgctgtatggaatgaacgtcatcaatggaatggaaacttataagtacggatttatcgttgctatcggaatttcaatattagtggctgtcctttcttgggctattatgcgctataaacgctttatataaccccaaaaacagcaaaaattctacgtttctttaggaagttagcatatttttatttaagtttgcaacattgttcagccctataaactaacaagaatattataatagataattgcaatggcatcgtgataagctatttgattgatgcctaacactgaaataccatatcataaacttaaaacagtgaattgatggactctcaagaaaacaccctcaatcagggcaatttagaaagcgaaaaacaagttgtcaatgccgagcaagcaacctcttcagaggctgaaatggtcaaggaagaaacgccgagtgataaggttgcttcagaagtagcagaagcgcaagtagagaatgcctgtgcctcaaacgaagaggtagaaactgaagcaactcaagaagaaacaccagaaacgtctgaagatacgctcaaagaggaagaggacgctgatgatgcagagcaagccgcgcgcgtttaccaaaataagcaagagattttagaccgtctcaaagagattgtatcgagcgatgaataccctgttaagaaagagttagaccatcttaaaacgatgttctataagtttcatatcgctgaacgagaagcccaacaaaaggaatatcttgacaaaggcggggaccctgagtcctatcaaatagtacctgacagtctggaagaaacgttcaagacacaaatgggagtcattaaggaaaagcgtgcaaagattttccagcaacaagaagaagaaaagcaagaaaacttaaagaagaaagaagctatcattgagcaaatcaaaggcatggcaacatcgcccgatcaagctaacaaatctttccatgaatttaaggaacttcaacagcaatggaaagagataaagtcggtacctgccgacaaagccaatgaactatggcgcaattaccagttgtatgtggagcaattctatgacctgctgaacctgaacagagaggcacgagaatacgacttcaagaaaaatttggagctgaaaacaaaactgtgtgaagctgctgagaaccttgctaatgaggaagatgtagtaagtgccttccaccaattgcaagaattacatcaacagtatcgtgaaataggtcctgtctccaaagaattgcgtgatgagatatggaaccgtttcaaagctgcttccactgtcgtcaacaagcgtcatcagcagcatttcgaagaattgcgagcaaaagaaaatgagaatttagaaaaaaagatagcactttgtgaaaaagcagaggaaattgtagcgcaagaaaatacaaaggcgaaggactgggaagagcgcacccaagaggtgatagacctccaagcagaatggaaaactatagggtttgccccacaaaagatgaatgtaaaaatctttgaaaggttccgaacagcttgcgatcagttcttcacgaacaaagctactttcttcaaagagatgaaagaacgctttgcagaaaacgctgaaaagaaacaagcgctggttgaaaaggcaaaagctttggcaaatagcactgattggaagtcgacgagtgacaaactcattgcgctgcaaaaggaatggaagactatcggtatggtgcccagaaagcgaggagatcaactgtggaatgagttcaacaccgcatgcaatacgttctttgaagcacgcaaccaagcgaatgcaggagcgcacaacgaggaacgagaaaacttggacaagaagcgagacatcatcaaaaagcttcaagaaatgagcgaagaagtgggtgaagaactccaggaaaaggttcaagccttagtagatgaattcaacaagatagggcatgttccgtataaagagaaagacagtgtgtacaaagaattccacaatattttagacaaactgtatagcgatttacacatttctaatgcacgtcgtcatcttgataatttcaagaacaaccttaaaaacgtagcaaaacgaggcgacaatgcactggacaatgaacgcggacggttgatgcatcgatacgagcaactcaaatcagacatcacaacttatgagacaaatttagggttcctcaatgcttccagcaaaaaaggctcaagcctgctggacgaaatgaatcggaaagtagaaaaattgaaagaagattgcgagatgattcgcgccaaaatcaaggctatcgatgcagaaaataagaaagcagaataacctttataacgagagaagttaaaaggttaggcgattagcaaacaatgatatctaaaaatcccaacagttcgatgctgctgggatttttgtatatatcttcttcatttgtcgcatttatcttgtgagctgttatagaaattaaaattattcactaccactacattgcgtaaagcgcaatcaggttacccatttgtggtgacaaatcgacacaacatcatgaaaacctcatcatcaagtcaaagacttgcgagacatgcgaacatgaaactatttacacatgatgatacatttcctcaaacggcaagcgatagcgatcgctccaaacaccatcgggcagacggatgccgcaagtgataatcatgttaatctctgaacaataaggcaagcctaaagccttcttgaccaaccaactgtcaaagccttccactggacaagtgtcatatccctcttcactcatagccaacataaacgtctgtactgcaagggcacaacttttatgaacagttattcgtgtatctgcttcggtcacctgtttcacgataggatgaaacaaaccgatgacttgtgccaagagtttacgcatcaagccaagcaagccaaaacaacgtgtgtagaacaaaggcatcacaaaatcgtaatacaacttccatttctttatgcgcttctcgtgtttctctgcaggactgttccgcctcacattctcaatttcaaaagcttttacagccttggcatgcgcccgatgcttatctcttcgagtaacaaagacaaccatttgttgggcggttgtcgctgtttgttgatccaactgtgcatgtgccaactttttaagtaccgcaggatctgtgacatgatagcactcccacagttgcatgttcgaactggtaggagccaatgtagctaattctaaacaatgttttacacgctcattatccaatggttttgtagggtcgtaatgccttactgcacgcctatggttcaaaatatcttgtaaacccatatctattagttttatttctatttcaagagaaaaatatcctatcgctgctcaaccgacatctaaaatatcttatcttaatgctccagcaaaattaggtatttttcatatccttgtgctttcatttcttcttggggaataaagcgcaaagaagcactgttaatacaatatctcaatccacctctgtctttaggtccatccttaaaaacatgtcccaaatgggcttgacctttggcacttcgcacctcggtgcgttgcatatcgtgagacgaatcttgtttttcttccaagaaatgcgggtcaataggtttgctgaaagcaggccagccacagcccgactcaaacttatcggtactcaaaaatagcggttcgccagtggtaatgtccacatagatgcctggtctaaactcatcattgtacgcattgtcataaggacgttcggtggcagcatgctgagtaacctcgtattgcagaggtgttaacacccgcttcagttcagcatccgttttcttcacatatcgtgaagattctgttgtatctttgttggcaacacgtgcatacgccatcaaagcttgcggaacatggcagtatccactcgggttcttatctaaataatcctgatgatagtcttctgcagcatagaaatttctaagtggcagcacctcaatctgtagcttcttcgtgtattgcgtaccgagttttgccatctcggcttgtatcaaaggaaaatcatgtgcatcggtataataaatacctgtacgatactgtgtaccgacatccccaccttgtttatttaaagaggtagggtctatcgttctaaaatacaattgtagaagcaaagaaatacgcagtatttgagggttataaacgacatgtaccgtttctgcaaaacctgtctggtccgcacaaacctcctcataagacggattttgtccatgtccatttgcatatcccacttctgtgtggagaactccattgatttgctttagaaagtgttccgtaccccagaagcaaccacctgccaggtacaattcagcttgttccttcatatttgattctttttccgtagctatttgtgctcgcccatgacaactcatccacagaaaagccaatagcaaacaaggtatttgataacatatttttctcacccgagtcaatcgtttgatgatttacaaatctatggaaaaatttgaagcatcgcaaaattatacacttaaaaaacatgaaaagcaaccgtcgttgaccccatttaatggatgaagatggcgaggatgctgtctttagaaaatcaaaaaagtgctttctatgagaagaaaacacctttataatggttgggatactcggactcgaaccaagaatgacaggaccagaatctgtagtgttaccattacaccatatcccaatattgaaagtacaattactaaattgcgctgcaaaattactatttatttttgagatgaccataagaaaagacagttttttcttaaaaaaataaatttaatccttattttctacctttttcggttatttaccattaactttgtggaatattattacagataaattatacttgatataactgaatgaaatcatcaaaccaattggttaaaactattaccaaaggaattcaagagaaaaaaggacaagatatcattattgcagacctgagtgacatcgatggagctattgccaactactttgtaatttgccaaggtaactctcctgcacaagtagaagcgatttcagaatcggtaggcgtgactgtccacaaagatttgaaggagaaacccatcaatgtcgtgggattaggtctcaatcagtgggttgctattgattttgcagatgtgctggtacatgtgtttttaccagaaacaagagcgttctatgatcttgaaaacttatgggaagatgccaaattgaccaaaataccaaacattgattaagttggcatcaattttgatgtctacttgctgtcactgctaaataagaattatggacaacaacaaaaatccttacaacaataataacgacaatcaacccaagatgcctaaattcaatatgaactggatttatgcattggtagctattaccttgggtattctcattttgaccaatgggggtaatctattatctgctccaaacaccagcaaaaaagctgactatacagtgtttcagcagtatgttgccaaaggttatgctgacaaagtcgtgattaataaagacaagagcacgctgaagatgtttgttaagcccaaatatatccgtgagatattcaaggctacagctaagcaaacaggtacttcaccctacttagaagttgaattcggctctgtttctgaattggaaaagttcctgatggctgaacggcaagcaggaaaactaacaaggtttagctatgaaaatgagagtggtagcgagttttggaacattctcatgaatctctcattccccatcttcctgattgtcttgtggattctattcatgcgccgaatgggtggaggagctggcggtgcaggcggtggtgtcttcaatgttggtaagagcaaagcaaagatgtacgaaaaaggtaatgacattggcgttacctttaaggacgtggctggacaggctggtgctaaacaagaagtacaagaaattgttgacttcttgaagaatcctcatagatatactgacttaggcggaaaaattcctaagggtgcattgttggtaggtcctcctggaacaggtaaaactcttcttgccaaggctgttgcaggcgaggctggagtacctttcttctcgatgagcggttcggatttcgtagagatgtttgtgggcgtgggagccagtcgcgtgcgcgatttgttccgccaagctaaagagaagtctccctcgattatctttatcgacgagattgacgctgtcggtagagcacgaagtaaaaacccatccatggggggcaacgacgagcgagaaaacactttgaacgccttactcaccgagatggatggctttggcaccaatagtggtgtgattatcttagctgccaccaaccgtgcagacatgttagatagcgcactgttgcgtgcgggtcgttttgatagacaaatcagtgtcgacctccccgacttacctgaaagaaaagaaatattcttggttcacctgagaaaggtaaagacatctccagacttagacatcgattttctttccagacagacgccaggtttctctggcgcagacattgcgaatgtttgtaatgaggctgctctgattgcggcacggcataacaagaaaagtgtaggaaaacaagatttcttggatgcagtggacagaattattggtggtctggaaaagaaaaccaagataattactgccaatgagaaacgtaccattgccttgcacgaagcaggacacgccactgtatcgtggttctgcgagcatgccaacccacttgttaaagtttctattgtcccccgtggaagagcattgggagctgcatggtatcttcctgaagagcgtcagattacgaccaaagagcaaatgttggatgagttgtgcgccttgttaggtgggcgtgcagcagaagagttgtgtacaggacatatttcgacaggcgcacttaacgatttggagcgtgcgaccaagacttcatatagcatgatagcgtacgctggaatgagcgaagtgctgcccaacatcagctactataacaaccaagattatcagttccaaaaaccatattcagaaacaacggcgaagattattgacagcgaagtgttgaagatgattaacgaccaatatgcgcgtgccaagcaaattctcacggaacataaagaggggcatgcccgtttggcagaactattgcaaactcgtgaggtgatttttgccgaagatgtagaaaagatatttgggaaacgcccatggattagccgttcacaagaaatcatgcaagacaatgaacccaagttggaagatatgccagacgaagtgaaggcggcagaagaggaacatcaacggacattgaaagagagccaacaagagagttaacaacagcctcttcccctgccacctcctcaagagagaggggaagaaaagctaaaattctttacatccatgacatcaaaacttaaaaatctcatcacaagaagcattactggtattctatacgtagccatcttggtaacgtgctttttacaggcctttaacatggtaattgtgtttgcactcatcacaggtctggctacttgggaatttacaggcttagtcaatgagcataaacacgtaaacgtgaaccgacttatcaccactgttgcaggtgtttatttctttttagcagtggcaggcgtgaatagcggagccgttcaaacaaatgccgtctttgttccttatctgctgaccattatttatctcttcatcagcggactatataccaagagcagtgacagcgtcaacgattgggcatacacaatgctttcacaaatgtacattgccctaccgttgtccacgattaacgttatcgcctttagacaagctgcagatgggctgaactactattattaccttttgccactgagcatttttatatttttatggaccaacgacactggcgcctattgcacagggtcgcttttcggaaagcacaaactttttccccgcatatcacccgccaaaagttgggaaggaagtatcggaggcggtatccttgttttgattgtagcttccattatatactttatcgagtcgcaaggggagaacttatctggacttaatctcatagaatggctcggattaggattagtagttgtcgtatttggtacttggggcgatttagtagaatcattgttaaagcgcaccttgggcatcaaggatagcggcaacatcttgccaggtcatggaggaattcttgacagaattgactcatcgctcatggccattcctgcttccgtggtttatctttatagtctaactttggtataaacaagtaaaaagtcacatcactcaatgctgatattgttactgtaaaaagcacctacaaaacagcgtatataaaattgatagtatgttgtatggaaggaaaattaattctgaattttctttacaaagtgcctctcaaaattcgcgtgtaaacaaccaacactaaagttggtcgcaaatacgccaaaaatgagcgatgttcgtatctttttgatattaaggatgttacacttgtgacttctctttttagttgtattttcaccattttttagtagctaaagcattgctctaaggctggaatttgcatgctttaatgttgctgtaacatgttactaacgaccttaaatggtgtttctaagtgcattaagtcaatgttccagcgcaaagagacgttttatttattaaaatcagcgtatttttgtctgtcatttgcctattgattttttctattttgaagattttcaagagccgttttttggtaaaattacaggacaaaaacaatgatttcctttaccaaaatatggcaatttttctttgtttagttcattcgttttctaaaccaatttcttttgggcttagttaaggctggttctatatattaccaccgcatatagtcattaaatgtttatggaatacgttttgttatctttaggcttctttttatataaaacaggctgcgcctcaacaattcaaacaagtttgactgcattcggcttgctccgtttttggttcaaaatgtaagttcattcagtcgtgtagctcgctacactccttcactctcttgcattttgaccacaaaaataagctcaaaatctaacaaagctaatttatagaacctgccttaaataattattcaacacattgagatgtaggtcctgtggcacgatagcttaagcaagatcttactcttggttcgcatcgtggcattatttcattggaacttgcggaacattctgcaaactttgagcgatgtcttcgtcactaatcgtgtagttgcgcaagtcaccgctgagatagctctcataggcagtcatgtcaatgaggccgtgaccagaaagactgaataaaagtaccttggcttcgccactttctttgcatttctttgcttcacgaatcgtggaggcaatggcatgacaactctcaggtgctgggataattccttctgttcgtgaaaacaacagccctgcatcgaaggcttccagttgtggaatatcaacgccatgcatcaacttatcttttaccagttgtgagataatggtgcctgcaccgtgatagcgaagaccgccagcatggatgttggcaggcttgaaatcgtgacctaaagtgtacatcggcaataggggagtataaccagcctcgtcaccaaagtcgtattcaaacttgcctctggttagtttgggacaactactgggttcggcagcgataaactctgtctgttttccgtccagtaagttatggcgcataaaggggaaggcaagcccagagaagttgctaccacctccaaaacaggcgataactttgtcaggatattcgcctgccattgccatttgtttctcggcttccaacccaatcactgtttggtgtagcgatacatgattaagtaccgaacccagggtgtacttgcagtgaggagtggtagtagctaattctatcgcttctgaaatggctgttccaagacttccttgatggtgtgggtcacgggtgatgatatcttttcctgcgcgtgtagacatagagggcgaaccttctacggttgcgccaaaggtgcgcataatactgctgcgataaggtttttgctgcatggaaatcttgacttgatacacagcggcttccaaaccaaaaacctttgccgcataactaagagctgctccccactgcccagcacctgtctcagtggttacatttgtagtgccttcttgtttacaatagtagcattgtgccaatgctgaattgattttgtgtgagccaagtggattgacactttcatttttgaagtaaatatgagctggggtgtcaagtgctttttccaatgcgtatgcccgtacaaggggtgttgcacgatagtaggtgtacatttcacgtacgggttcgggaatatcaatccaagcatgttgcgtatctaattcttgtttagagcactctaaattaaagatttgcgctaaatcttctactgtgacaggttgctttgtttttggatttagtaaaggcaatggtttgttcaccatgtctgcctgaatgttataccattgcgtaggtatttcgttctcctgaagtataaactttttttgtttactcatattctgttgtttttatttgttctttataatgatgaaacccttagtaataagaaagttattgagacaatagcaatctgtctttgggtggtagtttttgcaaagttagcaaaaagatattacttctcttgtaagcatccattgaaattatgtatctttgtgtcgaaatatgacgataattcttaccatattgtcttactttggggtgttgcttttggtcagtcgactaacagcaaagcagtcaaccaatgacactttttatcgtggaaaccgacagtctccgtggtatttggtggcttttggcatgataggtgcgtccatctctggcgttactttcgtctctgtgcccggtatggtgaataccattgggatgacctatctgcaaacttgcttggggtttgtcttgggctatgtagctgtagcctttgttcttctgcccatttattatcgcttgaatctcaccactatctattcttatttgcagcaacggttggggacaaggtcgtacaagacaggagcttggttcttcttgttgtccaagatgtcgggtgcagcggttaagttttatgtggtttgtatgatacttcaacgtttcgtactcgatgccttaggaatcccctttgtgataacggtgttggtattggttgcgctcatttggctttatactcgtcggggaggtattaagacgctggtatggacggacacctttcaaaccttttgtatgttcatggcgctcatctttatcatcattaatgtcatgtcaatgctcaatctgagtgtcaatgaggttgtgacaacgattgtccaagatgagaggagtagggtctttgtatttgatgattgggtatctaagcaaaatttctggaaactctttatcagtggaatctttattgtagtggtgatgacagggcttgatcaagacatgatgcaaaagaacctgacgtgtaaaacgctacgagaagcccaaaaagacatgtgtacttatggacttgcctttgtacctgcgaacctcttatttttatgtttaggcgtgttgctgtcgatgctcgcacagcaagaagggatagcgttgccaagctcgggcgatgaactgttgcccatgtttgcagcaacaggcaaaatgggaaacatggtcgtggtgttgttcaccattggtattgtggcggcatcgttcagcagtgccgattctgcactgacggcattgactacaacctactgtgtggatattaaggaaaaagccgatgatgaggcattacgacatcgagtgcatgcaggaatgagcgtggtgtttgttatctttatactactatttagaacttttaattcaaccaatctcattgatgccatctacatacttgtctcttatacgtatggacctttgttaggactctttgcttttggcttatttaccaagtatcaagtgacagatcgttgggtaccttattttgccattctctcaccgatattgtgttatgcgttgaatgctttggcacaacaactgtgggggtatcattttggatatgaactattgatgctcaatggcgctcttacttttgctggtttgtatgtaacgaggaagaaagaacctttgcacattgggcattaaacgatgctggcttcgcacataaaatcaagtgcatggcacttttatttctcgcaatttcctcctctttcagttgaagacttccgtataaaagaaaagaggaagcacgaacagcgatggtgtctaaacacattaccacccctgttgatgtttcctctcttgccgtgtttgtaggtgagtttagagtttgtcaaactccaaatggaagttgacaacggcttcgatgccacgccaaatcatgtctaatggaatgttctcgttaggagaatgtatggcattcgattccaagccaaatcccatcaatatcgtttttacacctaatatcttttcaaaggtggcaataataggaatgctacctccacggcgcacgggtaaaggacgtttaccaaaggccttttcgaaaccacgctcggcagcctgataagctggtaagtcaataggacaaacgtacgcttgaccgccatgcagcgactggatgtccactttaactgtcttaggtgctactcgtttgaagtagtctaccaccaactgtccaatcttctcatggtcttggtgaggtactaatcgggtggaaagtttggcgtatgcctttgagggaagtactgttttcgacccctcgcctgtatatccaccccagataccacatacatcgaacgatggacggaagccgtttcgctcaatggtggagaagcctttttcgccaaaaagttcgtctactcctatgttttgtttgtatgctttttcgtcgaagggtatagctgccaccaacttacgttcttctgttggtatgtcttctacgtcgtcataaaagccgggaatggttattctgccatcctcgttggtgacatccgcaaggagtttgcatagcacattgataggattggcaacagcaccaccgaagtgtcccgaatgcaaatcgtggttaggacccgtcacttctatctgccaatacgccaaaccacgcagcccagtagtgagagaaggcaggtcggcagaaagcatgctggtgtctgaaaccaagataacatcgcattttagcaactcttgatgttcggtacagaagtcgctcaagcttggcgagccaatctcttcctcgccttctaagatgaatttgacgttgtgttttaagaggttgtgcttgacaacatattcaaatgccttggcttgaataaacgactgccccttgtcgtcatcggcaccacgcgcccaaatatgtccatctcttatttctgcttcaaagggattgctcttccaaagctcgaaaggttcggcaggcatcacgtcataatgcccataaataagcacggttttcgccattgggtcgaccatcttttcggcataaacaataggatttcccttggtaggcatgatttctactttgtctactcctgccatgaggagcaactctttccatcggttagcgcaggtaatcatatcttggtgatgttctggttgtgcacttacgctggggatgcggataagactaaaaagctcatccaacattcttttttggttttctttgatgtaggtttgcatgattgttaagttgataagggggttagttgaatagttgacgagtgaatagttcacaagttgacgagtgaatagttgacaagttgacgagtggatagttcacaagttgacgagtaaatagttgacgagcggagcgtttatgaataggagtgatgcgttaattgttttacagtccataaaacttgctcacttgtcagtctctctatctgtcaacaatatcctttaataccattgtattgcatttccgtacccactgcgtttgtcatactttagcgcatccataagggtggcagcattggcacggaacgtgaaattatagctggtgtaaggtgccaacaccacagagcaactcatgttgaagcagtgtaaatctcgttgaagcgaggcggttgtcatggacatggctttgttctcaaagtcataacccgaagagaaactgatgttccagccatcgctcagtcggacattcccactgacattcagagtctgtgtgaacttataaggatagcgcatggtattataattaaattttgacacagtgcgatcttcgctcatagtgatgccataaccgaaagtgatagaccaaggaagtttgaatggcatatagccgtcatcgtccgtttccgccatctcaccgccttttttgcgctttgctccacgctgcgcatcaatcatatctttgtccaagttggtatcaatatcggtgttgggaccttcttcatcgtctttgtttcgttgtttgttgtcggtctcttcactcttgcctccgaacagtttttttatcttttcgggcgtcaatgtataagagatgttttgtgacataccctgaaaacgtccgaaacgtcccattccccattccgttcggttgccctcgtaagggatgcctttctcatcaatttcgtatgcgtatgaagcaaatcgggcattcatgttaaaggtgtaattcttccaccacttcagacgaatgcgcatattcaaatcgcttagtggcttttccttggctgccatgttgtatgacatctgaagtccaagctcgtcaatgatactgattttcttgattcccgtggagtctttgtcactctttaccttcatctcgatgttattacccaaatcaacagagatgtttccgctgcgtccacgacccggaacagaatacatgccattttgataaggtgaataacctacgagtgatacgttgccgtctgcgtcggttttttgataataatcataatacccataacgacgactaccaaagtcgggggcatagctaaacgacacagagggtgtaatgacgtggcggatagcctgcactttatcaccaaaaatcttacggttgggaataaacataccatacagtttggtggacacacccaagttgagcgaccagttataaacgttattaaagccgtatatggtatcagttttctctgtttgggtgcggtcattccacgacttcctcactttatttgagtatattctatccgtgaaattgaatgatggattcacgttgagataattgaacaaagtaaagtttgcgctgattggaatatcgtgttgaaagccattcttccagtctttaatcaaattagacttgaagagtttgtcttcttttgtggtgatagaattggagaaacgtcctgtataactcatcgaaatcttttcataccagcgttcatctcctacaaggtgcttgcgcttgaaggggtaaaaacggctaatgctgatattcaaatcgggcagtgtcatggcgatagaagagtcgcgcatgttctgtgaaaggttcgcagaactgctgagtgacatgcctatactggaaaaggtggtgctccaactaacggaagatgtacgtgtactctgtgtaagcgattgtggattatacaggctcgtgaggttatttctctcataactggaggatgcaaagttcacactggctaataaagaattaaaaggattggctttttggtcttgtcgatgactccattgcaccttgtagctttgttggcgagagaaatctggcagtcctttgtctcctgttcttgaatcttgataactcagaagcacactaccattaaagcgatagcgtttgttataattgctcgctaaggtgatgccccatgagcctttggtataaatctcacttaataccttcaaatcgattttgtcactgatagcaaagtaataaccgcagtctcttagatagaaacctctatccatttcatctccgtaagtaggcatgatgaagcctgatgaatagctcttggtaaacggaaagaatccgtatgggacggcaagtggcaggggtacatcggctacaaccaagtaagcaggaccgaaaaccacatccttgccaggacgaactttacctcttgacagcgcaatatagaagtcgggatgaggcttgtcgcaggtggtataacgaccatgttccatatataccacgcctgaggagtcgcgtttggagcgctcactccgcagaaatccatcctcctgttgtgtgtacacgttgttaataaggcctttcttggttttgaagttgaacgccatggtgtcgctctcgtatgaatcttgtcctaacttgaacacgggtgtaccttccaatgccttggtggcggtatcttttatggcacctgtggcgtgtacaatgttgctatccaagctcattcgtatcttctcacttttaaggtccatgttttcgtatttcaccgttgaagagccaaatagatgggctgtcttggtcttcgcgtcgtagataagagagtcgtcagcggtgtattctacaggtgcatcaatgccttttgattttctacggttaagcgagtccaaccgaattgagtcgtcaatgatttggttgtgcttctgaatggcaagctgcaacgagtctaaggtgagagtatctgtggtgttgttggtacgttgtgtctttgctgtgtctgttcgatgagattgcgtagagtcacctacacgcaaggtatcgcgtaaagacgcttgttgcttggcgtaggaataaaaattattgacgtctgccattacgaatacgaagacgaacaatagcaaagctatgaccgaatgagtcctcatttaagttgcaaaattacataaataagcctgaatagacatgcaattttctatttttaactaatagaccaaataatgacgaatgcgtacgttctattcaaacttttgcatccattgtttgaagcgttgagctcctccgttgccaaaccttttaacgcttttcagtgcctgttctggtgttctaacacggtcaagatgcgtttttgagtaaaacttatccgcatagcagatgacctgttcttccagtgtctcgggtagaaaattctgatgggggagtggtaaattttgttcgaggatattgcttaattcgattcctgcacctgtatggcgttcacaaacacgtgcatgacgtggaaaacctgccgagcgtaacatgtctgccccaatgataccatgcttgatataaggttccgtaccaaaacaaaatatacctggcgcattgcactttacaatgccgatgtcgtgtaacatcgccgcctcttcaatgaattgtcggtcgagttgtaactctggatgacgatccacaatctgtaaagccttatctgtaacacttttactgtgggttaatagaatctttttcagctcgttttcttcgggataatattgattgataatggagcgataatccatgataaaaccagttttaattatcaaaaagctcacctttcaaaagaatttaatgaaagatgagctgtaaatatgcaagtcgaaaacggcattacgatgcctgttcccgttctatatagccaatgacatcgcccttgttgagtttgctgccttgctttgcattcacttcaacaagtttgcctcccaaggctgcaggtatttctacaaactcaccccatggtgcttgtatgtagcaaaatacatcgccctcttggtattctttgccaatgtaaggctctacggagggtgcgcattcgccttctccattgaactcccagaacacttgtcctttgacaggagctacaatggcatcggctttggcatgcttaaaggctgtgagttcttcttttgataccttgctaccaagcttagcatcttttgccttttgcaggtctgccaagaagtttttcttggcttgtccactcttgtagttgcgatattgctctgggtgcattgccaattcgaataactcttcatcgtcttttccaaagtcccaaccattctcttgcatttctttcttgaagtcgtccaagttgtttttgagcaatgtatgagggtcggcatcggtaaattcgtatcctttttccttcgcaaggtcgactaatacttggtctactttgccaggtaccttgccactcttgccgagaatcatgccccacatcgagtcgtccatcatgacaaagcgtccttttccttgctcaattgtcaagagattcatcaaagcgatgttcttggtatattgcgagaatggtgttaccaagggtggatagcccacgcgtggccatacgtatgccacttcatcaaacagtttgatgagcatgtcatcagtagaaagctcttcttctccttttttctttctgatattattaatggtgctatgaatgcctgctaagtctgccatcatgcttcccatcattcctcctggtaagccacagcccaacagcaatgaactcataatcttgttttgaggattgatgaaatatcccaaccagtcgtctatgaactcctgagtcaaggcacgtgccttcatgtaagcgtccatattgatttctggtacatcgaatccagctgttttcaacatactctgaacagagataacgtcggggtgtaccttgccccaagataggggttcgatagccacatccaggatatcaatgccgtttttggctacctccaacatcgacgccatagacagtccaggacccgtatgaccgtgatattcgaggataatttctggatgtttgtcttttatcatcttggttaactgtcccaagaaagtaggttgaccgatgccagccatatctttcaaacagatttcttctgcaccagcctctatcaaagtgtctgctatttgaacataataatccaacgtgtggataggagatgtggtgatacacagtgttccttgtggtgtcatgcccgcttcttttgcccacttaatgcttggaataatattgcgtacatcgttcagaccgtcgaagatacgggggatgtctacgccttgtgcatgctttacacgatacatcatggcgcgcacatcgtctggaacgggatacatacgcaaagcgtttaatccacgatccaacatgtgtgtcttgatgcctaccttattaaatggggcacagaaagcacgcacggcatcattaggattctcgcctgccaataagttcacctgttcaaaggcaccaccattggtttctacacgagcaaaacaccccatctctatgatgacgggagcaattcgttctaattgatctttgcgtggctgaaatttaccagatgactgccacatgtctcggtatatgagactaaattgtatttttctcttcatattcttctctttatcaacctttacacggtgttgcaaaattacgcaaaaaaaatcaattagactattgccacattcattttttaagatttatagcatttcaacttttcaaaacaagcgagccgaagtgcttatcacaatgaaggcacatcggctcgctaaaggtcttaatgggatagaatagtttgttcaaatacgatgtcttacaaacttattctattccattacacgttttttatttcgttggtacttcttccaaggcttgctttaagaattgccagaaaggctctacagtcttgataaggcaacgctctgtcgaggtatgcgggctgcgaatggtaggaccaaacgacaccacgtccaagtgaggatatttgcctaagatgatagaacattccagtccggcgtggtctacctgtacgataccttcttcgttgttttgttctttataaacttttaacagcattttgagcagttcgctatcaggatttggatcccaaccgccataactaccactgaaacctactttcattcctgccatattgaagcagctttggagcatttcagacacataggctttcatctcttcgctggaagaacgagccaatatcttaaacgaagccttgccagcttcaatatctataatggctaagtttgaagaagtttctaccactgaaggcaaagacggaatcatgcgctctacgccattgtggcaggcatagatagctgctatcaagttgtcctgaatgggttctggcacttgtgtctttggcgttacaacctcttctactgtcaattcgatacctttctcaatatctctgtattcttcaatgaactcttctttccagtctgtagccaattctttcagcgcttcaacgttctctttggggagcgtaagaaccacttcggctttgaacggaatggcattgcgcatgttgcctccgtgccatgtagcgagtcttgcttctgtttggcgaatggcatcgtgtacaaagcgcaccatcagtttgttggcattgccacgaccctcatgtatttccaaaccagagtgtccgccacgaagtccagatagtgtaacctttacagcagcatctgtgctatctgtttctacttctttataatctaattctgcagtaatatcgatgccgcctgcactaccgatgacgaatttgccccaagtctctgagtctaagttcatcaagatatcgccttccagttctccttctggcagggcattggctccaaacattcccgtttcctcgtcagcagtaatgagtccttcgataggtccgtgcttcatttctttgtcttccatgacagccatgatagctgccacacccattccgttgtcagcacccaatgtagtgttgttggcttttacccattctccgtcaatatgtgtttcgatggggtcggtttcaaagttgtgatgactctctggtgccttttgaggaaccatgtccatgtgtgcttgtaaaatcaccgttttgcggttttccatgcctggtgttgcagcttttttcatgactacgttgtccgccttatcgatataggcttcaacacctgactttttagcaaagtcgagtaagaactgttgcactttctccagatgtcctgaagggcgtggaacttgtgtcaatgcgtggaaattacgccacacacacgttggttttaaatttttaatttcactcatagtatttaaatttatggagtttcagccgtcatgtagttctacatttagctaactgctccggatgaaaaaatgcaatgtatattatgtttcgtcagcaaaccgtaggttgccagctttcactgattttagtcttttttgtgtgaatgacagcattatccacgcataaatgcccaataccgccacgagcaatgtttgtaccgagtgtacaatgagaacaaagtacagggcatcggtatcggcaacaccgtacaggatgagcatggttttcacggcaaagtgccatggccctgcaccgtttggcgtgggtacgatgaccgcaatagaccccacgatgaaggtaactaatgcacacgacagtcctaagtgagccgttgcctcaaagcaatagaaggtgagatagtagtgcaggaaatagcacaaccatattgccaaggtaaaaatcaggaacagagggatgttctttacttttcgtagagatgtgattccttgccctatatcgtgcaacgttgttttcaccttattatatatagacaatttcttcgctaagaagaataccaatatcaataccgctacggcacaaatagccgtcacaatgtagccagcagtggaaaactgttggaggatggtatctacgtttgtacccgtatggataaagaaggtgtcgaaaatcttgatttgtgcaatgaaggtcagcacggtaatgaacagtaccaatatggtgtcaatgacccgctcggtgactaccgttcctaaggctttgggaaacgaaacgttgtcgtagcggttcagtacgccacatctggcaaactcgccaatgcgtggaatcactaaactaacggcatacgaaaggaacacagcattgagtctgactgatgttctggaacgttcacctaaaggctccaacgtttgtttccagcgccaacctctaaaagcttctgctaagattccaaacggaaaggatagccacatccatgtccaatccatctcttcgaacactacattcttgatgagttggaaatcaaaatcgcgatacatccaaaacagaatagcactgcccaacaacaaggataaggcaacgttgacagtttgatgattgaacagtttcataaagtgctattaacgaatttggagtaacatgcaactaagcattttctattttatgtagagatagcgcaagccgaaaccagaaaaagtttacttattttggtgaggcgcagcctatcttatgcaaagatagcgcaagccgaaaccagaaaaagtttacttattttggtgaggcgcagcctatcttatgcaaatttacagtaatttgcgaggatagccaaataaataaaaagctttttacggatgtttttctacttgtttctttgatttgtatcaacaaaacggggtaaaactgggtagaatgtgctaaattgtttgcgcacacagttaattgtccctatctttgcatcgacaataagaaaaaggataacaaatttaaaagaaaggtaaaaagattatggtaacaattatgactttagctgttgtagcgataactgtcgcacaagctattcatttaggaaacaagattaacttcaagagcaagtaaatcttgcctttcctttttagaaagaaagaattttttagtttaacatatcaaaggggttgtgtcggtgtcggcacaaccttttttcattctcggtggtttggagtgagaataggaaacaggtttttgcacggcagtctcctttctttttgtaagaaaactttaccatttaaccctctgaatacttgcgttgtaatccatcaacccatattttatctgaaatatcgaaaaattttaagtgtttgattatcaactatttgtgtttttatattgaaattttgcgaccttgaagcattcatttagtggtgttgatgcatggagataagctgattatttgcgatagataacggtgttgaaacattgtttcagcacgattaagtcatgtttctatcaaaagaatgggctgtttttaggtaaaaaactcctatcttattctctttttaattctattataaagaaaactcagataaaaataatggcgattttgtaaattaaattcagaggaattagcttaattccaaacctaaattatgacaaagtttgtccagctgtggattctcttttttgagcagctcaaagatttcacgcttcgagtaaatcttcgtcacttcctgcgcttctgccagtcgaagagagagtaacagattgttgttttgaagtagcatgcgtagggttgcttgaatcttgcctttgatgtcctgcaactgcttcaataggatgtcgttttcgatgaccacttctacctgtggaaaggtggtgatttgcggcaaaaggttcttcattctttgggataaacctatcttttctggtggcattcggttgcacatcacgttccactgtattctcaactcttcgttgctaaaagtattacttgcagtagttgtttgttgttgggcttcggcttgagtgatattttttgtagatgtgctgcgtaaacttccaaaggatatccctaagtcagaaatttttagacgtggtcttgtaggttgtgtattggtgttggtttgtacgcctgtatctttcttctttggtgttgaagaaagttgagagtgggaggcatttactggagacaccttgccggtctctaagcctaccacctgttgtgttgtctctccacccttcacgggagccaactttttgaacaaggattttaatcgtttggggctacgccccacacccgcaggtgtgtcatcgggctgcgtaatttgagctatctgaatcaaggtaatctctaccagtaagcgtttgttgctgctttgtcgatagttgatgtcgcattgattgagcaatttcagagcttggtacaagaaagtcgtagggcatttctttgcttgttcttcgtatttttggcgttgttgctggcttatctctaataagggaagcgtttgcacatcctttgccatgagcacattcctgatgtgcgatgccaatccgttaatgaagtgacctcctgcaaagcctttggcaatgatgctgttgagtaggagcatcgcatcgctcactttgttttgaaggcataggtctacaatgttaaaataattatctgtatccagtacattgagatcttctgtcactttagtgtacgtaatgttgccttggcaaaaactggcagcttgatcaaagaccgatagtgcgtcgcgcataccgccgtctgccttttccgcaatgatgttgagtgcctcgtcttcgtaagtaatttcttccttttcggctacttttttgagatgattgatgatgtcgttcgtcgtcatgcgttcgaaatcataaatctgacagcgtgacaaaatcgttggcaaaatcttatgtttctcggtagtcgccaggataaaaataacgtgagcgggcggctcttctaatgttttcagaaacgcattgaatgccgatgtggagagcatgtgtacctcgtcgatgatgaacaccttgtatttaccaacctgaggcggtatgcgtgtctggtccatgagcgatttgatgttctccacggagttgttactggcagcgtcaagttcaaagatattatatgatctttgttcgttgaaggctttgcaactctcacattcgttgcaggcttcgccatctgctgtggggtgcaggcagttgattgctttggcaaaaatgcgagcgcaagttgttttacctacgccacgaggaccgcaaaaaaggtaggcgtgtgccagctttccgctttttacggcatttttaagagtggtgatgagcgctgtttgtcctaccactgtgtcaaaagaagtggggcgatatttgcgcgcagatacaatataatctttcattataagggatattagtggtgcaaagataacaaaaagattacagatgtttacatggggtaattgtttatttgttaattagataaaattctgaataagacatttttcgattccgattatattcactatttttgcaacatattataattattgcttgtgagtcggttcaatatcatactgagttttatcagtcattataaatatctgatagtcattgtcggaggtattcttatcgttggatttctcgatgaaaatagtttcttaaagcgtgtccaattggaatggcaaataagtgatttgaaagcagagattgagaagtatagaactcaaaacgaaatcagcactcaaaagctgcgtgagctaaagcgtaatcccaatgcaatcaagaaaatcgctcgcgaaaactatttcatgaaagccgatgatgaagatatttttgtgctgagtgacgaccaagcaacacaacaatcaaaatctacagatgaagcaactgagtaaagttcagagtattttatttctttctggcggcgcgatgatggtaatcggagctggctgtttcgcctttatgtggcaacaacacattgtgtgttggatctatttattaggagctttgctctttggtgtcatacaaatgatgcaaacgtatgaagggagttcgctcactgtgaaacgcctaaaaaaaatcatgacctttgcagatgtgcttttcatactatctggtttgctcatggtggatatggtattccaattttttaaggcagccttttccaactatctcacctattatcaacttgtttataataagtgggtggtccttcttttggttgcggcactgttggaaatgtacaccatgcatcggatagggcatgaactatccaaagagaagtcgtagaccttgttgtattcccaaaaaatactaaaagcaaaggtagtcatgataaattgccttaaatatttttgttcgtccgcaatacatattatctttgcatttgatagacgactttcctacattgaaatccagagcagtgaatatcgattggtgtcatctttaacgaaaatagaatcagacaatatcagttttcatgctgttgggttgaaatctctactcgtctaaattataattgctctaagaaaacatatatgaataaaaccttatacctacttatcgctgtattagcttttacctcttgtgctaatacgtataatatccaaggttcatcgaatgtaaccgacttggatggccgaatgctgtatctgaaggtactggaaaacaatgattttaagagtgttgactcctgtgatgtgactcatggacagttccattttacgggtcatattgatactgctcgtatggcaaatatcttcatggacgatgagagcgtgctgacatttgtattggaagaaggcgatatcaacatcaaaatcaataacacgcaacaaacagtcagtggcacaccattgaatgagaagttgtttaagttcttcaaagagtacaatcaactcaaaaaccgggaagctgagttggtgcataaacatgaccaagccattatgaatggtagtgatatggctttagtcaatgcagaattgaatgcagaggcagctaaattaagtcaaaaagaagaccatttagtaacaacgtttgtcaccgataatttcgataatgttttaggaccgggtgttttctttatggtcactattggtaatcaatatcctgaattaactccatggatagaggatattatgagcaaagctacagaccaatttaagaatgatccgtatgtcaaggactattatcagaaagcattggagaatgagcaaatcatgaatggaatgaaagaaatgcctgctgcggttaatcaaattccatccaatgcacaacaactgccaccgccagcttcgcctgctgatttggcaaaaccgtctgaatccaaagagtaaaaacattatttttcatggctatcttaatacatggtggtacattagtcaacgaggggagggtctttcgaggctctatcgtcatcgaaaaggattgtatcacccacattgttccagaaggtcagcaaccctgtggcaatgatcatcaagtaatagatgctacgggatgttttgtcattccaggtgttattgatgaacatgtacattttagagagccaggacttacagcaaaggctgatattgaaacagagagtagggcagctgcttatggtggagtaacttcgtttttcgacatgccgaacaccgttcctcaaacgacttcgttggaggctttgcaacaaaaacacgaattggcacagcgaaacagtcacatcaattacactttcttttttggagcttccaataccaatgctgacctgttttcacaacttaatccaaatatagtgccaggcataaagttgtttatgggtgccagtacgggaaatatgttggtagatagaagtgatgtcttaacgaaaatctttcgcactgcaccccttccagtcatgacacactgtgaggacaccgagctaattcgtcgtaacacgactgcctttaaggcaaagtttggcgacgatcctgccatgaaataccatccattgattcgtagtgaagaggcttgttatcagtctacagctttggctgtgcgtcttgccaagaaatatggaactcgtcttcacgtggctcacctaactacagcaagagagttagaactgtttggcgagcaagaaaacattacggcagaagcggtgatagcgcatttgatgttctcggaagaagattattcaagattgggaagtatgataaaatgcaaccctgctgtaaagcaaaaatcagaccgacaggcactgcgagccgctttgaccaatggaaaaatatacaccatcggcaccgatcatgcgcctcatctgcttaaagataaagaaggaggtagttgtaaagccgcttctggcatgcccatgatacagttctcgctgcctgcaatgttagggttggtagatgagggtgtactcaccatagaccgtcttgttgcattgatgtgtcatcatccagctcagttgtttgaagtgaatgaccgtggttttttacgtgaaaactacaaggcagacatcacaatagtaaaaccgcataccccttggacggtgacagaggatatgattcaaagtaaatgtaaatggagtccaatgttgggacatactttccattggaaggttatgcaaaccatttgtaacggtcacattatctataacaacggtcaatttgatagtaactatcgtggcgaagccttgcgtttcaggtagtcattgcgccagtggttttatatctttatactcccttgggggctaaaatgaagctatgattgcaagaatattgatttttttgctgtttctcatcgtattgccagatttatatatagatctacattacttccgaaagaaaaccacctatacccggtggaagcgattgttgtggtggctaccagccattttgatgttggtatatacgttcaaaatggggactgaaaagaacttcatacccgacaatcctgcgtggatagacaactatctgcttctccttggattatttgttgtgccgaaaggcatctttactctctgctctttgatagggttggggtattgccgaattttcaaaaagcatcataattggggcaatttagtggggctgtttttatccattatggtgatatatatattggtatatgggtcgactttcggtcttcgccagttaaaaatcaatcgtatagatatcgcttttaaggacttgcccccagcttttgacggatatcgcatcgtgcattggagcgatgcacatgtaggaacttatatgaaatcacgtcgtcctctgttggaaagagcggttgacagtatccgaaaacagcaagcagacatggttgtctttacgggtgatttgcaaaacttgcagccctcagaactttatccatttcaagacttgttccattctattcatgccaaagatggggtgtttagcgtgttaggaaaccatgattacagtggatatattgccgcatcaaatgcgattaaagtgggcaatgaacgagaactcatctctcgagaacgccaatatggttggcagttgcttcttaacgagcatcgaaccattcatcgtggagccgattctattgtcattgcaggcaccgaaaatgacggacttccaccttatcctgcaaagggaaatgtgcaccaagccttgcgaggagtaggggacaatgcgtttgttgtcatgcttcagcacgacccttctgcttggcgaagaatcattctgccacaatcgcatgcacaactcacgttgagtgggcatacgcacggagggcagttgagtctgtttggaattagaatctcccgactcttattaaaagaagattacggactctaccgtgacggcagtcgtgcactttatgtcacctctggcttcggtggtctcattccttttcgctttggagtatccagtgaaattgctgtcattaccctacatcgacaaaaataacattcagcacattctctatgaaatatttatatcgtatctatcagctcttaatagctgcccccttggtggcattactcaccctgttaaccaccttagtaacaacccttggctgtattttaggtaacggacacttttggggatattatccaggaaagtgttggtcgtggctcaccattcgcattctgttgttgcctgtgaaagtcgaagggcgtgaacatcttgacaaaaagcagtcttatgtttttgtgagcaatcatcaaggtgccttcgatatctttctgatttatggttttttgggtcgtaactttaagtggatgatgaagtatcagcttcgcaagatgccatttattggaatggcatgtcaagctgcacatcatattttcgtggacaaaagagggacagccaagataaaacaaacttatttagaggcgcgtcaaacgctgaaagacggtatgtctttagttgttttccctgaaggagcgcgcacctttacagggcatatgggcgatttcaaacgtggcgcttacatgttagccagtgatttgcaactgcctgttgtgccgctaactatcaacggatcttttcaagtaatgcctcgtatgcgtgatatgaaatgggttcaatggcacccactcacgctgaccatacatgagcctatccctccaaaagagcagagtccagagaacatcactgccaccttgcaggagagttatcaagtgataatgaacgccttaccagcagagttacagggttatcagccaaactcagaccaataaggttttagacattcaataaatatagacgcataaaaaatagaatagaacgttttgtaaatcaagcggtttacattatctttgcatctatctatcaccctcaaacatagcgattatgaacaaaagcgacagcatcgtcatcattccgacgtacaacgagaaagagaatattgagaaaattattcgtgccgtctttgcactcgataaatgttttcatgtgttggttatagacgatggaagtccagatggcacagcttctatcgtgcatggcttgatgcagaacgagtttcaggatcgattgtttatcttggagcgttctggtaagttaggattaggaaccgcttacattacaggttttaagtgggcgttgcaacaaaattacgattatatttttgaaatggatgccgatttcagccacgaccccaatgacctgccacgtctctatgcagcttgtcacgacgaaggatacgatcttgcgataggttcacgctatgtcagtggcgtcaatgttgttaattggcccatcggaagagtgttgatgagttatttcgcatccaagtatgtacggtttgtgactggtttcaacgtccacgataccactgcgggtttcaagtgctataagcgacgtgtactcgaaactatccctttagatgaagtccgttttaagggttatggcttccaaatcgaaatgaaatacactgcctataagataggctttaaaatcaaagaagtaccagtgatctttgtcaatcgccgtgagggaaccagcaagatgagtggtggtatctttggcgaggcgttctttggcgtgatgcgcttacgcttagatgggtggttacgtaaatatccaccaatgcccaaagattaaggcttttgtctcataggtcatcatctgatgattaatatatttgaatgaaagaaatgaacccattgacgctgttgtgttaagtcaatgggtttgttgattaaaacagtctgttctggacaccaaaacagtctgttttaggctgcaaaatagtctgttttggcaggtaaaggcatgtagatagcaacattatcccaatgctttaggttccttcatagatattgccatgttttaagaggctttctcacgttatttcgttacctttgtatgctcaacgcatttgcgatgaatatacaagacattcaacaattatatggagcttcgccccaggcgggtgcactccgaaaagcattagaggacaaatctgtaaagaccgttttcttacagggactcgtggcttctgctgcgcccatgctatttgctggcatggcaggaaagttgcaacaaactatcctctttgtactacaagacgccgatgaggctggttatttttatcatgacttaatgcaggtgatgggcaatcagcaagtgttgtacttcccctcctcttatcggcgtgccattaagtacgggcaacgtgatgccgctaacgaaattctgcgtaccgaagtgctgtcgaaactaagttcaggagagccgccgtatatcgttgcttcgcccgaatcgctgtgcgagtgggtggtttcaaagcataaattagaggagcgaaccctacaagtggcagtggggcaaacggtggatatgcagacgttgaaaaagtcgttgcgtgccttcgaatttcatgaagttgattatgtttacgagccaggacagtttgccgtgcgtggaagtattgtcgatgtctattcttatagttgtgaatggccgtatcgtattgatttttttggcgacgaggtagataccattcgtacgtttgatgtgcaagatcagctttctaaagaacacaaagagcgagttcagatagtacccaaactgtcggaaatgaaagaggatagagttccgtttcttcagttattgccctccaccgccttgttggtaatgcaagattttacctacgttcacgacaccatagagcgcatatacaacgaaggatttgccaagcaagtgatgcaagaacagttggaaggtgctaccgagctggaacaacgagaattgatgcacgcttggcagaaggaacaacagctcattagtgggcgtcaatttctgcaagacatgacaggctttaagcgcattcagtttgggcaacaatctgatatgacgcctcaagtctctatttcttttgatattactccacaacccctatttcataaaaactttgatttgctgtaccaaacattggcagattatgcacatcgggggtatgctttgtatgtttttgcggaaagtggaaaacaggtagagcgacttcgcgaaatcatgaaggcacagcaagaaaataattcctctatccctattccacttgcaacggagtctactaatggggtaggagcttacttgcagttgcaggctccgagtgctcgaccagcaacggaggacgctgagaaagggacagtgaagggagcttctatccatgcagggtacattgatcatcaacttaaaatatgctgtttcactgatcaccaaatatttgaacgcttccataagtataacctcaagtcggataaggcacgagctggcaagatggcgctcacgcttaaagaactgcaggaaatggagccaggcgacttcatcgtgcatgttgattttggtattggtaagtttggaggtttggtgagagttcctacaggcaatacgtatcaagagatgattcgcatcatctatcagcgaggcgacattgtagatgtttcgatacatgcgctgtataaaatctctaagtaccgaaggagcgacactggcgaacctcctcgtttgtctacattgggaacaggtgcgtgggaacggctcaaagaaaaggcaaagaagcgcattaaggacattgcacgcgacctcatcaagctctacgccaagcgtcggcatgaaaaaggtttttcgtttagtgccgatacctttatgcaacaagaattggaagccagcttcttatatgaggacaccccggaccaggtgaaggcgacggcagaggtgaaaggcgacatggagaaagcgcgtcccatggaccgtttggtgtgtggcgacgtggggtttggcaagacggaggttgccattcgtgcggcgttcaaggcagcttgcgactccaagcaggtggcagtgctggtgccaaccacggtgcttgctttccaacattataagactttcaaggaacgtttgcagggcatgcccgtgaatgtggactatctttctcgtgctcgaagtgcgaaacagacccgtcaggtgttggaagatttggctgcagggcgcatcgacatcatcatcggaacgcataaactgttgggaaagtcggtgaagtggcacgacttaggtttgctcatcatcgatgaagaacagaagttcggagtggcaacaaaagaaaagttaaggaagctgaagactaacgttgacacgctcaccatgtcggcaacgcccattccccgcaccctgcaattctcgttgatgggtgcgcgcgacatgagtattatgcgcacgccgccgcccaatcgttatcccattcacacggagataggtacgtttggacacgaaatcattaccgatgccatcaactttgagatgagccgaaacggacaagtgtattttgtgaacgaccgtatctctacgctgcccgagattgagaagatgattaaaaaatatgtacccgattgccgcgtggcgattgggcatggtcagatgccgccagagaaattggaaaatgtcttgatagactttatgaatcatgattacgatgtgttgctctcaacttcgattattgagaatggaattgacatcagtaatgccaataccatcatcatcaacaatgctcatcgcatcggattgtcagaccttcatcaaatgaggggacgtgtggggcgaagcaatcgtaaagccttttgctacctgttggcaccccctaaatcggttctcacacctgaagcgcgccgacgtctcgaagctttggagacgttctctgaattgggtagcgggttcaatatcgccatgcaagacttggatattcgtggggcaggaaatctgttaggggcagaacagagcggtttcatggaggatttggggtacgaaacctatcaaaaaatcctttcacaagcggttaccgagttgcgtaatgacgagttcagcgacctttacgaagagtctattgcaagtggagaagtggtgtcgggcgccgatttcgtggacgactgtgccgtggagagcgatttggaaatgtatttccccgataattatgtgccgggaagcagcgagcgtatgttgctatatcgcgagttggataatattgaagatgataatgagctgacgacttatagacagagattggaagaccggtttggtcctgttccgcatgaaggtgtagagctgatgaatgttgtagcgttgcgacgagtgggcaaacgcttgggatgtgagaagctcatactgaaacaaggaaacatgaccttgcagttcgtcagcaatcccatgagtgcatattataagagtaaggcatttgatagcgtgctcaactacattgcccagcatgcccgtcgctgcgacttaaaggaggtgaagggcaaacggatgttgcatgtgagcaacgtttcgagtgttgaagagggcgtgaagatacttagagagatagagggtagtgcgtccatggaacgatgaatgcgccttacagttgttcagaaaagtatttccacaaaggagctatcatcagtgcctgtatgaaatcgccattcttgagcatctcgaagactttggttttaggcagtaactgaaactcgatgtcttcggtcttgtccaagtgttggctgctgattggttctacaccttttgccaaatagcagtggcaaaggttggtcatggtgctgggattgggagagatggtcatgagtttgctccatgttcctccaccaaagcctgtctcttcttgcagttctcgcttggcagcgtcgagcggttcttcgtctttttctatcacgccagcacaaatttcattcgacacaatgcccaatccgtgtcgccattggcgttcaataatcaagtttcccttgcagtcttctgctataacatttacccaatcgggatattccagcacatagtattcatcgtgaatcacgccgttgggtagttttacctcgtctcgacgagccgtcagccacggccgtttgatgatataatcagactttaatgtttcccatttttttattgacatgctcttttattttagatagttggaagctctactttgcagtgttgcgagtctctcggaaaccgttgtgtttcaagtgtacgatgtagcaaaggtacgacttttttttgatggcacaagtctaatcttcttatgtcagtctttttagcaggaggttagccgcttctatatcctttctttaggtctgtatggacaggcatttataaaaatagatgttgttttgggagctgaaatgtctgtaaactgcctttttttgcgtacatttgtcaacgcaacaaaaacactattgtaaagtgggggacaacgacatccctttcaatcttcgtaaaattggacataaacaactatcttgtgcggcttgcctctggtgacgtatctgcatttgaggcagtttttagacaatattatcctcgtgttcgtgcttttgcattaggacttacaaaagaggcaagcgatgctgatgacattgctcagcaggtatttgtgaagttgtggacgcatcgcagccaacttgttgctgttcgaaatttagatgcctatctgtttaagacggcacgcaatactttcttggattatattagaagtaggaagaagaaccttgtcattgagcgcattgacgatgggatgtgtcttccagattctgcgtctccttttgaagacttggagcgtgaggagttgaggttgcttgtagatatggtggtagagacaatgccaccaaagcggcaagctgtctaccggatgatcagagagcagggtctaagccttgaagaagtttccaaagccctgtctatcagcaaaaaaaccgcagcgaatcaccttaatttagcgttacggcagttaagtaaaatagtttatctcttcttattaattgttaacaacttgggtgaattttgacggaagttcgtcattgatataaagcagacaatatgaaatatagagacgccatcatcaagtacttctttcatcacaatgtttccagtcgcacgaagaagcgtgtcttccgctacttggcagatgaacggatattggaagaaaaagacgataccttgcaaaaaatatgggatgacacacgtcatgccaaactggacgacgatgagctggacatcgccttgatgcaggttgaaaacaacttgtcgctggtatctggcaacgcaaccaaagcggcaggcattatcatgcgtcctcgttggagaatttttgcagcctcatggctggttgccgtcatggctatgtctttctctgcctactggtatatacagatttccaaaaaagcagagcaggtggatcaggtggaatttcttgaggctatgaccgactatggacagaaaaaaaacattgttttgccagatggcagcaaggtatggctcaatgcaggatctacacttatttatccaacagcatttgtacaaaaaacgcgcaaggtatttttgtcgggcgagggcttctttgaagttgccaaaaggagcagcccctttgtggtaaccacacgttgcttgcagactaaagtgttgggtacatctttcaatgtaaaaagctatgttggtgaggatgcagtgactgtaaccttgaaaacgggaaaggttgtcgttgctgtgcacgacaggtttcatgacggaacacactttctcgtgccaaacgagcagttggtgtatgttccatccacaggaaaagtggttgtgcagcaagtaggtgatgagatgagcgacgcatggcgaaagagcaagttgcagcttacagatgtctctttgaaagaagccctgcgacaaattgaaaggatgtacaatgtgaaatgccatttactgaacggtcgatatgctcagcagcgcatccgtgcacatttcaatcagaacgagaagttggagaacgttctctatgtcatcaaacgcctcattccaggtattgcctatcgggtagaaggtaatgatatttactttgagtagcattaaagaggcttcacatcgtgtattttttaattgttatgattatttaacactattactttgggtgttgtcgccagctttcacgtcttacccatgaaattaaacctataactataaaccatgtatgaataaaagagtaatttgttgcttgagattggcattgtgtatgcttatggtcggaacaatctccatccatgcgcaacgtgtgtcgttcaatggagagcgtatgtctctgaagaaggctttcgagcggatagagcagctctcgaagtataaaatcgaatacaatgtgtcgcagttcaatgccgatcgccttgtcaccttaacacagaaagacacggatgtactgcaagttctgactgatttgcttgccggcacagggtacacctattctgtgaatggaagttatattctgatacaacccgtacggaaaactcaaaagaacttgcgaacgattcagggtatggttgtagatacctctggtgaagcaatcgtaggagccgttgttaagcaggcaggagctaaaaaaggtgtggtaaccgatattgatgggaagtttgtcattgatgttccagagggtgccatgctgacgatttcctatgtaggaatgaaggaaacagcagtgaaagcgaccgctgggatgaacgttattttggagagtaatatcgaagcacttgacgaagtcgttgtcgtaggctatggtactcaaaagaaggcaaatctcacagggtctgtggcacaggtgaaaatggaagacgtcttgggcgaccgacctgtggtaagtgctgcttcggcattgcagggagccatgcctggactcaccattggtggtggttctggaccgggtgtggcaaagtctcttaacatcagaggtacgctgtccatcaacggcggtgccccattggtgcttatcgacaatgttgaaggcgacctgagcacactgaaccctgacgacattgaaagcgtcactgtgctgaaggatgcagccagttcggcaatctatggagcgcgtgcagcaggtggcgtcatacttgtttcgttgaaacatcccaagtccaacgaacacttttcagccaactataatttcaatgtggggtgggaacaaaccgcaaacttcttgaagcagtcatcactcagggaatatcttaatgcctacatggaagcgggctattccaattcgtattgggctggcaatggtgaagtatccaagtggcgtgactatcttgacaaatataatcaaaatccttcttctgtttcaacggtaggagatggcatcttccaggatacagatggaaaggtgtattggctaagtgagaatgacttggcaaagaatatgatgacaacaggtgccattcaaaaccacaacttgacggtttctggtggtacagatcgtatcaggtacaggctttctggtagttttagcaaggaagatggacccttgattaccaataaggacatgtttgaacgcaagacaatcaacggatttatagcggctgatgttctgaagtggtacacgcaagaggccaacatctcgtacacaaattctgatctctcaaaaccagaggttgtcggaaatatgtatccctactacacaacaaggctgataaactattatccagaaggtgacataccaggcaagatattgggaactaatgagagtttgccctcgcaaacaccttccaacatgatacggttggctcctgtctctcatgaagagaaatccgtgcctcgcatctcgctccgctccattttcaagttgttgcctggttggatcatcacaggtgaatacacctacaaccgaacagacactcactatcagttttattcggacaggtttcgctttgccgatgttcagttggccgcaaagaattcaacggagaaaggacaggacttttacagaatgtacgacaccacagcgaaatacaatgctctgaacgttttctccaattacgaacatacatggggaaaccacgccttcaaggcgatgcttggtttcaaccaggaggagtattattatcggtacttctatggaaacgtattggcgcaagccactccaagcgtgccatcatttgaaggtggaacgggtgaaaagaaaatcatagataaatattctgaatatgccatcaggagtggttttgcgcgctttaactatgtgtatgccgataagtatttatttgaattaaacggcaggtacgatggttcgtccaagttcccgaaagataatcggtttggatttttcccgtctgtaagtgccggttggagattggggcaggaaaagttcatgagtgcgtccaagtcgtggctggatgatctcaagttgcgtgtgtcttatggaacagtgggaaaccagcgtatcgacccctatcagttcacgcctacaatgtctgtaaacagtgcaggtacttacattttggatgcaggagggaagactacttacattacctcaccgggacttgtaagcagtagttttacatgggaaaaagtaacaacctttaatgttgggtgcgatttttatgctttcaacaaccagctaaatgctacttttgactggtataaccgtaagaccacaggaatgttagcagcgggtatagagattcccaaggtggtgggaacgacagctcccttgcaaaacgtagccgacatgaagaaccaaggatgggagctaagtgtagcttggcgcagcaatgtaggcaacctaaactacaggataggactgaacgtctatgacagttgggcagagattaccaagttcaacaacgagtcgcggctgttgtcagattactatgtagggcagcgtataggagaaatctggggatatgaggctgatggctattatgccattggcgactttgatcaagatgcggcaagaaagggaacctgggtgctgaacaagggagtgaccaggattaatggttacaacccgcagccaggcgacatgaagttcaaggatctggacggtgatggtgttattaccgctggggaaggcaccgtggagaaagcaggcgacaggagagttataggcaacaacgcctcgcgttatcagtttggtatgaacataggtgccagctacaagggcctcagtctcgacgtattgttgcaaggcgttggcaagcgtgattattggctgggtgggtcggctctgtttccttttgctggtgttgatgctggtgatgcggtattccaaccgctttactataaccagacagactattggacagccaagagctacgatcccagcagcccagactacatggtggctgccaatcctggctgcgagttattccgtatttacgaccaaggcaacaacatccgttcaaacacaaggataagtgataggtatctccagaacgctgcatacctgcgcgtcaagaacgtcactctctcttaccttcttccaaaagaatggatacacaagctgtttattcgcagtgccaaggtattccttagcatggaaaacttggccactttcacatctttgccaaaagggtatgacccagagggaacggccgctggctcacatgcaaatgctttaagcaacggaatttcctggacgtatccttattatcgtaccatctcagttggtgcaagcattactttctaactcaacaagcaaataacatgaaaaagattatattaaccttattggtcatggtggcgctgtcttcttgcaatgatgccttcttggacaagtatcctgtcacggacatgatagaagacaatgcctttttggaaaacgacaacttcaaggcttttatcaacccatgctatgagatgtttaccaatacgactatccgtaccagtataaatcgctgttatgtcaacgcacaattttatggggatatgtacggaggcttggtaacccatcgggacaaccagcgaaatccttatgcctaccaaacggtgatgcctactaccgacgggggaggatgggacttctcatacatccgtcgcatcaacatcttgttgagccatcttggtgacggacatcttacgacggcacaagcagcacattggcggtcggtggcttatttcttttcggcctattggtatatggagctggtagatcgttttggcgacgtaccttgggtaaacaaggtgctgagtgagaacgatgaggcagcgtatgggccacgtacgcctcgagccgtggtggcagatagcatcattgcccgtctggaatacgccgcagacaacatcgggacgcagcacgacggcgacaacaccattacggcacatgcaataaaggcggcattgtctcgcttcttgttaagagaggcaacgtgggctaaatatcacggactggacgaaccttatgaggcttatctccacaaatgtatcaaggtatccaaggaactaatggatgcctatcctacgctgtacaaaggatgcggcagtgagaaagaagatgccgcaggctacggtgagctctggaccacagagaacttgaagggtgtggacggcgttatactggccaaggagtttgtagacaacatgctgatgcaccgctataatgattacgaacacatagccgccaatgccgccgacgtgccgcaatatacagtagatatgtttctgatgaagaacggctaccccattgcaaaccccaagtcgggctatcaaggtggaaaaggcaaggatatgtgggacacttttgctggtcgcgacccccgattgtaccaaaacatacagcctccttatgtagtggcgccaaacaatggagcagcggataatgttcactcatttaggagttggcgattcttgaaggctggcgacaacaatcaaggtcatgtagtgacagccgccgaggcagtcaaatatcgtttctacatcgactacatgggcgtcaacgaccagtgtgtaagaggcggcatgtatggtggaaagggcatgaagagatgccctggacaaaactggggagctgctcttacaccagtaagtcctaacttcaccaccgattcgcgagtcccctttatgaggtgccgcacgggatattatttttggaagaattacgatatgtgggaattctctactggttcatctgctttttgcactgccgacaagcctatcttcaagatagaagaggtattgctcaattatgccgaagccgcatgggaacttggaatattcaaccagtctgttgccgatgcgaccatcaacaagctgcgtttacgttcaggagttgcactcatgaaagtagctgaaatagatgccgactttgaccctgatagagacaagggcaatgctccatggtggacaggcaaaggtggcaagtttggcaattacaacgtagaccctgtgttgtgggagatcaggcgagagcgtcaaacagaactctttggcgaggggttcgcattttatgacgttcgccgttgggcaaaggctgcctattatgtcaaccgccagccctgcggactttggaccacagcgcaagacaatatctatgcacccagaaagaatagttattctggacagtttgtcgattacgagaagatacagtcatctggcaaagccagtgcagaaaacaacacggtgggaagtggttggatttatacctatgaaagtccgttggtggcaggcggttggctggatgcgtattacctcatgatggtacccacaagccaaattgtgctgaatcctaaactgacacagaatcctggttacaaccagctgtttggattgacaaaataaataaacatgaagcactttgatattcgagaaaacatcatggttacaggtgtaatggcatttgcagttacacctgtaatggcaaaaggacaccctaaggccgcaaagctaaccaaacctaacattatttatattatgtgcgacgatatgggttatggcgatttggggtgttatgggcagccatacatcagcacacccaacatcgaccgcatggccagcgaaggcatgcgctttacgcaggcctatgccggtgcgcctgtaagtgcaccctcaagagcaagcatgatgactgggcaacacactgggcatactgccgtcaggggcaacaaagagtattggcgtgacgtgccattggtaacctatggcataaacaaagactattctgttgttggtcagcatccctatgaccccagccatgtgattctgccagagataatgaaagacaatggttatcgaacagggatgtttggcaagtgggcaggagggtatgaaggctcggtgtcaacgcccgacaagcgaggcatcgatgagttttatggctacatctgccagtttcaggctcatctgtattatccaaacttcctgaacgagtacagcaggcagcggggtgatacggctgtgagaagggtggtgctggatgcaaacatacgctatcctatgtttggcaagcagtatgctctgcgtacacaatactctgcagacatgatacatcagcgtgccttgcagtggctcgacaggcaagacgggaaacatcctttctttggtatctttacttataccctgcctcacgctgagctggtgcagcccgatgattcgctggtagcattctacgagcgtaagtttttcgaggacaagacatggggaggaaacgagggtagcaggtacaatgctgtgacacacacgcatgcccagtttgctgccatgattacccggttggacatgtatgtgggacagatattcaagaaactaagggagaaaggtttggacgaaaatacgcttgtggtgtttaccagtgataacggtccccatgaggagggtggtgccgaccccgatttctttgggcgagacggcaagctgcgaggcttgaagcgacaatgctacgaggggggcatccgtattcctttcatcacatggtggaaaggacatatcaaggcgggtacaagcaccgatttgcaggtggctttttacgacctgatgcctactttctgcgagctggcgggtgtaaaggattatgagaaaaaatacaggaacagaaaagtaaagactgattacttcgacggtatatcgtttgccccaacgctgcttgggcgagtgcagaccactaaacacgaatatttgtattgggagtttcacgagaccaaccagataggcgtgcgtatgggagattggaagatggtggtgataaagggcacgccacacttatataaccttgcttccgacctgcacgaagaccacgatgtggctgctttgcatccagacattgtaaggcaaatggtgaagatcgtactgaaagagcatgtggaaagcaagctgtttcaggtaaccttacctgagtaagaaaagactgaaactggctttgtgattttagggtatgacgcaaattaagactcagccagtggcggcgtgtgttatgtagggtgcggcgttgctgaatgtcgtgcccgctgtggcggtggtctgtagtctgcatgtgctgttagtgctgctgtcaactgataggcctgcgacgggaattgaccagcaagtgaacgcaacctaccgcaacgaacttttattcaaagggaggtttgacaagatggtttatcctcgtgttcttctatttcttagtagaaatgaggtgctgtggttgatggttatgttacgcatttgtcagatttagtcctgcgacatagcccattgtccatgccgcttgtaggttaaatccccctgtgatgccgtcgacatcgaccacttcgccagcaaaaaacaaatttggacatgccttgctctctaacgtagtaaggttgatgctcttcaaactgacaccgccacaggtaacaaactcttctttccaagtaccttttcctgctacggtgtatgtgtcgttggtgagagtttcggtcaacttatggatacttttgcttcccaactcattccacttttgctgaacggagaatcctgctcgctcaatcaaatagttccacaagcgtgcggacaacatgtaagggcggacggagtgcagttgcttttgtgcgtttgccatggcagtttgtcgcagtgtgtctgttacaatttgagtattggtggtgtgaatccagttgactgaaacatcaaactgatagttgcgatcgttgagtgttcgggcggcataagccgacaatttgagcgttgacggtccgctcaatccccaatgcgtgataagcagtgtgccttcacttcgtagttttgtgccgggaatggatagatagacagggtctacgcaggttcccattagttctgtaaggcgttgctctttaatgctgaatgtaaacaatgaagcacatggcggttctattttgtgtcctatgtccgacagatattgcagttgttccgcatgcggcgagcctcctgccgtgatagctgcacggttaaaaaccaatggctcttgccgtgcgaaatacaacttgatgtctccattttccagtggagtaatcttctttacacaatgctctgtatagatatccacaccccattgatgcgccaatcccaccaagcaatcaatgacagattgtgatgtttgtgattgtggaaacacgcattggtcagcctgtgtggtgagtttaaccccattatcctcaaaccattggtacgcatcttgataaccaaagaccttaaacaagcgtttcatgagcttgtcgccgcgtggatatgcctgcttcaagtcggttacttgtgcgaacgagtttgtgatgttgcagcgcccaccacctgtcacagccactttcgccaacacctttttccctttttcaaagatgcagactcgggcattcggcatttgtcttttggcggtgatggcagccatgaaaccagctgcaccaccaccaataacggcaatactgagcatgtttattcgcgcttataggtcgtcttcaatggctgtactcttagcgtatgccgtacttttcgcctcaaagaagtcggtctttaccatgttcgggtctgaatattgcgctacccatttcatatcttcgggttctttttgattgtcctcatacagataatcaaagcccaagctgtgccaacgcaggtttcctagataatgaatgtagtctgtcaccatttgcgcattgagtccttgaatgtcgtttccaatcacatattgtccccatgcaatttcctgacgaacgccctctcgcatcatctcttcgtacactttcaccttttcgggcgtaaacatttcgggctcttcttttttcaattctttgataatgtttctgaacaaccacaggtgagtgttctcatcacggttgatgtagcgtatctcttgtgccgatccagacatctttccgttgcgactgagattgtagaaaaacataaaaccactgtaaaagtagatgccttccaagatgaaattggcaatacaggtcttcatcagtgcatacaaatcttgcttttcatgaaactcattatagcaatttcctatgaaggtgttgcgccttaacagatgctcatctgtcttccattgatacagaatgtcattgcgttgctcggggctgcatatcgtgtcgagcatgtaactgtaactctgactgtgcacacactcttgaaaagcctgtatgtgtaggcataggtttacctcgttggctgtgatgtattcgcacagcgaaggcaggttgttgctttgcagggagtcgagaaaaaccaagaaactcaatatcttgtcgtaggcagtgcgctcggctttgtccagtcgtggatagtcttttgtgtcttgggtgaggttgatttcttcaggaatccaaaagttgttcatcgcctgcctgtaccaatcgcttgcccattggtatttcatgttgttgaaatcattgaggttggtggtgtttcccccaatcatccttctcaatcgtaggtctgtatctccgtttggattgaatagcgaattgcgctttaattgtgtcatgtttttaagtttatgagtttttaagtttatgagtttacgagttgatagtttatgagtttataagttttggcttactttttacctcatcaacttattatcacatcaatctttatcggtcttatgaggcgcagctttcacactcttctacctctaacgatttgcttcggatatagtagatagttttcacaccacagtgccatgccaaggtgtacagtcccaacagttgccgcatggtataattattggtgatgtataggttgacactttgtgcttggtcaatatgtttctgtcttattcctgcggatctcatgctccacgattggtctatcaggtatgcgcttttgtatacccaataggttttatctgataggcttggagctactcgaggcaacatggcacctttcttctcttctaagaagaaccgtttcatcacggggtctacgcctgctgtggtggctgcgatgatgcttgtgctgctggttggtgcgatggctaagagataggcgttgcgcatgccctgttggcttactttcttggcaagtgctttccattggggcgatgtatattgtcgcttggtgaagtattcgcctgtttgccagtcgctaccctcaaagtatttgtagcttcccttttgctttgcaatgtccgaactggcttcaatagccagacgattgatgcgctcaaacactttgtctatgaacgacagatgctcttcgctttcccatttgatgccccttatggccaacgcatgatgataaccactcacgcccaagccgatgcttcgataggtgcggttggtgatttttgcgaagggaagagggtaaaagttcaggtctatcacgttatccaaggctcttaccacacttgataccacctctttcatctctgtttcgtcttccagtttcaggtgtcccaacgacaaactggcaaggttgcacaccacgaagtcgcccggtttcacggttcttaccactacggtgtcgccctcttcggtgcgtatctcgtttgatacttcctctatctgcgacatgttttgtgctatctccgtgcagaggttagagcagtaaatgatgcctttgtggtggttggggttggccctgttcaccgtgtctctgttaaaggtgaagggagtacccgtctccacagccgatttgaggataagtctgacaatctcttttatagacataactcttcgtgaaatgttgctgtcatgcacgcaatcccaatagcgtttctcccattcctcaccataatagtcttccaagttataccccttagccgtcatcacctcattgggacagaacatataccagtcttggttgaggttttcttctgccattttccaaaacaagtcggggtaacaaacagcgggaaagatgtcgtgtgccttcatcctgtcatcgccattgttggtgcgaagttgtaggaattcgggtaaatccttatgccatacgtccagataaacagccaccgcaccctgtctaacgcctaactgatcgacggcaacggccgtgtcgtttactaatttcatccaacgaataacgccacctgcggcacctttgaagcctcttatcctgccgcctgcagcgcgcaccttaccaaagtagaggcccatgccaccgccaaacttgctcacttgcgcaaagttgtctatgcttcgatagatgccttccaaactgtcgggaacggtatcaatgaagcaacttgacagttggtgaaacggtttgcgcgcattagaaagggtgggggttgccatggttacttgtagcttgctcagcatattgtaaaagcgttgcacccacatcatgcggtcttgtggttcgttcatcgccagatgcaaggctattcccaagaacatttcttgcacactttcaatgggattgttatcaaaattacgaatcacatagcgcttgatgagcagttccagtcccgagtagttgagcaagtggttgcgactggcatcgataaaagtagccgcttgttctatttcggctttgctgtattgttgcaagatatatgcgccataaagatttctgtctgtcaagaacttcatcttgtcatacaatgacatcagtccctcactatcttcaaagcgtgcgatgcgtttgttgagttggtaattgagcagtcgggctgcaatgaattcccattcaggagcctcttgtgtggtaagctccaccgctgccttgataagtgcgtccatgcgttcggtggctgtcatgcccgccttgctgaagctggcatacttgtcaatgagcagcaatatactatattctttgtctgtaaaatctgcggcaatgtgtttcaatacctctgtgatatgctcgtcttgcaaatcctcagcgatgcgcctataagtgcgacgtatctcggttcgctgccatctgaacaggataaaactctttgcttcggcgtaataaccgtttttcatcagcgccttttccacctcatcctgaatgctctccacattttgcttgatgtgattggtacaaacaatatcttctaccgattgtaccatttggtagatggtggcatcgtctatctcgtgtttcgtactgataaagctcttcttgatggccgtagcaatcttctctttgtcatattgctcggttgagccgttacgtttagtaatatccattgatttttataataagaagtatgagttgttatgttgtttctgcaaagttaatgaaatgcgttggaagaaaaaattatatcttgtactttttacagacaaaagaataagttgggtaacgagaagtggtttactgattggtgcttacccttaaaagtaaagtatagttaataattctttaatatgttaatcgaattcgttttattttacaaaaataattctcaaaatagaaaaagaagttgcccatttaggtgcaaaaactaagctttgttcgcttgtctctatcacttactcgtgttatgtcaatgggatagggcggttactccattgagtttgtcccactatctccatgcttttgcgtgcttatttgcactaaataagggcagttttggcatgaaagaggcgttttttatatgcaattttatgaggtatgattgcaatgttgtttctaatgtgttggtggtcaaaaagataagtaaacttgtgcgtatttctcgtattttagcagaagaagttgtgtcaatgctaaaatgcgctgtatttttgttaaaaacctaatttaatattttgccaattctatcattttttgtaattttggaataaataagaaacgattgcaaccatggatatagaaaaaattaaagacatgatagcgtgttgtgatggactgtctaacacactcggtatggaattcttgtccactcacgagccagatacttgtatggctcgaatggaagtaaaccataaaaataaacagatatttggtttcttaagtggtggcgccaccttggctttggcggaaaatttagcaggagtaggcagtatggctatatgccccgaccaaatttgtgtaggcatcaacgtcagcggcaaccatgtgcgaacggtgatggaaggcgaaacggtaacggcatttggccgactgcaacatcaaggaacaacgctacaccaatggcatatcgagataaaaaacgagcaagaagaactcatttcaactgtgcaagttatcaattatgtgatgaacaagtctcagaatgaatagttttgcgtattatagactgcccgataaaaggcattttataaaactaacccaaaagaatggagagcctgagacttacttttcattaagagatttgaatggaaaagagggctttgtgcttgttcctttcaaaattgacgaggcgcatcctgtcgtgttgattcatcctgaaaagaaagaaagggtgcgtatcagcaaatgttctgcaaagctgcacaatgaatacggtgcgacaatattggctacgtcttccgatggtagggagagatacggtgaggttttccgttgttttcatcaacagctcaaagaaggaaagttagcgaaaatcgtgctggctcgttgtgaagaaataccgcactcggcatccatagaagcggaagctatgttcttggaggcgtgccgaacatatcctcatctctgcattatgttggtgtcaacgccccagactggcacatggctcatggctacaccagaggtgttgctggacggtgacggagggatatggcgcaccatggctttggctggcacgatgaaagcaggagaattggcgcccgatgctgatagctcttctgctagtacgccatgggtagatggctacgacatgcgtgattggtcggctaagaacaagcacgagcagcagttggttgctacttatatccaacaatgtctgtcgcctttcgccgctcaacttactcagcgaggtccttataccgttcaggctggtgacttggtgcatctgcgcagtgattttatgttcagccttcacgatacccagtccttgggatctctactcgaggcgttgcatcctacacctgctgtgtgtggactgccaaaggctgaggcgcagcggtttattctacaacacgagcatgccgaccgcagttattatagtggatttgcaggcttactcaatccaaatggcgaaactcatctttatgtttcacttcgctgtatgcaaattttagagaatagttatcgtctctatgctggcggaggactgctccttgacagcgtagagcaacaggagtgggaagagactgtggcgaaaatggaaacgatgaggaaaataacagcctctcccccgacccctccccaaagggaaggggagttgtaagctgataactttgaacattgaatattgagctttgaactttatgattagcaaagcaatcaacttaaaaacttaaaaactcacgaacttataaacttacaaactcgtcaactaaacatttcctccatgccctattcagataaagagaacgtcaacatactcaccgcattattagtggcacacggtgtaaaacacgctgtggtgtgtcctggttcgcgcaatgcacccattgtacataatctcaacgaatgccccaacatcacatgccacccagtgacagacgagcgatcggcaggtttttatgccttgggtatggctcaaatcttaaggcaccctgttgccgtttgtgttacctcgggtacggcgttgctcaatcttttgccagctacggcagaggcttattatcaacatgtgcctttggtagtgatttcggctgaccgaccttcgatgtggattgaccaacaagacggccaaaccctgccacagttaaatgctttagggcgttttgttagtaaggcagtctcgttacccgagccttctactgatgatgaacggtggtactgtaatcgattggtaaacgaagcattgctttgttgtcagcggcatggtggcagtccggtacacttgaatgtacccatttcagaacccttgtttactttcaatgtaccagcgttgccaaccgaacgtgtgattaaacaggttgcagcaacgaccgatgtggctcactgtcaaccgcttttggcggatgtccaatcagcccaacgcccgatgatagtcgtgggacagttaagtaacaaagaggctcagcgcatggctctgctattatgcgagttgtcaacgaatgtggtagttgtgtacgaatgtctcggaatggcttgtcatgaggatgcgcctcgctatccctatccaccaaacgaaaggctttcttctctacatatagataagatgttggcgcacatgcagcaggtagaacaatatcagcctgatgtagtggtgtaccttgggggaacgttggtgagcaagcgtttgaaagcgtttttgcgccaatctccagctgccaagacttggattgtcaatgagcgaggagcaatatacgatactttccaaaacctgacaggcgtgattgaaggtgcaccgtatgatgtcttggaggtaatcttgcggtatgtccgtggggaaaaagaaaagcaaagaccgccttttgagtctggttttcgttcaagatggacaacgctgattcaacaagtgcaggcgcagacagagcgttttcatcccccttactcttcatggcaggctgtgaaaagattttttgagaccgtaagtcatgaggacagatacatcctccatgccgccaacagcatgtccgttaggttggttaactattttgccagcgattatgttttttgcaaccggggtgtcaatggcattgacggaagcttgtcaacggcagcaggttgctcgctggtgacaactcaaaacgtgtattgcgtcatcggtgatttaagcttcttttacgaccaaaacgccttgtggcataacttagggggcaatttcagagtgctgttgctgaacaatgggggcggggttatcttccaaagtttgccgggtttgaaagatagtacggctcagcagacattgatttcagcccaacatcataccacggcttgggggatttgccagcaaaacaacgtggcttacctttcggtgcatgatgaagaagaacttgaaaataacatgaatcactttgtgaacgacaactttgaccgccccgtagtctttgaggtgtttacctcgcaacagcaagatgaacaggcaatgaacgaatacaaacaagtttaatttgatatggaaaaaagacaatggaagtccattgacggcttcaactttaaggaaatcctcttcgaggagtataacagaattgcgaagataacgatcaaccgtgagcgttatcgcaacgcttttacgccactcaccacatgggaaatgtcgcaagccttcgcttattgccgagagtgtgcgggcattcgtgtggttattctcacgggagcgggagacaaagcattttgctctgggggcgacatgcatgtgaagggacgaggcggatatgtaggaacagacggcgtgccacgcctcaacgtgctggacgtgcagatgcaaattcggcgtttacccaaacctgtgattgccatggtgaatggttatgccatcggaggtgggcatgtgttgcatgtcatgtgtgacttgacaatcgccagcgagaatgccattttcggacaaacgggaccaaaggtagggtcttttgatgcaggtttcggcgcttcgtacttggctcgaatggtgggacaaaagcgtgccagggagatttggttcatgtgcaagcagtactcggcacacgaggcagagcgtatgggtatggtgaacaaggtggtgccattcgatgaattggaagacgaatgcgtgtcatgggcggagataatgatgcagcgttcgcctttggcgttacgcatgatcaaggctggactgaatgccgagttggacggacaagccggtattcaggagttggcaggcgatgctaccatgctgtattacaccatggacgaggcgcaagagggtggaaaagcgttcttggagaaacgtaagcccgactttgataagtatccgcagttcccctgagagcaattaaccaattacctaattggcccaataagccttattaggctaataaggcttattagcccaataggcctaataaggccaataagcccaataaaaaaataaccactaaaaacattacagctatgcgtaccaaccagtttttgccgcaaaaaggtaattatcaaaacctcattgtttatcaaaaaacggagtgcatctatgacattaccttttatttcgctcaccactttttggcaaagaacgacagaacggttgaccaaatggtgcaagcagctcgctcggggaaacaaaatatagctgaggggtgtgcggcttcaacaacttcttctgaaacagaaatcaagcttttgaatgtggcgaaggcaagtttgcaggagttgttgatagactatcaggactatttgcgggtgagagatcttgctatatgggatgtaaacgatgctaaaacgatacagaccagacgtgtttgcgcacggcataacgactcggcgtattatcgaaacgccatcaaggaaagaagtgatgaaaccattgcgaacattgccattacactcattcatcaagctgatatattccttagaaaatacattaatcgggtgaaagatgattttctgaagcagggaggaatcagagagcaaatgtcgaaagcaagaattgattatagaaaaagtcattaaaaagatgaatatgagcttatgttatgctgtcagtcaacgcacactgcacttcaaaaatcctgccactacctcacggggagtgtaccaaacacgcacgagttactatgtaaccctatggcgtgaagacagtccttccgtcaaaggggtgggcgagtgtgccaccttgcctgatttaagttgtgacgtttgtcctaattatgagcaaattttaaccgaagcgtgccatgaggtggcgcacgaagggagtgtcaactacgaacgtttgcgaccttatccgtcaatactctttgggctggagacagcattagcgcaaataaaggcaaacggaagtgctgctttgtttgacacccctttcgcacgaggagaggagggaatcactatcaacggcttggtgtggatgggtacatttgaggaaatgctgcatcggatgcaggaaaaattggagcagggttttcggtgcgtgaagttgaaaataggggctatcgactttgagaaagaattggaattggtgcgctcgattcgttcgcatttcacctcaaagcaagttcagttgcgccttgatgccaatggaggtttcgcacccgatgaggctcttgcaaagttggaacggttggctaagtatgacattcattcgatagagcaacccatcaagcagcatcagtggcagcaaatggcgctcttgtgccgtgagtcgcccattccaatcgcactcgacgaggaactcattggtgtgaaccagcgacaggaaaaagaagagttgctcaacgccatacgcccacaatacatcattttgaagccttcgttgcatggcggcatgtatggaactgaagaatggataacgttagcaagacaacgaaacataggctcatggctcaccagtgcgttggagagtaatgtgggattgaacgccattgcacaacttgccgcaaaggtttatggaccgcatgtcaccttcccacagggcttgggaacaggacttctgtttacggacaacgtacctatgccgttggaagtgagaggagatcagttgtggttcataccgacaaagacattaaatggatgaaaaaatgacttatcaagaatttatcagcgaatggaatgatgatgcacagactatccatgtgcaaaccagtgggtcgacaggtgcgccgaaaaagatgaatgtaaggaaggacagaatgattgaaagtgccaagatgacgtgtgacttccttgcattacagcctggtgacaccgcattgttgtgcatgaatctcgactatattggcgccaagatgatggtggttcgctcacttgtcagacaactccgtttgatacaggtagtcccctccggtcatccgttggcaacggttgatgttccaattacctttgccgccatggttcctctgcaagtatataactcgctgcaagtacccgaagaacgggaaaaattgcgccaaatcaaacatcttatcattggtggaggggccattgacgatgtcttggcagcccaactgcacgacttccctcatgcggtatggagtacttacggcatgacagaaaccctttcacacattgccttacgcagactgaacggtctccaatcttccagttggtacacgcccttgcaaggaataaaggtaacaacgaatgccgatgactgcttagttattgatgctccgaagctttgtgatacgccgattgtgacgaatgatattgcagaaatccgattgacaagcacttctgagggtcaaaatgtccttgcttttcgcatcattggtcgacaagataatgtgataaatacgggtggtgtgaaggttcatgcagaggagttggagaatctgatgcgtaatttcttgacctttccttatatgataaccaagcgaaagcatgctaaatttggcgaaattgttgtactctttgttcaaatggaactgtcttattctcgacaacaagcagcttcccaaagtcctcaggctttgttgcgagtcctccataaaatatgtcatcgaacccttcctccttactgggaaccacgtttatacattgctgtagacaagatacctatgactgccaatggcaaacccaatagagccgaagcgcttcttatggcggagacgtttaactttcctgcaacccatgtctatgatttagataaggttgaagcgtaaccctcgtagtaaggagctggtcaatcgttcatgggtacaactaatatcacataatctttctttaacattttgtacttcgtatagttctttatacttttgcatactgttgctgtctgattcaattcctaatggttatctttgtccttatcagttgaagcttgtgtgatatgagtgcgaagttagaacagatatacagggaaataatattttttatatggtgtcaaaaatcctttttggtaagaaaataagctggttactcacaatttttgtgttatgggtggtcgttttcgtattacaaaagcctttctttctgctatttacaggtgaagggttatcaagtttatttgcagttctttggcacggtttgccgttagatttatctttggcgggctatataacagcagttcctggacttctcatattgcttagttctttgcctttctataaagatcatacatcgttcgtcaaacgagttgtttcaagcatctatcgatgttggatggcattagcagcagtcttagtttcgctgtcgtttgtggctaatattgctttgtatccttattggcaattcccactggatgcgacacccctgttttatattgtttcttctcccaaagatgcaatcgccagtgttagctattggcaattgctactcggattgacagcagtcatagggatttcttttcttatatactccctgttcaaaaccataggtcgttgtttctccacgacgctatgtcagcctgtctctactttgcattggctgcttcttctcgttttcgtagcagccttgtttctacctatacgaggaggatggtcggcgtctacgatgaacacaggcaaagcttatttctcgaatcatcagcgactcaaccatgccgctgttaatccgttattctcctttatggaaagtgtgacacatcaacaaggtttttcttcgatgtatcgcttgatggatgagcagaaagcacatcgattggtatcgacgatgttgtcttctaaaagcgaggctgactcaacagtttcctcttctttcctaaccatacaacgccccgatatctatttgatagtgatggaaagcttctccgataccttgatgagtgctgccagcgctactcccggactcaatcgtttgaaaaatgaaggcgtatatttctccaacttttacgctaacagttttcgtacagatcgcggtttgttgtctatcttgtacggctatccagctccagcaactgtaagcttaatgaagtatcccaagaagactgccgcccttacatccatgccacaactcttgaaaaaagctggttgggatttgcaatattattatggtggcgatgccgactttaccaatatgcgctcgtttcttatcaatcaaggctttttgcagattgttgaggatgttgatttccctgtgagtcaacgtacaagcaaatggggagtaccagaccatttgttgtttcaaagggtgaaaagagaccttcggcaaacaaagacctccacacctattttgcgcgttattcaaacctccagctcgcatgagccttttgatgtgccattttatagacttaatgacaaggtgctgaatgcctttgcttatacagatagttgtgtgactgatttcctaaagtgtttaagatcatctccacaatggaaccgttctttggtaattctgctgcccgatcacttgggtgcttggccattagacattgataatttttcttttacacgctaccatattcctatgatatggactggtggggcagtgcgccagccgcagaaagtcgacacatttgcatcacaacaagacttggcagccactctgttaggcaccttgggcataactcatgaggcgttaccatttagtaaagatatgtttaatccagcagcacctcattttgctttctttatgataaacgatgggtttggactcatggatgcgcatcatggggtgacctatgattttaagcgacaacaaatcgttcatgcttttggagacaaacagcaacaatatgtgcaggcaggcaaagcctatacgcaaacaatttttaacgatatagctacaagataatgacagacaacttacttttactcattcatacgttggtacactgggataccttggcaaccatttggctgaatggaggacatacagactattgggataacttcatggaaatttgcaccgggcggttcgtatggattccgttttacgcttctttggtgtacctgatgtataaaaagtttggttggaaagacgcttcggtattcttcatacttactattttgctgttggttttgaacgaccaaaccagttcttctgttattcgacaagctgtttgcagacttcgtcctgccaacttagacaatcctatctcatcagtgatacagatagtagacggatatcgaggtggataatatggctttccgtcggcacatgctgccaactcatggggattggtgtttttgatgatttacctttttaggctaagaactttgagcgttttattggtagtatgggctttgttgttatgctattctcgtttatatatgggtgtacactatgttggcgacttgttggcaggcgcttcgttaggactcctcaatgccacacttgtttgttttaccgtgtggtggtatgtacgcaattttgctcaaaggcatagggcgacatccgtgtctcaatacaccaagtacatacctatcgcagtatgcgtgttctctgtcgtcgtcatgctgattttagcctcgttttatgaccccagtattgggctttaatccctcttgtaagaatagcatttgatgtgcttagcttccctctcttagaaaatccaaagcttctttgatctcttcaaccgtggctgtctggtctgtcttcacctttcctatattctcaagcaaagtaaagttaatggtgtctcctacatttttcttgtcatgcttcatcagctggataagcgcatcatagtcatgacaggagaaaggaagtgttccgtagttctcgtgaataaacaggttcagctggtgcatcttgttggtaggaaagccgcatttaagggcactcaaatacaattcgcaagtcagtccgtaggcaaccgcatagccatgtagaatgggagtatgtttcaaagaccaagactcgaaagcatgtccaaaggtatgacctaagttgagtgctttgcgtagacctttctcatgagggtcttgtctcacaatgtcctcttttattttcaccgactcttccaccatctgttgtaagagctggtagtcaatggggtgttccaaattgaacgaaagtagttgagcaaacctattttcgtgggcaagtaatccatgtttcagcatctctgcataaccacttcgcaaattctccaaatccagtgtctgaagaaaacaggtgttgaggattacaaagtttgcatcgttgaaaacaccaatttcgttttttagcccattaaaattaaaacctgtcttaccacccaccgaggcgtctaccattgccaaaagggtagtggggatgttgatgaatgagatgccacgcttaaaggttgaagcggcaaatccaccgatgtcggtgaccattccgcctcccaaattgataagacaagaatggcgagtggcatggttgttttgcagtgctgtccaaatttgttctactgatcgcaggtctttgtgcgtatcggtagggtcaatggtaacgagttgtgcctctttcagtatttccaaattttgtattctcatccaacagtgttctcttgtggtgctatctgtgagtacaaacagatagtcgggttggcagtctgcaatagctttggtaaggtctgtttgtaaatgatgagagatgatgatgttttgattcatgctatatttgcttgatatacgcttcgtgtgcctgcaaaaatacgaaaaaatgagtgcatctctcaattcttgtaaacattttctctgttttttgtaatgctatcttcgaagtctatttcttatcctcttttttcttatctctaagaatatatcctatttcaggtataaaatggatgaaaaaagtaatgatttttacaaaagaaatcaataaaaatcgtcaaataaaatgacacttttttggttcaaaagttttgcacaaatagaaacggtatttgcccttcgttctgatttcttgatgttttgagcattacaaatgatggggaaagatagggtaaaagtatagtttgaggtgatttttcggttcaaaaacgagtctatttgggttgaaatgtgcaaaataatgactgttttgacgagattaagtcaatgagttaccccgcctatctacatgacttaaccgtgttaatgtaatggagtaagccgacaaacccatgtagataagcgcattagcgcattttcaaaattcggctaaaatgcagccgaagatgcggaagacgtaaaatattgcaattataaagaactgtttgtacgtttttttaccatttttcccattgcaattagtcaaatatattgataccttgtaacaatttcgcgtaatttttagtaactttgcaaacaacgtaaattggcatgaaagtgctttttatgtaaggcttttatcaaccattgaggacagtgaaattcagcgaggtgattggtcaggaggaggcacaggctcggcttgtgcagctggtacacgagaatcgtgtgccacatgcgctgatgctctgtggtccacaaggatgcggcaagttggctttggctttagcttttgcctcttatgtcttaggagagcgagatgcaaacggaaagtctattcttgcctcagaaagtgccatactcaatgccgaggcgatgttgcgtaactggcaacaccccgatttgcattttacgtatccagtgattcgtcccacaggtacatcttccgatcataaaatgattagtgacgattttggcaaagagtggcgaatgttgctcaatgacaccgtctactttagcattgaccagtggctcgagtgcatgaaggcaaccacccaacaggctcaaatatttgaggcagagagtgacaacctgacgcagaagttaagtctgaagtccagtcaaggagggtataaagtttgcttaatatggctacccgaacgaatgaatcaggtttgcgccaacaaactgttgaagttgttggaagaacctccctcgcaaactttgttcttgatggtgtgcgaagagcctgaccgactgttagaaactattctgagtcgtgtacaacgaattgacatcccacgcgtagaagacgtggctattgagcaagcactgatacagcaacgaggaatagaagccaataatgcacattatattgctcgtatcgcaaacggcagttggctcagggcattgcagacattgagcgcagacaacgagaacaggcagttcttggacacctttaagctgttgatgcgcttggcttatatgcgcaatatcaggagcttgaagaaatggacagatagcgtggcaggatttggacgtgaaaagcaacgacggatgctgacctatttcagtaggatgattcgtgaaagttttatgtataactttcagcaaccagaactcgtttatatgacgcaggaagaagaagattttactaaaaactttgctcgttttgtgaatgaagccaatgtgattgaaattgaagagctgttggcaacggcacgtagggatataggacaaaatgccaatgctaaaattgttttttttgatttagccttgcatttaattgtgctattgatgagaaaataaacatataatagagatgatgcgccctccgatgttattaacggtagggataagtgcaggacatctcatgataaaaaagaaacaatggattacaaaaatatgaaattcaaattagccaacggttgtgacagaggactctgtcgtcggtcttgtggtcgtcaagacagaccgttgaacacttacgactggttggctgatgttccgggtaataacctaacgacagatttggtagaagtacaattcaaaaatacacgtaagggatattaccataatgtgaacggactggacttgaaaaaaggcgatattgtggcagtagaagcaagtccagggcatgacataggtgtggtaacattgacaggaagtttggtgaaactccaaattaagaaagccaatctgaagtctcctgatgagatacgacggatttatcgaatagcgaagcccgtggacatgcaaaagtatgaagaggcgaaggcacgtgaagatgatacgatgatacaaagtaggaagattgctaaagacctggggctacaaatgaaaataggagatgtagaataccaaggcgatggcaacaaagccattttctattatattgccgatgaacgtgtggactttagacagctcattaaggtgttggcggatgcctttcatgtgcgtattgagatgaagcagataggtgctcgacaggaggcaggacgtatcggcggaacaggtccatgcggacgagaactgtgctgtgccacgtggatgaagaactttgtatcagtaagcacgaatgccgctcgcatacaggacatttccttaaatccacaaaaattggctgggatgtgtgccaaactgaagtgctgtctcaactatgaagctgatgactatgtggaatcaagcaggaaaatcccaagtagagagattattctgcaaaccgttgatggggattactatttctttaaggcggacatcttggctgggttagtcacctattctacggacaaaaatctcggtgctaacttggaaacgattaccactcatcgtgccaaggagattatagagatgaacaagcggggtgaaaaaccagcatcgttgctttcggaaggtagacaaaaagaaaaagcacgtcctgttgatttgttggctggagctgacattagtcgatttgatcaaacgaagaaacggaaaagaagacgccaacaaggttctgaacaggaggcaacacgtgggggaagtcaaaacagaaatcgccgaaagcccatggacaaagaaggtcgctcaacagaaaggagacgttcggaagagacgatgaatcagtagtggagcatgaaaaatgtagggatattcgtttgttgctgtttgcttttttttgcttgcaacgaaggcaaggtgtatgatcggtttcagcatacaccactttcggggtgggagaaaaatgatactttgacctttgatgtgccaccgatgcgccagtcgggcaactatcaagctaaattagccatgcgcatcaacagtagttttcctttcaaaagtctgaccctgatagtagagcaaacggtgttgccccatcgtaataaatatgtagacaccttggattgtgaactcattggcaataatgggatagcacagggacgaggcatcagctattatcaatacgattttaatattactcagttaaagttgcagcgaggtgattcgcttcatatcagggtaagacacgatatgaaaagggagattctgccaggtatcagcaacgtgggtatcaccctaataagaaagtaaatctgtagagaggtatcagttcacgtatgccaagatgtgttttctctgttgtgtggaagggggagaaaaggatattgaactgctcgctgaagatagttttttgagttggcaaatgtccattttccctttttttatttgtatctttgtaacgccaaaaaaactaactatattattattaacccataaaagaatgaaaaagttaaagacattatctatgatgcttgctgtagcagcacttacgttgttgcccagtaagggaatggcacaattcaattggaagtataaaatcgatggtggaaagattgttaccgaagtacctcagcgggcagcaggacagcagtcggctttattgttaaagacaccaaagctgaaaaccgtacgcgtggctttcgttggcttgggtatgcgtggccctggtgctgtggagagatggacgcatatacctggtatacaggtcatggcattgtgcgattatgagaaggaaagggcagaagactgtcaaaagtatttaaggaaagcctcgatgccagctgctgatatctatagtggtgaaaagggatacgaggaaatttgcaagcgcaaagacattgatttagtatatattgctaccgactggttgcaccacttcccagtggctaagtgtgctatggagaatgggaaacatgtggctatcgaggttccttctgcgatgaacatgcacgaaatatggcagcttatcgacctgtcagaaaagactcggttgcattgcgtgatgctcgaaaactgctgttatgatttctttgagcttaattcgctgaacatggcacagaaaggtttgtttggtgaagtcatctatgcacaaggagcataccgccatgagttatctcctttctgggatcactattggaaaaaagaccaaaatgacaagttaggatggcgattggactataatcaaaaatatcgtggagatgtttatgccacccatggacttggtcctgtagcacaagtaatgaacattcacagaggagatagaatgaagactttggtagccatggacacaaagtcattcaatggaaagaaacacgttgagcagatgagtggaaagccttgtgagaaatttgccaatggagaccaaactacaacgcttattagaacggagcaagggaaagtgatagagatacatcacaacgtcatgactcctcaaccatataatagaatgtatcagcttacaggtactgaaggctttgccaacaaatatcccgttgagggctatgcactatcgtcaaagaacatgaagcaaggtggcgtgtctccttcgaacgatgatttgtcggggcatgagtacctttcaaaggaagatatgaaggcattggaaaaagcttatgcaagtcctttggttacaaaatatggcgatgaagcgaaggaagtaggcggccatggcggtatggacttcatcatggactgccgtttggtttattgcctacagaacggattgcctatggacattgatgtttatgacttggcagaatggtgctgtttggctgaattgggagcgatatccatggacaatggctgtcttccagtagaggtacccgactttacaagaggtggttggaatacgataaagggttattctcatgcttttgcctctcctgaagaagaggcggcaaatgatgcccaagcaaaagcttttacagcaaaactcaaggaaaaaggtaaacgttactgggagaaaatagataagaaaaataaaaagtaacgtatcaagaacgggagtcaaaaacaatgataatttgggtttgactcccgtttttcctttctgtcgtattgttacgtatgaacgatgttgcgtgctgcatcaatgcgcaggaatataaataataggatggtaaagccccatagcgatgaacccccataactgaagaacggcaaagggatgccaataacgggggtaagcccaagtaccatgcccacattgataaagacatggaacaaaaagatgctggcgacacaataaccatagatacgcccaaaggcaaaaggttgtcgttctgccattttcaaaagtcgtaagattaaagccaagaaaagcagtaatacgcccgccgatccaataaacccttcctcttcacctaccgtacagaaaataaaatctgtgtcttgttcgggaacaaactttagttttgtttgggttccattcaagaaacctttacctttcagtccaccagctccaatggcaatttcgctctgatgcacgttgtatcctacccccgaaatatcttcttctaagcctaacagcactgttatacgtactctttggtgaggcttcattacattatttaggacataatcagcagagtaaaagaaagccaatgagcccaatgcaaacaatgcaatgtagagataactcttatattggcttgctaaccagcagtaaagtagaaagccaatcaaggcgaatgatacaactaattgaacccaaacgatatcaaatggcactacaaacttggcaaacaacaggacaatgagggtggtgccgagtgaaataagtgtgaggaattgactctgtttcttatccttacaatagaggtaaaccatggatgttgaaaacaattgtaatagcaatatgacaatgaatttacccaaagagacaggaagtccccacaactgtacgtcttcatacttgatgccaacgacaaaataaataatcatagctacgccagtgaacaggacactgccaggcattccttctctgtaaaacatgagaaagaatgataaataaaccaaagcagaacctgtttctttctgtgctacgatgaaaagcatgggtaaaagtacaatgcctaacgcataagcaaagtctttccacttgtgaatattaaagccatatcgccccatgtacttaccaacagccaaggcagtagcaaactttgcaaactctgcaggctgtagacgcaaaggaccaagcactaaccatgaccttgaaccttttatctcgtggggattaaatatagttgcaaaaagtaacaacagcatgacggcatagatgatatatgcaaacatgtcatagtatctgtcatctaacatgagcaggacaaatccgagaaaaatggacgaagcaatccagatgatttgcattcctgaacgcgtacttaaactgaaaatgtcggtatcaccatatgtgtaacttgctccacagacacttagccagccaaagatgagcagtgacatgtagataagaatggtccaccagtctaatgaacgaaagacgccagacggtttatcggttactcttgccatatcctattcttcgattttgaaatacctttgctttcgcctctgatgctggtgaaagttttcctttgatgtattgttccatcatgagagacccaataggaacgccataatcagcaccaaatcctccgttctcaacatagacggcaatggctatctttgggttgtccatgggagcaaatcccatgaatacggaatggtcgtgtccacggttctctgctgtacctgtctttccgcagacaatataatcagatcggtttgctgacctacatgttcctcgttctacagccgaccgcattcctgccacaacgtaattataagctcgtttgcttgctttggtataatgccttcgagtgtatagcgtatccatcgcttcgccttgtacttttctcacaacgtgaggtacataataatatcctcggtttgcgatggtagccccgagattggcgatttgtaaaggggtaagattgacttcgccttgtccaatcgaaatactgataactgttagtccattccatgagcctttataagcatgatcataaaacgctgcattgggaatgagaccacgcttctctccggggagatcgattcctaacttgtatccaaagcccatgctaaccatatagtcgcgccatgtgttcatggctgtttgtacgtttctatatttcttgcgattgcccatcatataatacaatccccaacaaaaataagcattacatgaggtactgatagctggaattaacgctaagggtgaagcatgaccgtgacagcctacgtgaagtccacggtaataaaatcctcgatggcaggcaaatggggtggaaggggagataatcccttctgagagaaatgtcaaagcctgtgtcgtcttaaaggttgaaccaggtggatattgtcccataatgctacggttcaagagaggtttccaaacatttcgctgtaaagcaagatgattcttgctgcgtttctttcccactaaccaacgtggatcgtaggtaggtgtagataccatgcacagcacttcacccgtagaaggctcgatggcgacaatgctaccaatctttccttccagcagtcgctcaccgagtgcttgcaattgtaaatcgatagaaagcgttaaattctttccgggtattggctttttatctaatgctccatgttgataactgccctgtacgcgaccatgaacatcacgtaataatatctgaacccctttctgtcctcttagctgtttctcgtaagaacgttcaacacccaattttccaatatagtctcctgattggtaataatcatcctcttcaatgtcgctgggtgatacttctgccacatctcctaagatatgtgctgcgtatggatattgatattgtcgaatgctacgcttctgaacataaaaccctgggaaccgatacattttctcctgaaagatactaaactctttatcactgagctgactcataaacagttgttgcgtaaaacgtgagtaacctggattcttgttgcgatctttaatttccgtcattcgttgctggtagaactctttggtaatgcccaaggcttcgcaaaactcgagtgtatctattctacctttttgctcattcatcacgaccatgatgtcgtaggctggctgattgtacaccattagcttgccatgacggtctgtaatgattccacgagacggatattctattttcttaagaaaagcattactgtcagcattctttttataatcatcgctcaacagttgcaaagtaaacagacgaatggtatagatgaccacaatagtaatggccacccctgcaataacatacctgcggttttcaagattataatctttcattcgtcaattcgtgggtcaactttgcatgtctaccctcgtctaacattctctattgtcatgagtagaatcagtgttaaaaccgtactaccaccgacacacttgagccactgaagccagttaaagaagttgaatgcttcgagtgaaaagaagatgagacaatacaagaacactaatacaagggcatagccccaaaaggcagatatgcctaatgtgtgcattgacggctgtaagtcttctgcactatcacgtggcaagaataatattaatacatagggttgtatcaatccgataaatgtcatactggcagaagccagcccgggagtgtttgaaaagatatcaacacttagtcctgccaagaatccacaaaccaaaatgccccactttgggaagtttcttctaaacagcaacatactgtacacatacaaaaggggtgtggcaaaaccaaagaggtggatatggttaaatatcagcacttgtaataacagcaatattacaaatatggatatacctttcaataaatcaacccccatctctttactcctatctttatttggcttccagtgaatcgctggctgccctcatcagttctatgcgctctttcatagccgtgttatcgaccacagaaacatcgcgcaacgtactgaaattcgttgataacttgacacttaatctataagaaactccatctgcagagttgtacacatgcagaatctttcccacctttattccgggtggaaagatagacgaataaccactggttacgatattttcgtttaacttgaaccgtgcgtgtcgtggaatgtcatccagataagcaatgtcggtagctccgccttgccaaatcaagtagccaaaatactctctattttctattttacaactgatattggactttgtattgagcaatggaattactactgaatactgtggagataccaaatagacaatgcctacaacccctgttccgcagaccacccccatgtcctttttcactccatctttcgaacctttattgatagtcatgaggttatcaggccgaataatagagttgcttacgactttggcgggaatcaacttcatctcttgtacaggtagcagtaagctatctttgacgtaagatgaatcttttgttactgttgtcagtttctcagataagtctgaaatcttttcttccagcgcaatatttcttgccgtaagttcttcattcactttggtaagtgagaagaaatgctctaactgcgaactccagtcatatatcctaccaacaacgacattcgctgatgaaaaccacacactactttggtaattattgtagctgaaaagcagggtaaggctaattgcctcaagtaacacaaatacaaaccaatggtgctgacgtgccagaaactcaatgagattccgcatacttacagttgattattagtgtgaaaatgcaccactccttatctcatcaagaacgagaagcgatctacgttcttcaatgcgatgccagctcctttggcaacactgtgtagagggtcttctgcaatgtggaatggtatgttgattttgtctgtcaaacgtttgtcgataccacggagcaatgcaccaccaccactgagatagattccattctgaacaatatctgcatacaattcaggtggagttgactctaatgcagacaggacagcgttctctattttagccacagtcttgtccaaacagtgtgctatttcttgatagcaaacaggtacttccataggtaatgcggtaatacgattaggaccgtgaaccacataatcctctggtgcctcatctcctaagtccgtcaaagcagaacccacatgaatcttgatacgctctgccatacgttcgctgactttcacattatgctgtctgctcatgtattcctgaatgtcggcagtaaggtcgtcgcccgctgtgcgtatggagttgttggatacgatacctcccaaagagataacagctatctcagtactgccaccaccgatgtcgactatcatatttccttcgggtgcttctacatctataccgataccaatggctgctgccatgggttcaaaaatcaagtacacatcgcgcccgtcagcatgttcagcagagtcgcgtacagcccgaagttctacctctgtacttcctgatggcacccctatgaccatgcgcagtgaggtagagaacaagcgtctaccaggtcttaccatcttgataagtccacgcatcatctgttcgcaggctgtaaagtcggcaatcacaccatcacgcagaggtcgaatagtacgaatattgtcgtgcgtcttctcatacatcatttttgcttcttcgcctactgctatcattttgtcagtacgacggtcgagcgcaacgacggaaggttcgtcaacaactattttgtcatcactgataataatagtgttggcggttcctaagtccattgcaatttcttggataaaagaaaaaaatcccatttctaaatcaatattttattgagacctaatgttggatttcgcttcgatttgcgatatccatatctgtcatattatttggtaaaccatgtatgtatggctgtgtcatagtggctgctcaccttgaacgcatgttcagcaaacttctttctttcctctaaagttgtctgtgctccttgtctgttcagaatatcttccagcatgctatattctgctttgctgggtacaatgacaacatctttgaagttttttgcccctgcgcgaatgagcgagatgccgccaatatcaatcttttcaatgatttcagcttcagatgcattgcttgctactgtctgctcaaagggataaaggtcgacgataaccaagtcgattgcaggtatttcatattgtttcatttgctgttggtcactgtcattgtctcgtcgagccaagatacctccaaagattttaggatgtaatgttttcactcgtccgcccaaaatagaggggtatgaggtgacgctttctaccgtttggcattcgtatcccaacgattctataaacttatgtgttccaccagttgaaagaaatttcacgccctctgcgtgcagttttgataacagagattcaagtccgtctttatgatagactgaaatcagtgctgtcttgatttgttttgttccaatcatactttaatgtatatttggttacaaagttacgaaaaacccttgaatgcaccgcaataaagaatagaaaaaactttttttcacaaacattcttgttcaattttcctgaacaatcaatacatctatctctgctaatgctgatatatttgcttttcgtaactttcaaatgcacacattaactcattgggttaggctcgttaggtcattgagttaatcctgttaagtcaatgggttaagctcattaaatcaatgaattaggcgcattaagtcattgggttaacgatacaaagtcaatggattaagccagctaagtcactgatttagtctgttaagtcaatgggttaagcttgttaattcaatggggtaggcttgttaagttaattggttaagcttgttaggttattaagttaagcctgcaaagtcaatgacttaagctcgttaagtcaatggagtaacagcacaaagtcaatgggttaagctcgttaagtcaatggagtaacggcacaaagttaatgggttaagctcattaaatcaatggagtaacagcacaaagtcaatgagaaaaaagaaaaaaacgagtaaactttatcagttattttttagaattgataaagtttaccctctttttcttcttggctttctatgagcgtaaaatagtggttgatatgttgatagcgaaataaagtgagcatattaagcgcccttctatcaacttttcagctcattttcagcgtaaaatttaacggatagttctgtttggcagaaccgtcatttcttaatatccgtagatttcttttaacttatcagcaagctttgcaccacgcaagtcttgtgcaacaatttgtcctgaagggtctaccaagatattgcatggaatggaattgacgccatacacatcggcagcagcacacttccatcctttcaaatcagaaatattgtgccaaggaagttgtaaatcttgtatccctttcttccatgcttcaagttttgagtcaaacgaaacgccaaccacatcaaatcccttagcttgatgataacgtttgtaggcatccactacatttggcatttccatgcgacaaggtccacaccagctcgcccagaagtctaccaatacgtagtttcctttgcctacccattgactcagttttgcgggttttccctcggtatcatgcattgccaaatccgtaaacttcaaaccgggacggcgcttttccaaagaacggagttgctgtttggctctttccatcatcggatggttatagtaagcgctggtattgtccaatgcagaaaccaactcctcataagtcagtgaataataagactgccctaagaagtaagccggagtcaccccttttttgttcgagttagcaaaggctaaaatatcttttatctgcttttgctccgtttgttccatcattccttcgaagacaccttttttagtttgtccctcaatcgttttgtccgaggctacagcttggtattttttatagatgtccatcatcttttcatccagtttgttctgttccttttggaagttcgcaaactgtacattctgcggtgaaccagtgacattgccattctttaagttgacagtaataggggtgtgatcattcactactgtaacactgtgttgctggtcagcagctacagtgataaaagagttgaggggttgagtgccatttagctggaatttattgtccttcacagccacactatccacagatctaaacttgccattgtagaaataatacacccaattagtgccttctggtgcatttccagagatgacatattcggcattttgagcctgcgtggttgtgacgcccaaagcaagcattgtaaacaataataactttttcattgtactttattttatattcgttttgcgcaaaaatacttgttttttttgaaatagccaccatatctcactaaaaataactaactttgcaggcaaaaggaattacaaaaagactgatgatgtaaatccttgaatgaaatttatcctttattagctcaaaacagagtgcttggtcaacctcttaaaaaacaagaaaaatggaaaagaaaaatcactatgtgagtgtgttgtttatgcttttcagcatccttttttgtgtttgcttgataacagcaaacgtgttagaaacaaagcaaatagccgtaggtccaatatctctcactggggggcttatcgtgtttcctatctcgtatatcattaatgattgtgtttgtgaagtgtggggctatcgcaaagctcgactgttgatatggttagggtttgccatgaacttcttttttgtcatgatggcagccttgtgcgatctgattcctggcgcaagctattggactttaggacagagtttccatgatatattcgggttggcaccacgaattgcttttgcctcttttatcgcttttttatgcggctcgttcgtcaatgcttatgtcatgagcaaaatgaagataagttcgcagggtaaaaacttctctcttcgtgcgattttaagcaccatttttggtgaaggggtagattcgcttatcttcttccctttagcatttattggtgttattccaacctctgcacttttaccactcatgttttggcaggtgatacttaaaacggcttacgaaattgtagtattgccgattacgattcgggttgtacgaaaactgaaagaacatgagggcgtggacgtctacgatgaggatgtagattataacgtgttgcaggtttttaatatctaagttggcaatttcaaacgaaaatacaaatggaaaatactcgcaaaaatgaaggactaaaggcgctgggttcgaagacaaaatacaaaatggattatgcgccagaagtgttagaaacctttgaaaacaaacatccaacgaatgattattgggtacaatttaactgtccagaattcacttctctatgccctatcacaggtcaaccagattttgcggagattaagattgcatatattccgcaaaaactcatggtggaaagtaagagtttgaagctctatctcttcagttttcgtaatcatggtgactttcatgaagactgtgtgaacatcatcatgaaagacttaatccgactcatgcaacccaaatacattgaagtcattggacttttcacgccaagaggcggtattagcatctatccttatgctaactatgggcagcctggtacaaggtatgagaccttggcagagcaacgattctttaaccactctatacaaccataaaaacaaaaacagaatgaaaaagattgccattttcacattagtaggattattgcttttggcgataccagtacaatcgcagccacatcgcaagaaaatcgctattgtgttgagtggcggcggcgcaaaaggttttgctcatattggtgccttaaaagtgatagaaagagctggcatccctgttgacattgtcactggtacttcgatgggaagtatcattggcggactgtatagtattggttacgacagtcagctcatggatagcattgttcgtcagcaagactggactttgatgctctctgataagattgatgtaaggaacgaaagtttgaagagacgccaaaagcaaaatacttatatcataaccagagatgtgaactttggtaagaagaaacctactttctcaggaggtcttattgaaggaaaaaatctgcgcaagttgtttgagaagttggcttatcgataccgtgattctattgattttaataagttgcctattccctttgcttgtgtttctaccgatattattggcgatgcagaatatgtgtaccatagtggttcactgatagaagcaatgcgagccagtatggcgatacccggagctttcactcctatccgaaaaggagagatggtattggtagatggaggtatgagcaataacttccctgtagatgtagcccgaaaaatgggagccgatgtggtgatagggctaagcgtacaggagcctgacaagacagcggatgatttgacccgaagagggagtgtcataggacagattattgatattaactgcaagaaaaaatatgatgagaatgtgaagaatacagatatctttatccgctcgtgtacagatggatatggtactacttctttctcaaaatcagccatagacaccttgattcgacgaggagaagaggctgctatgaagcaatgggaccagcttgttaagctccgtgatgaactcggaattaaaccaggtcagcgagccaaatatcttactgaaatcaccgtagacaccttgccccaaaaagttaaattggcaaatgtggtatttgaaaaagtggatgcagcagaccaaaagtttactttgagaaagtttcaccttctgaagagagatagcatcaacacagggatgcttcaaaaaatagcaaactcaatgcgggcagatttttactataatgatgcagattgttatctcacaccaaccgatgcgggcgaatgcctacatattgctgctattggcgataaaacgaagaaggcgagattgggtgttcgctttgatacagaagagcttgtggcactgcaagccaatcttgggctattcgtaagaaataagtttttgccaatggctgcagattttacactgcgtttgggtaagagatcaatggcgcgagccgatttctcgttatattttaatcattggggaaaggtcaatgcttcttatgtgttccgccaccaggatataaatatttatgacaaaggtgaaagagacgccaatatcatttataatcaacacacggtgagtttgataccctttgattttaatatccgcaattttaattttcaacttggcacctattttgatttttatcgatataatgctgtgttacaagatgcgaaacgagaactctggcaaatcaacaagcgcaatcaacatttcatcacttatcaggcgagtgtgaaatacaattctgaggataaatggtattttccaacacgtggtgccaagttcgaagcgacgtatggctatcatacgaacaattttgtgggctatgacgaagagcctggatttaggagtgtcaacgcaatgtggagaatatcatttgctttgaacaatcgactgacaatacaacctatgctttacggcagaggtgtgtttggtaaaaatcctccttatattttacagacggtgattggaggaaatcacttcaattattatgcagagaaccaacacttgcctttcgcaggtattagttatttagagttggtaagaaataaattcgttgcggcgcaactaagatttcaacaacgtataattgatcataattttatcatagctaaagtaggtgtctataaagacggtgataagatggatgatatttttgatcatagcttaagggttggtgtacaagccgcatattattatcaaagcattgccggacctcttggaggttcgattggttggacgacaaaaacaaagcaacctaatttctatatcaatttgggttttgtcttttaagagctgtcaagactgcccgctgtgtttatgagctgttgctgttaacacggtgtgttttaggatgagcgaggtgagcaacgagttaaatgagtttcattcctgctgcagcacactctttacgcatatcttcaggccaaatgctggcttgaatttcaccgatgtgtgctttctgaagcaagaccatacagagcctgctttgtccaataccacctcccatactcagtggtaatttatcatttagaagctgttgatggaaataaagctgttgtttatcttcttgattttcaagtttcaactgtcttagcaagctctctttatcaacacggatgcccatggacgagagttctatggaacgttctaagacaggataccatattaaaatatcaccattaagtccagccaaaccattctctgtcacagttgaccaatcatcatagtcgggcgcacgaccatcatgtttttctccattactgagctttccaccaatgccaataatgaatactgccccatatttcttacaaatagcatcctctcgttcttttggcgataagtcaggatacatttgcaatagttcttcactatgaacgaaatgaatatcgtgaggaagaaagggcgttagctgtggatacgtttcacaggtaagatattcggtgcgaagcaatgatgcataaatacgttgtaccacatttgttaaaaacgcaatgttgcggtcggaagatcgaatagagctttcccaatcccattggtcaacatacaatgaatgaaggttatccaattcctcatctgctcgaatcgcattcatatccgtgtagataccatacggtggctcaattttatactctgctaatgttaaccttttccatttagccaaggaatgtaccacctctgcctgtgcgttctcgagatctttgatagcaaacgtaacagcacgctcaataccattcaaatcatcattgatacctaaacctttcaagacgaataggggagcagtgacacgtctgagtcttaattcggttgcaagattttgttgaaaaaaatctttgataagtttaataccttgctctgtttgtctcatatccaacaaagcctgataatgtactggttttatcaatttactcattttggtgtagttgctctttattcgttcaaaactttatgaaaatgttttcactaattgtcatgcaaaagtagaaaatttatggaagatatacaagaagaaaagatgtaaatcggtcaatatgattaaaaataaacgcttcatctttcatattgtcttaattcaatcagtgggaatcatgaaggatatactcccatttttatcgtcacacaaaaagatgacgtgctctgtggacacgttgcaaagaacaggtttgcggctgaaaaagaataatttgagtacacatacttgttaaattcaataattttctatacttttgcaatcgtttattatggcctcgtagcttagctgaatagagcgtcagattccggttctgaaggtcttgggtttgaatcccaacgaggtcactgttactaacaagcggaaagtcagacaagtaaaggctttccgctttttgcttttatggagaaacttctaaataatcttggaagtaagttctgaatacagaaagtagtaaataaaaagagactaaaaaggaattaattagagatttggctgaaataccctgcttatcccgaactcaggtatcatattgaagcctattgatgtgtcatacaaaggccatccgtcctcgtcaacttcaaggtattccttgtaggttgtttccttaatttctctgtactctttcgctttctttctgtctgcggcttaaagatatagtcaccccaaagacctacgatagtcagtcggttacaaccattatgtttattgaggttcagcgataatttgagttgtacgcctgttagagatgtctgggtacgaattacttgctcggctaattggtcgagatcttcatgtttatactctaacaaaggcacatcttttgtctcatagagcttccgtgcgcatcctgaatgaaagtctttctgaccctcctccaattctttgtgtgtatgatcagttaaagagaaataaaaagatgctgtacactttcctctacatttaggctctactaaaaatataagtttttgatattcaatgatatataatcgtaatatttgtataattcaccaaaaatgactacctttgggtgttaaaacattaaagaagcaaaacgaaaacactttgacaaatcaactattttacctatttttgtcgtgaatgaggcagcttgccgaaacattggaaaacaactttaaatcccaataagatgaaaagagcatgtaaattgaaattctttattttgtcggtggcaacgtgtctgttttcgtcaggggcctcggcacagagcaattttacgatgagcggcgcactgaccgacgttggaaacgactccatcctcgtggagtatgtagagcgaaatccggacaaaaaaacatcaattttgctgcgcccgtcaacaacggccattttaatttttcgctttatatagacaaggcctaccaagggagtcttcggttgaaatccagtcccaaaaaggtcatgtactttttctttgtccccaacgaatttgtcaatattgaaggggatttcatcgacgagtatagcttccgcatttcgggcagcgcattctatcagcagtacgccaaagtgatggacgtgggaaggcctttccacaaggaatttgacatcgccaaaaaagagtatgaggcgggagtggctgccggtgacaatgccgttcggctcaacagcatacgcaaagccgccaaccgtgacatcaatcggcgcatgcactctgtggtcgaggagtacatcgtacagcatcccgacgaggacgccacggcgactttggtgctcgacgtaaatatggatcgtgtggttccggtcatacggaagcttagtcccgcagtgcgcaacggtcgtttcaaaggatatttggatatgtggcaggaagccttcgagcggatggccgtgatgaggaaagctcgaaaagaagtggccgacacggctaaagtcggcgcgatggcccccgatttttccctccccacaccgcaaggcgatacgctcacgctcagttccctgcggggcaaatatgtgctgctggacttctggggctcatggtgcacatggtgtatcaagggatttcccaaaatgaaagaatgctatgcccaatacggagaccgcattgagtttgtgggcatcgattgcaacgacaaagccgaaaaatggaaacaggctttggagaaataccagttgccgtggccgcaggtgagagacaccgatgcgaaggtcgaaaccacatatagagtgaaaggctatccttataaggtgctgataggtcccgatgggaagatattgaaaacttatttgggcgaggtggaaacgttctatcaggagttgggtcaaatcataacctctgacaaagattagtgccagacgtttttcaactaattagtgttcgctgaattaataaattgccatggctgcaaagcagcggactctaaactatgcaatgacatttgcccataaattgagtttaatttcgaaaaggacaagacaaagttccctgagaaacttcatcacgttcttgacaaagtagcgcattcctgtccagcattcttctgtttctggaagcttggctctgatgttattggatcgatagactctcttgaaacttcctctaaatgtgcaacttagctaacaagtggcttgtataaacggaaaagaggacttcattgctgaaatcctcttttttagtactttgtgactcgcatgggggcgaaagtgatccgtttggggtcgctatttgcatggagttaagccttatatgtcaccactcataataccacaataagttcgttttcaatgacatacgaaacctttgtaaaaagtatgggcaatttgtgaaatatcaagtggtaacacattggtaacacaaacgcatcgttggtaacacatttttgccccatagcgccatttggctttatagcacattaagaagaaatctgccgttaattaaatcaaagatcattgtaggagaatagtctggatgaagatcttttgaaagagactcaatcggcacaactaaaatcctctaaataacaatacaaagataactaatatccatgagagttccaaatctcattttaatttctttaacagacgagtaccgagaattcccaacacctctcataagatattgtacacaatattttatgaagctcacatctctattttgtgacgaatagtttttccttagcttgctaaaagttatcgactaaagattgttaatatgagactttgttttgtaggcttcttgttgaagcataaacgctatgatgtctttgggataatagcatggaacatcagccttggtttttgttttgaggaacaatatcgggtgtaccttttgccccttctttacaaatggtaagtggctgggacggcttgttaattgttcatatacgctctgtgcctcgtcgcgttctcgccatttacattctgccacgaggatgtgcttcttgtcaagcgattcagttacaaggtcgagttctatctgttcgtagtcattcactactgtccatgaaaatcttttaataatctcttgaaatacctataaatacaagcttataggagataaaatagactccctacttttgaaaagagcatctttgccacaaattacaatttgaaagcagatacttatgaacaaaggtcgatacgtattttctcagctgtgcgactttctgccgacagaccatttcaaatggttgataaaaaagtatgaaggtaacaaatatgtgaagagtttcacttgttggaatcatctgatggttcttctatttggtcagttgtctaatcgtgagggattacgagaccttattgtaaccatcactccgttcaagtcagcgttccaccatcttggttttggaaagaatgtcagtagaagcaatttgagcaaggccaatgaaatacgcgaagtcaagatattccaagagtttgcagacaagatggtttccatagcaagagagaaacgtggagttgtcaaggatttcttcatatcgaacaatgtctatgaatttgactcctcaacaatatcattgtgcctttctgtatactggtggactaaactgcatcatgggaaaggaggagtgaaattgcatgaactgtatgatgtgaagacagacattccgacattttctgtcattacagatgcttcagttcacgattctcaagtgatggatctaattccctatgagaaagagagtttctatatatttgacagagcgtatatggcaactaagaaactttatataatagaaggagtagaagcttactttgtcgtgagagagaagcataaaatgtcgtttgaggtcatagaggataaagagtacaacaacccttcatctggaattatggctgaccaaattatgcggttcaagggatacaagactaagaagcaatatccaaataaacttcgacgagtggtattctatgactatgatggtaataggacatttgtattttacacgaacaattttgaaattacagcggaacaggttgctatgctttacaaatacagatggagagtagaactgttcttcaaatggctgaaacaacatctgcgcatcaaagagttttatggaacctcggagaatgctgtaaaaatgcaaatctatgcagctatcattgcatattgtcttgtcgttatcgtacaagaatgtatggggttaaagcttcaaacgtatgatgttctaagaattttaagcacggcattgttgacaaaaatgccattgtgtgacttgctcattgaacagaaagaggaagaatttactgaaggaaaataccagcagctctgcctcaatttcaatgggtaactatcaatttgttactttttgaaatgttaaaggaatttcgtggacagtagtgaatgcgctattttgcttcggtatcgccttcaacaataagggaggtgccggattcacatggtggttttgggcaatagcactgaacacactccagtcaatcggaatgttcatttattgcttatttgcaataatccacaagaaagataataaccgctaaagctaacctataacttcgatggtaacggtgtcggaatagattattcgtagttttttggaaattccggcttggctttttccgggatataacttccccgctcgtttccccaaccggaagagaagtataaaaagagcattaaaggctatcatcggggctgtgtagcgcaatttctttgtccgttccacgcagtttccacgaggataatgccccgaatctcaccgattttcgctaattttgcagtcgcaaaattgcaactgtaatggctaacttcaacacatatatggacaagattgatgtggtcttttggcgcgagttgtgccaaagggaggggaagttgcgccattatgccaagggagattttttccttcgggcaggggaagtacctaaatattttggttttatagaatcaggatatttcaagtattcggttattgattcgctgggcaacgagcaaatcaccggcttcgcgttgcgtagcaaccttgcgggcgagttttatagcaccattcacagagcaccggctttgagcaacctgacggccacaacaaactcatctgtatgggttatcagcaccgcacttgcaaggcaaacattagatttgtatcctgatatgcgccgcattatgacagaagagttgttccgcatggcgcacgaaaggtatgtgaacctctatcggcaaacgtccaaagaacgatatgtagaactgttgaatcattgtcccgacattcttcagcacatcacgctcaaagagctggcatcctacctgcaaatcactcctacacacctcagccgcatccgtaaagagatacttttcgggaaataatcctgttttttcaccgttatatggcaactctcaacttatgttgagagttgtttcgtgaaaaagcccgaactttgccgattaagtactgaaatagacaatgactatatatacctataaaatttttgtagcactgaccatcgttacggcgttggcagcttgtaacaaacatactccggcatggaatcagatggatatggcggagggattgatgaatactcagccggattccgcccttacggtattggacggtatcccgacatctgacgtcaaagggaaagaaacatcagccagatatgcgctgctcaaatcaatggcattggataagaattacatcgacaccacaactttcgatgtcctccaacccgccattgactattacattacggatggcactcccgatgagcaacttcggacatattactatcaaggacgtatctaccagaataaaggagatgaagaaaatgcaatgctctcctttatcaatgcgcaggaaataaatgatgcaacagatacattgacgcttgcacatctccttgtagctcagggaacgctttatctcaggcaatacaaggtccatgattttgttgcgaacaatattgaaagtgctaagttatatggagccatcggtaaacatatccctgaaataaagagctacacaaaagccattgacgggtatgtcatgatggataataaagaagctgccgacagtattctttctatttgtattcctctggttcagaagaatcccgacggcgaggcatacctgttttcctctctgttggcatatacaatgatttttggtactgacagcgaaatcaagaactttttagatgaatatcgggattcagaactgacaaccgatgatacaatgaattttgctcaaggctatgcaaaaatcggagaatatgatagagcgttggaacttatttcatcaatcagtccgaatgcatacacgatagactctctgaaatacgcctctgtcaagatagacatcttagaaaaacagggcaattatgagcaagccctgaaactatacaaggactactcagccatgcttgaacgataccagaacaatctgctatcccgagacttgctgtttgtagataagaaacatcagcttgagatgggaaagcggatggagatacataggaaagaccggattatcggagggacactttgtggcatcttcgcattggtcctacttgtgtcctggttatactatcgtggatacattagccggacaaagcgaatgcaggctgagaaagagaatgaaaacctcaaacttgaaagagacaatcttaatttgataatctcacgtttgaaagatgaacgcgataatttgaaagaattgcagaaagagcaatcggaattgtccaaacctattcaggatgttataaaaatccggcttgatatgctgaatggacttcttgccagtgagattaccggaagcgaatcacatgccaagccttatcacaaatggatagaatcaatacgcaaggacaaagtcacatttatgaactccacccgtgaggctttcgctgtcaccaaccctaaattcatcgactatctccagtcgcacgaccttaccgatgaagaaatcaactatctctgcctttatgccatagggctgcgcggcaaagaggtgggtgaatacattgaactgaaacgacactataacgtcagtagcgaaatccgccacaaactcggcatagacgagcacgaaaccaatcttgccctttacatccgccgcctcctgagcgaactttaatcattttccatacgccctttaaactttttcgagtcacgttaaactttcgcgattgttaaaattgtatcttgttgtaatacagtaatatacaagcaatgtcgttaaacttttgttttgcttgaaaactttttccatagtaattttatgtcagtttaatcaataaaagtaagaatatgaaactaaaacaaatcttcttaatcctcattcttccgcttttctttgtagcgtgcagctcggatgagccagagaaagaactctctatttctgaccttcttcacagttcatggtcaggcgaacaagttgagacactggaaaacggaagtgtccagaaaatcaagttcatcatactgttttccaatgagaaagatggcatggtgacatatctcgacgcagctggaactccgttgcagaacttcccgatatactataaaatagagggtgacctcatgtccatgaagggggcttttgaaggcaattataagatagtaaaacacactaaaaagatgattgaaatggaggcctaccttcctaatcatagcattatcaccctatatcggaaatagtaaatttttcctcaatgcactgaaaattatgagcagaataatcccgattctgatattatgcggcatgttagtcgcgtcctgcggcacttaccacaaggcatcgggacggtatatcaaagccccgcaactggaagccaatggtaaggttatttatgcacccgacagtagtccaatggcttatgccgagataaccagattatccgaccacaagaatttcttggctgacaaaaacgggaatttcaagataccagtggaacccgacgattccctctgcttttcatatgtcggagtacggagccggacaatttctgtcagctacttagcatcacatcccattgtaagtcttgattccctggatgtcaccatggttgacgagtttatctacaacaatcagataatcgggacctatgccaatcccagcgacggctcctctctgacaatttcttcgaatagtgaccgaaacggttatgatgtaaaaatcaacctggcacgcctaacctcaattgatgacggcttcggcaagcattcagacggcatcctctctttcacggctacggacgcctcaggcaatcctatatccggcaaaatctcatttgacggagaccaagccaaactcacattcactgattcaacatggaaataccttcccgatggctcagtatttgaattcgtcaaactcgcatacgaaaacgataaagaagacttcgatatgctcggaacggattataagcaggaacaaataattacatataaaacaatagtaaagccaatatgaagaaacggattttggatttagttacattggtcggattagtatggctatgctctttcgctattgtcagttgcgatgataagaatgtcgattatccagacactaaactaatcaaaggacaatggcagcttatagacaacaacattggcaacttgcttatttacagttttacagctgtaaacgaaacctcttggccgtggggtggactcacaacgtattatctttcagctgatgggactatcacatacgacaaacgatatacatggcatgtatcagacccggctgctgacaataacggcaaaatccgtatggatctgacgtggcttgatgctcccgatgcttccgatagtgataaaatttgggaagcagcggaatattatatcattgtgaaactaaccccttctgaaatgtggttgaggccggattcaaaaggaggatccaatgaaattatgaaatttactcgccgcgatgatttgcctgtgcctcccaaacctcaggtttggtcagataaaaacgcagttctcaatagtcctcaataaatcgaccgacatgaaacagataatcacattgttcctcgtatgcctcgctgcaatagatgttatggctcagacaaggcaacctgacagcatcagtacacaaactcttgatgaagtcacagtgactgcatctacgacacagcataaactcaacggagatgaatatttggtaacaggaaatatgcgggagcggagtgggaatatttcagagttgcttaacttactccttggagtaaaagtgaatcgtatgaacaaatgaaaagaataattttattagcattgatagctctgagtgtttcaaccgcatatgcgcagagctatgatacaggcaagattaaagcccattacgatgaacgtattgaactgatgagcataatatgccaccttgccggtttacaggaatataacatgaatatcggcggcgactatattacggatattgacaattattttgctgatgtaagaaatcatccggctgtggaaatgatggacagccttcgcagggttaacggcatctcttttgattcacctatggcgtttgccgtcaatctcgaaaaaaccggtaatggatttgtcctcgccaacgattcagttgctcctgaaaggcgttggaaaggtgttgacttgaaaatggcaaccgccacaatttcggacttctataacaagagcgattttgcaaacttctttgagcgtcataaacctttttatgaaaaaatctgctcgcttttcgatgtcaacgtcatttccaaattcaaccaaaactggtatgaacagttttatggtatgcctcccaccgacagcttcaaggtcatattaggatttacaaacggaggcggcaattatggtccgtctcgtcagttaccggataagcctcgtgacgtatatgcaattattggttatgcgttggacgataacggggaaccttattattcatctgaaccggagatgtatctcaacacactgatacatgagttcaaccactcgtttgtcaatccgcttgccgataacccggcgtttgttcagaaaatgcaacttgccggagaaaccatgctatcatattctcgaaaggtaatgcgcaaaaacgcatattccacttggcaaaatcttgtcaatgaatcaatagtcagggctgctgtgattatatatctgatggataacgaatttccacaagataagatacggcagagtgtgattgatgaaatgtcggttggcttttattggattcccgatttggtaaaatgcctccaatattacgctcaacatcgcgataaatacccgtctattgacttgtattataatgagatttctggtttcttcaataattacgctaatagcaattcggaaaagattgatgcgatattcaatcaagaataatctgttgataaagttaaattattgaatattcttctgcatagccagaagataattgatgaagtttatatggagtataagagcctgaaaatgattataaagagaaacacaaaaacaatgacatagaattacgttctgacaatgttcgtaatccgttagaagaaataccgcctcttgtaagttggtggacagtgataatcgttgccattatcttggtaacacttttagtggtctgtttcgtgccttatcctcattcacaaggagaaagcatcttacaacatatcttactgatgtgagttttaattaccctacaacagctaatcatataaattaattacggacattacaatacaaaattccaatgcgctcgctgttatacatatttattttgctgattatcacatcgtgcagctactccgagttggcgaatcaacgacttgatgatgcccagtcgatgttggctcggaatcccgaaaaagctctcaatgaacttaacagaattgatgtgtcagaattgcgtgactcggatgccgtggcacgctggtcgttgctttacagcgaggctatggcagccaatcatatctatgcgccgactgataccattgttaatgttgccatcgatttctattctcgacacaaagaccttgcggctctgaatagggcgaaggctgcacaacagaaattatcggcatcgaagtttgcagttaaagattcactggccgaggcccgctatcttcagaaggagcgtgaatatcgcatctatatagagcgaagtcagcgtgagcgatatgtcttaatctcagtaattgtactaattgcggctcttgttgtgataatttaccttatgcagaacctgcggattcgcaaagcgcagaacaacgcattgatggctgaagcatcagggctgaaattgcagttgcagtcggcatccgatgaaacctcacgtatgcagtcggctcttcatgatttgcttgacaagcgtttcgccctcattgacggtctttgcgacacatactaccagtcgcagggcaccaagaacgagcgcaaagcaatcgccgatcgtgtgaagtcggaaatcgaaaccgtcagaactgatccggaaattttctctgagatggagaagaccgtaaatgaatgtcgcaacaatcttcttacgcatttgaaagagtattatcccggcattaagtccgaggaatatcagctcaccacgtttcttgcgtgtggattttcgtcccgtaccatcagtttattcttgaacgagtcaatcgagaatatttacaagcggaaatcccgactcaaacagcgcatcagagcgcaaaatccgcctgatgacaccgaaattatggctattttctgaacctgtcagaaaatttgcaatctatcagttgttttgtattgatttacaataatatacaaataatactgtcaggttgtatttttggagaataacggttttcggctgtaactttgcatcaaaaaacaaatcggatatgcgtagaattataacatctattttagccgccataagcattaattttatggcatcggctcaacagacagagccacaggattccctcgttctggcattgcaggaggtagtagtaacagccaaacaaccggctacaaagctcgtggggagcactcttgtttcaaccatcgtcagctccaatctccagaacgccggaaacgctttcgacgttcttcagcagttgcctctcatcagcgttgatgacaacgctgtcacagtcactggcagaggtaccccggcaatctatattgatggacgccctatgcgtgacgagagtgaactccgctcgctgcaatcgtcaaatatcaaaaagattgagcttgtgatggctcccggtgcacagtatgagagtaccacaaacgctgtgctgaaaatcaccacccgtaagaatttttctaaagggctgagtgcgagtaacgaagtagaagtccgcgcccggcgcaaatggttggtgaatgaccttctcgatttcagttaccacaactgtgtatgggaactgtttggcagcggttattatgaccacgacaacagtcttataaaaggttcgacaatcaatacgctcacatacaacggaaagccgactgaggtaggctcgacactgcacaacgtatatcccgaaaacagtgccttcggcaaactcggattcaattttgcaaaggactcccgttcattgggcgcttattaccgtttctcatattcccatactcatcccgtcaacaacggctctgagtggctggattccgaaacgcctcttttgagagatataacaagaataggcaattcgcacaaccatctggtgtcgctctattacgatgatactttctcagaaaaataccatctccatttcgacggcaatttccgcggtgcggacgctgacagcagaagtgccactacttaccctgacggcggacacacagatgtcagttcattccagaatcagacaagcacgttgtgggccgggaaaatctatcttgattttccgttgtgtgggggaacgttcacggtcggcactcaggattcatataccaagacacgtcttgattacaggatgttgaactctgaggtaagtgaatatataccttcctcgctttctgacacccgtcagacgtcactggcggcattcgcctcatggaacgggcaattcggcaacttcagtctctcggctggcttaagatatgagtgcaacaacttcatctacagactcaatggcgagaaagaccgtgatctcagccgaaccgacaacttccttacacctgacatttctcttgattactttttcgatggaacctcaatgataagcctcaattatcgtatggctaccattaaaccacattattcccagcttacaagcggtctgatgtacgccggtgaacatcagatagagggaggcaaccctgcgcttcgcgacgaaaagatgcacgacattcagctatttggccagtggaaagatttcacacttcaggctgatttcatacggaatctcgacacctatgcttctatcaaggaaatatatcctgccaatgagcttcaaatcattatgcatccggtgaacgtgaacgtatcgaagctaagcacatatctaatgtggagtcatcccgtacgccggtggaagccggaatttacactcggtttcacaaagccttggatgaaatatggcaaagataactatgacaagccgatgttctcatatgtgttccagaacacactgacattaccgcagggattctacatctcgaccaatatgcgcggtcaaagtagcggcgacatccataccaaccgcttcgccgcatcatggtttgtgatggatatgagtattcgcaagacatttttcgacaaagctcttgccgtaaaactgacagcaaccgacattttcaatacccgcaacaatgactggagtatgaacaccagcggagtgctgtttaacaagcaccaaagctacgaccgtcgcggaataacactcagtgtccagtaccagttccaaccccgcaagagcagctacaaaggcaaaactgcctcggaagccgaaatgaaccgtctgtaagacaatcacttatatataattagtgttcgctgaattaataaattgccatggctgcaaagcagcggactcgaaactttgcaatggcatttgtccataaattgagcttaatttcgaaacgggcaagacaaagttccctgaggaacttcatcacgttcttgacaaagtagcacattgctgtccagcattctgctgtttctggaagcttggctctgatgttgttggctcgatagactctcttgcctgtgtcgaaagagcattccacttcgtttcgttctccgacggccttggccatcttcttgtgatattcgggacttctgggttcctttggcggtcgacctaatggtttgcagtaagtctttatctcatattctttgagaatccttctgtatggttggttcgtgtagatcttgtctgcaagaatattagcgggaaagtatccgaatcggtctttgcattgatgtttcttctcatcaaacatctccaactgctgggaatacatgtcgaaggttgctctgaggatgcgttgctcatggggttgcaaaaaatctttgcttccctggtacactacgaagagttctgcaagtttgcggaggtctttgttcagatagatcagcatagctgatagggtggattggataagtttggcatctttcttcttgcgcttaataagctccaggtagaaactacgtgcgtcacagtaacaactcctgacattcttgatataaagtccttcgcagattttcttgatgtaacggtctgctatcttgcatccgtcatgaatgatgtcggcatcaacaggatagcgaacctcagcatcagcacaagtcgcatcaatctttagtacacctttatgtgtgcgattctgactgtccgtaaactctgcaccattgtcttctaaaggagttgctggtggctcttcgttgtcactctcttgcttccgttctcctatcttgcgtgcttccttgaccgcaagctctttgttgagaagctcaacggtaagtttattaatctcttcaattgtgatacgcttacgaatagttgtaaacagggaaggatcgaaaagcggcttgtcggtgaactctgccagaccacacagatactgcatgtatgggttctcctgaatcattgagattgtctcctcgtcagaaagagagaacttatgcttgatgatacatgcaccgataatcatgcgagcaggcttgttgcctgcacctttaacttcattgtcaagtctggagttgtataccttttccagttctgtccatggaagaagattgcctaattctacccagtgattattcttgtccagctcatcaaaagatgaacggaacatatcgaccgataactgtttcaaatgtgaagtatacttcatctcacttatgatttaacactgtaaagtgtacgaattttatgttaaacaaccaaagacaaaacgatataatttattgtatatcaaacgaatataatctatttggtaaacactacttatctttgccaaacattatgttttacaaaaaaaaatattttaatcactatcagcacacaaaatcaccaataattttaattctgatcaaaattatgtttgcgaaagataatgtttagcgaacatcatatgtgtttgggtgaactgaatacagtgaatgacactcttcatacagataataatccctttgaaaaagcttttaggtttgcacatatagcaaggtcatttccctaaaaagctcattctttccaatagcttcccatacaaaagttaaatagttggttggttggcacagtttacgtgtttcgttctcttttctccatatttttgtctatatttttgcagcaatgaatctcgaaatcacgaaaaagtgattaccctaacgatatagtataatggaagtagatggattcttgcactgcattacagcgcctaataatgtacgaatagtttttactttaatgtgccatcgcatattgcctggtataattaaaaattcattgatatgaataagattaaagtagaacggctcgtccgccctttagaatgggtgcgcaaaacgaaaattggcgagctaaaggttgccaatgtgccttttgagaaagagcactgtgtgagaaatgttatcagcaagtacaacacagggcatggtcgtcgtacaggcaagtttgtccatgtagcctacaaccaagaagctgagcgtttgggtatctatgtggtttcgcgagaagaacgagaaaatgaacttaacggaaataaagatgcacaaaattggaaaagcaaattcccaaagagtttcttcgaaagagacaaatgggagattggaacagagtatgattaagtccatgcttactgccaacggtattgtagatgcaacggacaccgtttatactgtgcctgacattgcaaaaatgttgcaacgcaaggaatgtaccatccgccgtaggatagagaatggacagatcccagcccacaagatgggacgttgctggtatatcctgaagtcggaactggtggcggaattgagagatacttagcaaatcctctaaataacaagtgactaagtagaagcccttggccgacccgctgagaagccagtcggctgaggcatttttttgtaaccccaaacatgattagaggatgaaatgatacccaaggccattatagaaaaggtacttgatgcgacgcatatagaagaggtggtgggcgagttcctgtcactccagaagcgaggcgtcatctatcgtgcgctgtgtcctttccaccaggagaagacaccgtcgtttacagttacgcccaaccgctgcatgttctactgtttcgggtgccataaaggaggtaatgcgattaccttcctgatggagcatgagaacatgacctacccagaggccgtgaagtggctgggcaggaagtacggtatagaggtggaggaacgcgaggaaaccatcgatgagaagcagcagcgcctgaaacgtgagtcgctactgattgtcaatgccaccgtacataaacattaccgtgaggtgtttctgcgctacaagcctgcccaggactatgcctaccgccgctgggggcagaagtattgcgatgagatagagatcggttttgcgcccatcgacggcaaagccctcgctcatctgcccttgcaaaaggaatttctccaggagttgggactcattaacaagcagggctacgacttcttccaggaccgtatcgtcatccccatcaaagaccgctaccagcacatcatcggcttcacagcaagggtgatggacaacagtcagcccaagtatctcaacagtaaggagtcatttctttacagtaagcgtaacacggtctttggtttggacgtggcatggcgggcggcaggaaagaccgagcagatgtaccttgtggagggagcccccgactgtatgcgtctgcatgccattggtgtgcagaacaccgtggccgaccttggttcggcatggacagcggagcagtttcaactcatcaagagggcagtcagtaaggtttgcttcattcccgacaacgacccacccaagggtggcgccgattatggtacgggtatcgaagccgtaatgaaggctgggaagctcgccactgaacagcaccttatcgtatcggtcaaggagatacccatcactgaggaaggtaagaaggaagatcccgatacctatttcaagaatcaaacgctcttcaaggctgtagaggaagaggactttatcctgtggctggccgccaaactatttgaaacaagcggcaacactgagcaaaagagtgatgccgtgaagcaaatagcccacctgttgtcctttatcgatgacgacaccaagctcactatgttcattgatgccctcaccaaatatcaccgaggaaaactcttctggcagaaagccgtcgagaacgagaggacgaggcgcgacagcccaaaggaggacgaaatcgacctaaaccgtcagtacggtttttggatagaccacggcaaatacttctccaccaccgagaagggaggagtgattgaatggagcaattttacgctgacaccactcttccacatcaaggacccgctcatggccaaacgactcttcttgctcaccaacgagttaggcatcaaggaaattatagagatggagcaggaagaccttatctcgttacaaaagttccgccaaaaactcgaatctctcggcaacttcatctggaaggttggcgagaaggaactcattaaactgaagtgcttcctctacgaaaagactgagacagcagcccaattcaagcagctcggctggaacaagaaaggcttctatgcctttggcaacggcatctattatggaggcaagttcagtgaagtcaacgagtacggtatcgtacacctggacgagaagggtaactactacctgccagccttctctcagatttataaggaaaacactgactatttccgttttgagcgtcagtttgtgcatttcaatttctcaatgattttgctccgagacttcacccgtcagctcttcctcgtctttggcgacaatggcaagataggcttctgcttttatcttgccacccttttccgtgacatcatcaccctcaccacacgctcattccccatcctcgatctcttcggtccgaagggttctggcaagagtgagttaggacacaccttgatgtcgttcttcgtgattgacaacataccgcctaacatacagaactccaccattcccgccctcaacgacacggtagctgccgccgccaatgctctggtgcacatcgacgaatacaagaacggcatcgacaccgccaagatagagtttatcaagggcctttgggacggtacggggcgcacgcgcatgaacatgaccaccgacaagaagaaggagaccaccgccgtagatgcaggcgtgattatctccggacaagagatgcctacgaccgacatcgcactcttcagccggcttatcttcctctcgtttcccaagtcagactttacagatgatgaaaagaagaactaccaaagattgctcatgatgcgttccaaaggaatgacgcacttaaccctacagcttttgactcatagggaactgtttgtcaaagccttttatgatcagtatcatttgatattggatgatgtaaacaaacggttaggcagtaggaatgtcatcgaccgcattgtgcaaaactgggtggtcccacttacagccttccgatgtttggaaggaaaattggatttgcctctctcgtattcagaagtattgaatatcacggttgaaggcattatacaccagaacatggaatgtaagacaaacgacgagttgggtagcttctggcgcatggtgcagtttctcaatagtgagggagaaatttacgaagatgccgattttagaattagaactgtcagccggttccattccagtatcatcaatgaaacggaatgggcagagccgcacaagatactctatcttcaaaagacccgcatcttcatgctttacaagcttaatgcccaccgcaacggagagacctcactgcccgaagagtcgctccgttactatttagaaaacagcaaagagtatctgggcgagcagcgcatgacatatcatgtcgtcaaaaagggcaaccagatccttgacttcgatcaccgtgatgccaaggggcagcccgccaaaatgtccgtccaacaacgttcctattgctttgactatgagaagctcgtcgaggcgtttgacatcaatctggagatgacgagggaagaaaataatagttaaatacaacctataagttgtataattcaaatatataacttatctttgcaacataaaagaaagaacatgacgttcgataaaattactgacgacggccgtctatgggctgtgcgatacaatggagagagcgataatgcactctatacgctgtttgacaagtggggcgacgtagtatggcttagacaattcttccgtgataattgggatgatctgatagcctacttcaaggtgacagacatcaaccaagccatagaggacacgattgaggacagcgatcaactgcaatgtttgatgctggacttaaatcctgattcagacttagaattgctatttcacccattggaaaacttccgcacctctgagatggtgctcggcaaagaaaaagccaggctgaaacgaacgattcgtcattcttcgtggcttcgcatctatgctataaagttatcacaaggcgtgtatgtcatcacaggtggggctattaaacttacgctcaaaatggaagagcgaaaccatacaaaggtggaattggcaaaactggaaaacgtccgccgttttctcctgaatgaggatattatcgacgatgattctttcatagattatgttaccacaatataaaaaggaggtaagtatgaaccaaattataaacaaactggaggcgcacgagagcaagacaccctctcgttggcgtgaggctgccgagtaccgacaggctaataagtcgtggctccgccactcgcagcgtattgcgatgcttatgctcgacaagatggacgaactccatctcacccagacagaacttgcccagcgcatgggctgctcgcagcagtatgtgtcaaagatactccgagggaaagagaatctctccatcgagacgctttgcaagatagaagatgccctctcactccacttactccccagcgaggtagaaacggtttgatgaagttatactcacatgacgagatgctcaatcgagtgttgggcagcaaaaacacgtctgcccgtaatgcttacgagcagaaaacgaatcgcttcttgaaaaagataaagacgctcattgagcaaaaaagagaagtaacagggactcactctggataccctaagaactgcttgtgagtcatgataggctacccgccattaccaggtaatttgtcctggtaatggcggcttcatttttgccctaaaaaaaaaatctcagtaaaccccgaaaatgcttgtcttgcttgtcttatatgtcttgtcgttgagtatcaataaattatatgtctctgatgttgtcttgacttgtcattgcttgtcttagaaaatggtcgaagtggagaatctttctattttagtcaaataatataagtcttgtctaataataaagaatattatattattgaatatcaatactttatgtgtttatgacgaataagacagaaaagacagcccaaatatatgtgccctacaaaaaaataaaaaggcggaagctccgccttttctataacgcttagctgcactcggccatttgaaagcgagctttcatggctctcgcttgcaaagcctttcgttactgctcatcatatagccttgacaggaagtcctgtagtcgcttatcctgtatctcggtaagtagacagggcttaaagcctggtacttgcctaatgctcaacatgcccagtccataccgtgagccatccaccttgatgtcttccatctcctttacagaggcatagccatactccgtttcagccatccctacaacgatactgaacaaagtaaagtcgtcgtcttctggctgcccctccagtacataccagcggatgagtccaatttcaaacacacagacgcaagtggcgtccttctgcttcccgtcttgagaataaagagggaagtttttcaactgttcggcgagttttgccgtcatcaaacgatttgccatataaaatgctattgtggagcagtggtgagcccccccgttaccttctgactcatttccctcttgtgaagtctaatgacttcttcggggaaaactattttcgagcatatcagttgctattggatggaacattcaagggcaaggaatttttcaagtttttattcacataccatgataaaataaagagcggccaataaaaacctgaaaaataaggcactggtacttgatcataatgtgccaatagcgaacttcgcgaagaaaatggatgaacaccgaagaagtttagtttctcgcagcaaaaagagagcgccatggcaggtaatgagttgaagagagccggaaatggaatggaagaactgcatgcagggatgcttgggcatcttgctgcaagtttgaaatggaatgtggcatcttcaactcatcactggccttgttgcccgcaaaagattcaagaatgttgtatctgtcagataatcaatagagtaggaaagagtgtggggcaaaagggttacgagttggaaacgagcaagtttctttacctctcttcattctgcagtacctcaaagatcacgctgtttatgttgcaaagataatgattctctgatgaaaatcagtaggaattagccgtgttgtgggtattgtggtgtgttaaaagtttagtaactcattgatattgcattttcttattgtatctttgttgtacgcaagtcgtcagtatgcaagtatatttattttggagtactaagtatgaatgggaaaatagatagtcatatcaggcgtatctttactcataagatagaggagattggagggaccttaagtggagatattttgctttacttcggtcctatagatgattgcttggtatactatgtaaatgagcttgtcaggggattgaaagagaatagctcaaaagatgagaatagagataggtacaattgtttttcgtaatattgcaacgagtaactttgcctagtgtaatattcgaaccttcaaatctttgagtatgacaagttatcaagcatatttaccaagtgattttaacagcaaagttaagctgttgcacagaaaaaggttgatgaataaaatatatggaatcatacttttattgctcattccctgtatgacgtatgcccaggcggcaccgactaaattatggggagaagtgaaaaacacctctggcgaggcgatggactttgccagtattgtggtgatgaatcctaatctgcccaacaagatactcgcatcaacatatacaggtgatgatggcaaatatcagattactgtacgttgcgactgtgacagtctgatgcttcgtgtgtcacggatagaaatgaagtctgttgtcatgaagatacccaaccgttcgggagaattcaatattgagatagatgcaaaaacaattgagttgcaagaagttacagtaaaggcgaagaaagtgtattcacgaggcgataccattaattataacgtagcttctttcctttcttcatctgaccagaccatcgcagatgtcctgaagaaaatgcctggcattaccgtttcaaagaatggacagatttcttatcagggtaaacccatcaagaatttctacatagaggggcttgaccttatgaaaggtcattacggcattgccacaaacagcatagacccaaagaatgtggggtcagtacaagtgttagagagccatcaagacataaaagctttaaaagggctgcaaccagaggagcaagcttctattaatatacggctgaaagagggtgtgaagggagtgctcaacctgattgcaacgctcggaggaggatatggcaatgagacactatggaacaatgctgccattgccacctatttcaagcgcaacaagcagtttcttgccacatataaagggaataatagtggcgaggatttgtcgcaggaactttattctttcgatgaggactattcacggacgagcacgatttcctccattacaatgccatctgttccgggaatagacaaacgtctctattatttcaatcgctcacatagcatcactttcaataacgcttatcgtgttgggaagtttggcgagttgggagtcaatgcggcgtattttcacgacaaagacaaacggagccattggtcgaacatcagcaatatcctgcccgatggttctaagaatgtggtcgaagaggttatgacgggaacggcaaagcaagaaaaggcttatggagacataagctacttggacaatagagaccaacactatatgaaggagcaggttaagttcgattgggacagaactcatgccaatagccgaatagtggcaggggataaacccattgaccagttgggtatggttgattcgtatcgtctgctcaataaatttcatctcactaatcgtagttcagaatataagggttatgaatttctctctctcatcaaccttgaaaagcgtcctcattctcttgcggtttctccaaatcttttttctgaagttattccaatcacagtgttggaccagcaagtagacattcatcatttttccacagaaaacaacttttgtttgctttcggcatggagaataggcgaggtaaacatacatccttctgccactatagattaccaacataacacattgagcagctcactggcaaatttcagaaatgatttgaagttcaatttcatcaatgctggatttggagcaagagctacatataatagagagaagttgtatgtctctttcaatatgcccatacgatacaagtatttccaactggaagatatagtgaaaggtcaaacgacaaagaaatccggattacgtgtagaacccaatatttcccttacttataatatcaatagtaatcatcaattaaatttgaactccaatatttcatattctactccgattattgagaatttgtacacaaacaatatccttacctcctatcgacagctctctgcatacgacgttacaggattgtttgaggggcttagtcaatcttcttctttggactattcattcaagaatatccttacgatgacttttgcgggaattgatttgttatggtatcatcagaaacccgaagtgctttatggctcctactatgatgatatttccatgcgcacaatcagccggcacaccaaagaaaaagccaacacttttacggcaaaactccacggaagtcaagggttcgattggaaacaattgaaagtcggtgcatcattatcttattcttattacgacaatccgttgctgttacaagatgtggtgcttcgatatacaggcagggctatagctgcaaatatggacatcactattgctccattcaaatggctctctgtttcttatcaaggtgggtattatcagatgaagacgcaacaaaatgaaggacaacgcttgccctggttgcgtacagtaaacaacagtgcttctttgaatttcactctgcctgctggaataatgttcttaacctctctcaatcattattataacaacttcaacagtggggacaagtcatttctcttgctgaacgcagaagcaaattacaccatcaaacgttttagctttgcactttcttgcgataatttgcttaatcttaaaacatattcgtattcgaataagtcggctctcaccgaaactcgctctgtttataatatccgtcctcgctccatattgctgaaagttagatttagaataatataaaaccatttaagatatgaaaaagctctttattatcattgtttatatgttcatgtcatttacagttcatgcacagataacagctccgtttccgcaaaaccttcaaaagaagagtgctatagacacggcacgatacaaggttacatataatttgaaatataaaaatcatcccgccgacaaaaattatctcagcgacgtgcgcaatgtatatatagggaaacgttatgtaagagattttagcgacatcatattccatttcgattcactctgcacagaagcttccaggcatggagctgtgacacgaagcaacattcaaggaaatccatggccaatagaattaatcgttgaaggtggcaaaaaggcagacattaaatatcgtatgccactacaaattggtgtgttggatttccaacaggacctgcctcagttcaattggaaattcatagagggaacagacacgattatcggctacccatgctcgaaggcgacagtctcgtttgcaggcagaaattatactgcatggtacactcaagaaatcccgttgccatttggaccatataaattcggtggtctccctggattaattttaagaatacaagatagtgaagaacagtatatttgggaggctattggctttgaaagatcaaacgcccagatattgacatacaaatatgaaggagagaaaaaatgctctgtagaagaagcgagtaaaacaatcgctcgcatattcaaatcaccgctatctttcatctctgcaagtatgggcggaggaaaaatcacaatgcttgataaaaatggaaaggtaaagaaatcaaatgatgccgatagttataccattccatacaaatcgttagagattggagatgaataaaaatcaaatcaatatgtcaaaatcagttgtaaagcaactgatgtgtttaataaatttaagtttaataaattaaaataattgattatgaaaaagatcagtataattgagctctcaagaagagctatgggcgcacgcgaaatgaatgcgcttactggtggcaacgtttgtggttgtggatgtcatggtccgtcttcaacccaagctaatgctaatgctaactacaaagggaacaaatcatctaatggttcccagactgtagtaattgcagatatgagcgatggacaagttgtggtacataatccataagcagtcacaccctttagaagggggcgtatgaattagatctaagccatgcgccccctactttattccttagtatattaccttctaaactaagataaatgcaacaattaacagcagaagacgtaaaattatttttcgctaatactcaacaaattacattttccatcaaccgtgtttcctgcatgaaactctcattttccgtattgaacacatcgttcatcaggttgtttttgagcaaccggctcatccatacaccacccatcagcaggcagatatagccaacggaaagcgtaaagatatagagcgaagccgccccaaccttaccaataggcaatgccaacagccaccagttgagaaagaaaaagacaaatccggagaaaaacaccgtccaaatctttggccacgtgattttctcttccttcacgccttttgttcccaaacaggacagtgcaaggaataccacacaaaagagtttcgtccaaagtatggacgagaacaagcccgccgtgcgttggaaattcatcagaatcttgtccactatagctattgtaaagtgccatgtatggaaagcctcatagcagaaccaataacagttaatcaagaggaatatcaccgatatacctcgcataaagtccataactttacccaatgcccttaaatcatcttcttgtgtcattgctgttttatttagaatatcgtttgaatactatttgaaaagtttttgaatattatttgaacagtgtacttagcgcttcctgcgtttaagatttaccttattttgtctgcggagtttacgttgccaagccgcttctttccaatcatcgttgcccgtagatgtgaaagagtcacccaccatgtcctcgataagttcatcgataaggttatccccttcttctgcattggattgtaaaggctggacagttgccgattgttccaaacgggcagaaggtctgccatacagcgtttcgtccaagaatgggttatggacaggattggagaaataaccattgaatatattggcggcatatcccttgcccaatctggaaccattgattgcaacaccctgctcgtcatcaataaaggtaatgccgtaaattcttccattatcattctttcggattaccacacgcaagtcttgttcctccaatttttgccgaagttctttctccgtattgggagaggtacgcattgtttgtaacaccttgttccttatggttggtatcagtggtttgacggtttgtttcgacttctgatcctgttctgtatggcagtatagcccacaccacggccaatgtccgaggcatggatgggtgtgcttactttattgctcttgtcatctgtcggaacatagaccagtccgtcatatttctttcctcggaactccgtttttacttcttctacggcaaggttatatttgctcagaatggcgttcagttctcctaatgaacagaacttataatgtttcagcaccatgcggacaacatttgccacctgttccttgatattcccttttatggtatccaccttgggcgtttctgttaccgctttctcactaacctttgaactcggaataaggttatacttcctttccaaggtgtcggtaatctgtttgctctttcgcttttcaaatctgtcgttgattttctttccctctccgtccaccctaagcgacacgatgtgtatatgctcacgggcgatgtcgctgtgcttgaacacgatataaggttgattgccgtagccgagtgcctccatatactccctggctacctgcacgagttgctcatcggagaatttatcgtccggatgcggattgagggaacaatggaagaccatcttttttgttcggcatttctctggtatcaatgcctccatgtcggcaagcacgtcctccatcgtataacgtccctccttgttctgatacaactcagcggcaaggagaatgcttgcttcccctttctccaccttcttgaagttgtatccgagtgccccgccaaggttctccgtcgatgaaatcttggcaatcatcttttgcggtagtcaatggttaaacggatagcctgttcttgcaaggcaatgatttgagccgagagtttctccaacttttcaagcagaatctgtgcggtcttgaccgaatgatagcagttaatggcacgcacggtttggttatacagcacgccaatcttatggatttgtgccgtcagttcagagagtttacggtagtattctacggcggatttatccaccgttatcactttgaaactctctccaagaatacgcccacgcacaaaatccgacttggtttctgcgcccgaacgcttaaacaaatctatcgcccgttgctggtctttggggttgggaagacgggtgtcccatcagtcccaacgttcaatcttgtcattcattatctttcctttttgtaattacgactttggagtaatttaattcccctttggggctagggtctttgtcggcaaaaacggagtttgtcggacaaagacacaccttgccagtataaagaaagagatagtttgttatgttccataaagtaacctttctggggtgcttttgatagacgagagttcaaagttcaagaagtaagtcaagagataagtttagactaatttcttgacttactgacttaatgaactgacatatttttgactaaagttaattttgacttaggtcaaaactaatatcttgaccaaagtcataactgaccattcgacttaagtcgcaactgatttcttaacttaactcataacttacctgtttgcggtattggattataatgcctttcaagcattgtttgtatgtcgctctgtttgtaaagtatcttccctccgattttgtagaaaggaagtattcctgcatttctgtactcttggagcgtacgtgtgctgagccgtaattggctgcaaacctcctcgccagtgaggtaaacctctccgcccagcatcggacgggcggtagcgcaatatcgctccaatttcttcaatattccttccatcagttgtgaaaacaactgcatctgagggtcttgctgtgtaatgatttcgttctctgccatagtttattcattttttgagttcagtatctccatgatgtcactctccttgtaatagcacttgtgtccaatcattgagaaagggatttttcccgtatctctgtatgattgcagggtacgcttgctgatgcccaaacgcttgcacacggcttcgttgtcaagccattcgtcctttttgggcggattgccgatgagttgttcgatactgtggataaagtctgcaaattcggagtggtgtcgctcccacgctttgcggtcgatgataatgagtttcattgccttaattttgtcttgattactttgttgttgctcggcaaacaaactgttatgcagtccattgccgtacttatcaagtgcaaaagtaaaccctcggaaccaccgctgcaagaaatgaggataagcagggaaatagagagaaaacaggagaaaagaccaaaggagatccatctgtgttattgcggtaatgagatgaggtgccggctctttccttttatcacatagcaattattctctcgacagttcgatagttcgacaaatcgatatgtagaactatcgatagatagttttatcgatagattattttatcgatagattattttgacgatatatagttttgacaacagatagtcatgacaacagatagtcatgacaataaattgtacaaacaacagatagtccgtattatcgtcagtcctatctattgttggctgttacgccttgcgtccaaagagcctgagtatgccgtattcttgtcgtgcctatactctcttacggcagcccttccctgcaaggttgggagagatgaatacgaccgcacgaatattgaaaatggcaatacaaacttgaaaagaaaaatcctgcggtggagattcttctctccatccgcaggacttgaccttgtcagggcagattggctgccgttgtacctttgcacgataagaaacggcatcagggactttgcgtgtgcctttgcttacaacgcctttgggcttacctctccgtctgaccgattattggcaaatgattgctcttggtaagcagcactatcgtgcctgtgagttcggtgtaaagacggtcgtattgctcgtcagaagcaaatgtgtccgtcaaaccgaacttgtcgaatgtggcttgaatagccttgttcgacagcagtataggtacgagtttctctggaagaggtgcaggcagttccctttcaaactcattctcaaacacggatacaagcgtatcatacttggaaaagtgcaagccttgatacaaaacctcgcttgccatgttttccgcttcggggtacttaaaaccttgcgccacggcatcgcagtaagctgtgagagccatatctgcccgtgcagtgataaactccgtatcttgcaatctctcggggtgatgctcactcatgtaacttcttaatttcaatcgaaagtaggaaagttcctgtttgttgttctctttcataatcgtttggttttcaatcgtaaataataaatgtttggtaattacttcctttttatgcttgttgcaatagcacgttctgccgtgctattgactcacaataaccttcaaatacagtatgctccctgtctgtgagtgcagtcatatcctcctgtatcttgtggtcggttatctttccgtagatttgtgtcgtacctatattgctgtgtccgagcatcttgctgagcgtttccatcgaaataccattggaaaggcaaatcgtggttgagaatgtgtggcgagccatgtgaaaggtcaagcccttatttattcggcatatctgcccgatgttcacacacgcaaaggatgctttccttattgtgagattgggaaatatcaagtcgtccgctttcttgtccttgatatagagcgaaaggatttgcttggcaataggcaggagcggaataatcgcctctacatccgttttctgccttttgatgcgtatttcctccgtgccgtcagcattatgggtgatatgcttcggtttgagccgttgcatatccacacgagccaaaccggtgaaggcgcagaaaatgaagagttgccttgctcgctcgaactgtttgtcaatgatgggcgtttgcaatactcgttgcagctcctccgtagtgagataacgccttgtgcggtgtggcagttctgctttgtagtccgcaaacggatcgatgcggatatacttcttctgctggccgatgccgatgagtttcctaaggaagatgaccgctacctgaatagtggcaagagaaagattgcgctctgatttaaggtagaagtccagcccctcgataaaaccatagtccaacagagagtagcggatatcctccagccctaagcgttcacgcagataagcctctatgagttgtgtggcatagatgtagttggcaaaggtaggcttggctaccgttattcccacacaaggacgcttttcctcaataaatagtcgggcttcctccaaaagaaagcctttgggattgtcctcttccatgagttcacgtttcaacaactcggcagtgatatagccacgttgccaaactaattcttggtatttgcctttggcttgttcctctttggtttgcaagtagcggttgatttcctttgtctcttcgcctatacccttgcatcgtcccttacgactgtcccaaagctcgggagcgatttcctttctcgtgctgtattgcacttgctctccgtctatggtgatgcgtcccataatcgggcatttgccgttctttttttcttttgagcgattgatataaaagagtgtcctgaatgtacttcgtgccataatgtcaaagttttaaggtgaatgtatcttgtattcgctgctgtatcgcttgcatatcccgatggattctttcggaggaaaccgctgcatatacctgtgttgttctcaggttggtgtgtccgagcatacggcttaccgtttcgataggtacacctgccgagagcgtgataagcgaagcaaaggtgtgtcttgccatgtggaaggtcagcgggctttccatgccgatatttctctgtatgtagtgcataccattgaggataatgtcggtggtcggcacgtcaaagacaaagccagcccttatccctctataacgattcatgattgtcagcgcagggggaagcacctgtacacgatacggagttttggtcttcatgcgtctgctcttgatgcagagctcgccttcttccaatacgatgttttcctctctgagattgcgaacatcggagatagccagtcctgtgaagcaggagaagacgaacaaatcacgaacaacgcggtagttcgcccattcaatctccaagtcaattatcttttgtagttcgtcttgcgtgatgcttctcggctcgccttttggtcgctcgtaactgtagcctaagaacggatagaagtccagcacgcctttcttcaccgccatgcggacgatggtctgcaaagtagacaaggtactcgatatgctactgcgtttcagcttgcggtcaatagtgagataatactcgaaaccctcgataaatgctttttccagctgtgagagtggaatatcacttaccttgtgcttcttccgcacatactcacggagcagggagagttggtaggtacggagtttgaacgtctttaaggcgcggtcgatgcctatgcgctcctttgtctgtgtgagatactccccaaaactctccaagagcagggcttggcggtggatttgcccctgataggcatccctcacatcggtggcggtaaaagaattttccctttcactgagctcgtgaaagcgtgcgtggatgagtgcggtgcattcaccgagtttctgattgacggacaccgccattgcactctttccaatgagccgttgcttacggctgtcccaaagagcgaacggagtcttacacttggtggagaaacccgaatgggttctgccaacggagatgcgcccaatgacaggcacaagtcctttcttgtcggttcgtttcgcctgaacgaagaacgatactttgagtttgttttctttcatttttctgtcgttttttctaaattacctttgcttgcaaaggtacagatgaacaagtcttcctgagcgatgcagaaaaatgaaagatgaagaataaaaacctatgacacagttgtttaccttcaactcgtaacccctttttgctttttccttgatgggttacgatttggtaacggaactcctgccgtttgatgcttcctttcgcctaactcgataaaggcaaaaaaatgctaaatgatactatttcaaatagttacattccttacatttccctctgtttcccctaattcttgactaccgactatgcggacgaaatgacctaacctctctcccttgtcattctacgtctctgaagaatgatgaaagcggtattgtaatggttgctgctttatgcgcaatgaatggagatacggctttcagggaaaaagccttctgaaatataggtaaaaccacataggtagtctgtgtaactccactgcaacacaagaattgggttacactggagatgcactgacgtcacacaggaaaatgtgcgatatggtgtgcataggcacggagcaggaagtaagatgggcggagccgtggaccggtcatgggcgacagtccatcaccagcgtaacagcggcagcctatcctttctgtaccatgctatgcactccatccagcacataatggataaccgccctcccttgttgctccgtgtcccaacggagcgatgaaagcggtgaggagtcatcacactcatttatgacgtgatagcgaaacacggctttcagggaaattaagtactaccaaataaaagtcttgtttttgatgaaaaaagcaagacttttattttaaccaagcattattcagctaagcatctttctcccaaacaggcagcggactgtgaccgctgcccgattttgaaagctggtcataccttgtcagatataccccagccatgctcactcctccctgcttattctgcccacctgcttacaaggatggttgcagaatacccaatcaatctcacggtatgacaaagtggtctgtatgccactgtccatgaccattccacagtgttttaggattttgcataacacttggcttcctcgctgctctctgcttctaccttgaaagtaccctcgaagatgtatcgagctggtacgctataaatcttcttcattgtatttccttttgcaggagtatgcctgtaactcggcacactcctggttctacttagtcaaacatcgcattgacgtgggtttcaaactcgtcgtctgaatagctgtagaagatgtcatcttccacatatccgtaaaatagattgtccactgatggaaaatcttctttccacttgtcgcacacactacagggtgcaaatagggcatcgcccaactgcgcattgcaaatctctcttgcatcaacgccctctatcgaaaaaatactgatattccccatgcctttagaaatgaaaatcaatgataccaccgatataaagttcgtcaccctccgtcagatgctccaccatgcgcatcaactccgccgacttttccgcaaaggtctgatagtcgtcattacaaaggtagaattgggcatcagtgtccagcggattttgcagctcggtctccaactggtatacctcaccgcaaaagttcatcacgttttccgtgtttacctttgccgctttcgtctgaatacgctcaacccactcacgtttccactgctcaaacccgccttgatacaccaaggtcgtttcatctttcaggcgaaacatgcccaatggcagaatatgagccatgagcgagtaaacggctctcttccgttcttcttctgatatggcggcacaatagtcatattcgctgccatcaccctgcaacaaggtatcttcacaaagatagccctcgaagcgtttttccgataattgaaaaatccatgcgtgcataacttatcattttaagaggttatcaatcttaatcttttcccttttgtgaagtcgaaagacttcttgcaggtacttgattttcgagcaagaaagtacggcataagcgggaaagacaaggcaagcaatgcacggaaaaattgacggaatacccaaatcttgatttgaggaaggctgccgtctatttttctgcgtatagtcgcagcggtgcttgccgctctttcctatgccgtaactttgcaaagaaaatgagtacttgcagcaaggaggcaaccgcaaacatggaaatgatagaaagtaaataccgcacatcatgacgtacctttctctgataatagggaaaacaagaaaataataggttcatccgacttttcgagtgatacgacagtcatgtagtgcatatagccttagtttaaaatatcgttcatccctaaatccgtatgcattgcgtttcatcacttttatcttattgttaataccctccactttacctgttgagatatgacagtcataccatgcaagtatacctcttttgtaagccagtatagtcattgccatcttttgcagttgtggaatatgactctcttttgcttgctccacccactccgttaaaactttttcagcctcctctttacgcacttgcaaccatatctccctcaactgttctttcagataatacgcctttgatagaggctcattcattgccaaggcattttccaatctcgtcttatatttcgcatcatagatatctgctccattacaaagcaacagatatctggttcccttgagtaccttacgtttattaatatccttctccatgttatattgtattcgccgtatatcatcaagtttgtcattcatcagctttacgacatgaaaatggtcaaaaacgtgtatcgcatctggacaattttcaagtacggagccaataaaagccgctgacaaatccgtggcaacatatttgatagatacattcttgcgcctcaccttcttccaaaagtcagccaaagattctattcccttaccctcaccgacatagagtatgcgcccgctaataaggtctacaacgattgttttgtatatgtgtcctttcttgacggcaaactcatctatacctatacacttaacaccatcaagcgacggaggggaataatggctttcaagataatgggaatgtatctcctttactgtatcccaacttacctcaagccgtgccgccacatcttttagggtcatgaaacgcaacaagtctacgacatattttgcaaagcggtgagtgtaggaactgctgcccgttgcaaatcgtatcttttcctgttggtcgtagtcacagtcattgcatttgtagcgttggactttcatgcggataactattttcttgccaccgatcggcagaccgagaaagtctcttatgcggtagccatttttcaccaaatgaagtttgccacatttcgggcagaagcttaaacgtttcttgttttgtacgtgaagaataattttattacctttgtattcctcccttgtacattcgagactatatagtccccatgcgtgatatagaaaactgctgttcatgattgtatatctgtttgtggttattcaaatatactcaagttcagcggttttcttttatcttattgttaaattgtcactcgaaaagtcggatgaaccaaataattactgttttcttgcttaaatgacatgaaatagttatatttgctgcataaatctgtgtcatgacacaaaaatatattctaaaatgctatttgaacggaagtattacctaagccagctacagaatgctgatggaaacggtatgatcaaaatcatcaccgggatgcgacgctgtggcaagtcattcctccttttcaatatcttccgaaagagtcttcttgaaaggggcattcacgaagatcacattattaaagtcaatttggaggatcgccgaaataagaagctacgtaatccagatgcacttcttgaacatatcgataaattgatgacagatacagagaagtattacattctgttggatgaggtgcagttggtcagtgagtttgaggatgttcttaactcttaccttgacgtacccaatgcagaagtgtatgttaccggctcaaatgcaaaattcctttcaagagatattataacagaatttcgtggacgaggatgggaagtacgcatccacccacttagttttgcagaatattatgaggtgataggtggtgaaaaggcagaagccctggatcaatactataaatatggtggcctgccagctgtggcaggaataaaacgagctaaagacaagaagaattacctccgcgagatttttgagacggtgtatctaagagacgttattgaccgcaaccatctaaagaatgcagacggcttacgggagctggttcgtattcttgcctctactatgggggcgagtaccaacgtgcgacgaatttcaaacactttcaagactgccgcaggcatagatgttgccccggcaacgatagccaaatacatcgagtgtctgcaagatgcattcatcatcagcgaagcattacgctacgatgtcaagggtaggaaatatatcggcacagaaaccaagtattatttcgaggatttagggataaggaatgccgttgttgaattccgccaatttgagccaacccatattatggagaatgttgtatataacgacttatgccgcaatggtttctcggttgatgtcggattagttgaaagtttcaaacgcgataataacggcaaactcacaagacgaaacctcgaaatagattttgtcgtcaatcggcatgatgaacgattatacattcagtctgcctatgctttaccttcaaaggagaaagttgatcaggaacaagcctcactcttgcaagtgtcagacggcttccgcaagattatcattgccggcgatcattacagtactggttacaatgagaatggaatcttggtaattggactttacgattttctgttggagaaagcgaatatctggaaatagtataaacagcaagtctataatactaaaggaagaaacaggggaagctacagataacttcccctgctacttttttaccatgtatcttcatgaaagaacttttatggcagcggtagctcaaacgtcctcaccaccgccttgccgtccttactgataaagaaccaccgttcagcattgtatttcatgccatgatgcgttaccgcctgatagtcgatcttcactttccatcccgtccattcctttttgctagttgcctgactgagcatctgtcgaatgtccgagttagcacgcatctgcctttcggcgagatccatcacgtagaagtcattgatgtccagcgactgcatattgttggtacgtttcataatactgtccgtgaccgacttcatgatacggatgatgcccgtcttctcttgttgcgagaagtagctgaacccaaaagccgaatcaggctctgatattgccaacatctgcaattgcttaggatattccaccgactgtttcagattctccacagccaactgcttcaacgcatgacgcttatttttacaaccagtgaggcataacaatgccaccactacaaatataatactttttcttttcatcactaaaaactgcttaaatcatgattattctgtctttttcaggtgtcagttgcagccgcttgtagtacaccgtaccgtcttccttgtaaaattcgatgcagtccctggttacgccctgttcgcaaatttgcttcacctcctccaccgatacggcatgaccgctgatgttacgccagatggagaacttgcatggatattcggcattgcgatagttggcacagttgtaggccttcagcccaacatgcaggtcaccgccgcaatgcggacactttgcgatgcgcgattccagcttcaccttgccttcagctatcgacaacgacgaggcaaacatcttccactcatttgaggcaaagccctccagggcgatatgcttgccattcaagaacgccacggcatcctgctccataatcctacggttgcagataatacccggaatcataaagtcacacgatggatgctcaccgatggaattttcacatcggtagccctttgaagtcttgcgcatcttacctccacagataggacatactccgtcgatataatgtacacctgatgataccaccacctttccattacggatgacgagagccgccttaaaatactgtctgtccttgttttgcagagagagcacccccgtatgaccatgcttgacaagtggcgccaccagttcctccgttacctccaaattaaacaaacgattagggataacgaatccacaggactgttcactgcacttccagtcctgctcgtcgtgcaccattgtacctctgccacaaacggggcaaatcattaagttatttgtatcactcatatctttgctatttcttaaagtttaatgattaccaggcaaatccgttgtttgcactgctcttcctcgaaataacaaagtgtcgccatgcaaaagtacagaaaaatgcccatattcagacctctcaaatatatttccactcatagattagtccatccacaatcgcctttcctgacatcaccgtggcccaaccttcagggtcaagcccaaaccacaggtcattccacgagtacgtccttacctgccatgccagcagccacagatcggtgttgatcgtctccagtttcgtcaccacctcattggcaatgtaataccgttccgccgatgacagtaggtttatcttatgcttctcattcacagacttgccggtggcatcatagccactcacgttgtatgagccgctcgtcaccagttgtttcatgaacggatagagcgaagccatttgcgtggcagcatccgtcagttcatcagacaccaagagagcaatggccgttcctttcagatgaccaggcagcgactggcgcaacaggttcatgtttcgtggaatctctactgttgtcagttctgccgctcgcttgatctgataaaggttctgcatggctccttgtgcattggagagatacgccagcatcttgtcctccaccttgtgcattctgtccatcgccacagtgactgccgtttccgcagcaatgatttttttctgtgtcttctcgcggtccttgaaaatctttttcagcattccgctctgcgctatcactgcacccgtcagcgtcgggtccgtctgttgtgccatcatagggcagaaagttaaactacccaacaatgatatgatgaagattcgtttcataaggccacccctttctcacggcggtcagccagattccgatctcttgcaaacttgttttctaccgccacaacttccatctgtttacccatcagctggtcgttccagtccttgtagttcgcagcagccttccattcacctacattatagcggatgtggatatgcttgcgaagctcacggatggacagctgttcattaggaatggcaaagttcttcgcgccaacagtaatcttcaccttgtcctcttccttatgcacattcaagcggatgccctccaacaaggcagccatgcggatgccatagatacgcccggcaaggtcattatcaaaacagtccatcgccttagcttccgggtaatgcgccatgatacccttgatctgactgtcggagaaagtgcctcccagcgatacgaatgccgaatgagtaccatctaagcgaagatgattcatctgatagaacgccatgatgtcgtaggcactttcagcgaaatagacatgtctgatgtctgtaggctctccaccttgtgagagatcagcaatccatgcccccgtcgtcgagttagtaccagctgccttactcttgaatgagccaaagccacggatttcatagcccaccaccttgtccttgccagcctccgtataagggaagccgatgttgaactgtttgtaggtggtatggctgttgtcccttatttgcttgataaatggtgcgaaggcactcaccgtctcctcgttgatgccacgctgggcaaagaacgccatcacttcagaaggcgcaccattaacatccttcgtttcatagcgtttcggatcaaacacggtattacccgtgtacccagctttcgcaagatactggctatctccatagtcaggaatcggctcattggcgaagtgggccatcaccttgccgatgatttcccactcgtttcttccagactcgtggaagctgctaaggttctcacgtatcaaagataccacatcgccgcctctcgccccattacgccggaaataagtttgcgccgccttctccttcgggttcttgatgatgagcttgtcctgatgacccgtggagtcagacaagaccatttcaatgtatcttcccacaccggccgagcggtcgagacgatagcccagataataggcaatatcatctacgcctacctttgttttcaggtctttgtagtttacactctgtttcataactacctacaagtataaaggttatattttcatacgatgagcatgctgctgtctctgtgccatgaccacatcgccaaaacttttttccagcgtatgggagagcagacgcgccttctccgtttcttccgagagagagaaataaaggatgcccacatttcgttcaatcggtttgagtcccaaatcttgaccttggaatgaagctcgtaccgcatagtcgccgtcgttctgcttgatgatggaggcgttctcaaagacgaccttgtccttggaaatgtcagtagaaaggtttctgtttttatcgagcaagggctcttcacccaacgccatcttctgcttgtccacctcttccagtaccatattggcagccttgttcacgtcggccatcaccgacacgatgaacttaggattcactttgagagtagagatccaaccatcgaggtaagccgcgttgttgtccagaatacgcttgtcaaagcccatcgagttgcccaccatcgctgccgtcaactcagccaccagttcctctttggcgtatttcgcatcgccgaacttctcatggctgcccctgttcagccgaggttccgtaccggtggaatgagccatctcgtgcagggccgtggagtagtattccataccgtccttatagacctcttccagtgtcttgccgatgttgaactgctctttccttggaatgacgatgatgtccttggagggagagaaatatgcaccgggtacctgcttatcatattggataggacaaatccactcctgcttttcaaacatacggtcgagagccttgctggtaaacatcccttcggcatctcgcagctctggtggggcaaacagctttttgagaacttccaccttgtcaggcttcacctcagccagattcgtctgatcgacattgaacacattgaaggctttcaggaaaggaatggtctgcacctgcatccgctctgcaaggctcatcttgcggtaggcctctttagaaactttcttaccatccttgtcccttgctatgatatcccagtagagcactggcatagccgactcacctctcttcacatgtgctcccatgtcgttggcctgtttgaaggtgaggtacacgggcatggagtagccatggagagccgtgtccagttggaggaagaaagagttacttcccgaatatccacgcccagatacattctgcggcatggcaccaggggcagtagcactgccaatccaccctttatgccagccaacggacttcatctgttccatgcgctcaatcatcatttccgtgaatctgtccacggctttctgaccgagcgtctttgtttcagttccaactgtagtcatagtcgtcctccgccaagatttgcttatcctgcatactcagttccaccgactccatatagaactctgcggtatcttcgctgggatggatgttgtgttctttgcaccactgcatgaagtcgtccgcatgttcaccttcaagcgtgaactgcagccatcctatccgtctgtcctgtttgagctggaccagctcttcaaaactatatgccattttctttgaatttatgttatctgtgtttattatagaaatccccccaagggctacattttcagtccattgctgatagcctgcttctgacccgacagcaccttgatgttctctgagagatacttggctgccagctgttcacgagtgacggtcttggcttggaagagagaaaagccgtcgtcaaaggaaatcgccttcttttccgtgcgtccgttctcgcccacggcagctgaaatcttccacttgccgtccatgttgtcctttgccacccggatatcctccactttgatgttggcagggagttgatagacggcataggccgatgccaggtgcagccgttcgccaaaattcttttccaccaatgccgccggtgtcgtcacgcggtcgaagaaagcactttggtcttctttggtcataggagccgacattcgttggtcgcccacctgggcatagagcttgtacttgccatagtcagtccgctgctcatctttctccttatacactgtcatcttgtcaatcaccctgccgtcagataggatgttggcggccttgtactcctcggcagatactttaggagccagctttgtgggataatatttctgcatcatattctccaccttcgcttcccgtttctgataggcagcgatgtcggcagcgtccatcttcatggggttgagctgcttaccgttgagctgcgccacatagaaccagtcggctggattcaccttggactggaaggcatgggcatgggaaaccttgtcgccattgaccgtaaccatctgcggatcacgcggctgatgctcctgcttgacggtttccgttttttccaccgattttccttcctctttcttttcctgtgctttcgtttccactttctccgacactgatttctctacactttgtttcttctccagactgtccacgatagccacacgaagaccagcccggatgagtttgggcagattcgtgtccagcgcatgatggggaaatgtaacctgcagagagccgtctcctgccttggcaggcttgttcgctttgagccccaatgtgtcagccaccttggaggcatcagcgttcaaggttgtgtagaagtctcccgttctgaagagtaggacggcatcagggtgcttctccttcatgttctcgtacagctctgccagcgtctttgacttcgggagctttgtcgttttctttgcagcttttttctcggtttgagccgtcggctcttccttcagggtagcttgctgctgcacctcttcttttttcttacttgccatattgttgtcaataaaagggtaaatatccgacttccatttattgggcgtgaacttatgcgtatcaccgagtaccgccatcagcgtgtcctgtctgcccattgcttcatatgcggccattgccgtatgcccagtgtcgagtacattgtcaatgagaatgggtatcttgttcctgggtagcctgcggatgcgataaaaatagagcggcacctcatcgagagagccattggttttcttcaccagataaagcggatcgtgggtattgcttgccagcgcatcgatgacaggcagatgcagtgcctcgcttattttctcggccagcgtcttggtgtaaccggccctgccggtgcggtttgggataggtaccagtaccacctgcttgtctttaggcatgatattcctgactgcagcagtcatcatcgccgcagccttggcaatggccatgtcgtccccagctttcacctttcgggcaataggagcaactttggcatagccagccacggagctgacgatgtactcgaaatcaagatttttgtatttctttctacccaccttgcttgtcgtgatatgctttaacgctacggttctacaacagaagaactcgccaatagagaagaatgttaaagcactcactggctcatataaaagtgacaagccgggagcaaaatattaaagaatcccttgttggggaggatggttattcgtcttgtgctatcgaatcaagcctgtatgctgcttcttttcgatagactctgagcggttgttggtcatggcttgacgttccaccactttctggtattcccagcggttttcgtcggtcatcacataacccataaaatcctcgtgaacatcatcgtagcgcatctgttgcaatcgttcccactctttcatgtcgccgttgacaattttgaaaccttgtggctcacgtaggtcaacgcccaccgttaccttggtgtcgccgagagccagttccacaggtttaccttcctgcaaagcctccttttgattggcacccagctcgatgtccttcactttatctcgtgtttgtagttctgtctcgataggaatgctggccacattacggtgcatgagcgagtttgtttccttatccaactgaacaaatcttactttcctttctccctccacgtccacttccttgcgtattacctcgccagacagcagtcgttggagctcattttggttaagtcctaattcattggcaatctctctacggagtgggtaagtcatcagtaacacttgttcgttatcatccagtacgaattgggctttcatcggtaactgtatcaccttgccatttgatgtttccgtgttggccatgaaaacaggcgtcacctctccacaaagcagcggaactttcagagcatcaggcatcaacgccagtttttcctcgttgatacccaactgcttcaatttgtctataacagttccttgggcttgaaaagtcatcacttcttccatacgttaaatgtttgaaggtaaatttgtaaacgaaaaacccgcaaaagagggctccgcactgaacaaaattatcaaaagaagatgaatataagacaacgataccgattatttctgacgatcactgctgccatgtcttttagtggtgatatggcagcacagttctttaccctcagaccacagatagttacaaggcagaaagtgtctgtaaaacaaagagttacgacacaacaaaaggacactataaaggttcgtcatatggatatttcgttccagacaggaaacggcatggaagtgagtatcgaaaaggatgtaccactgtttgtcaacgtgaaggactccctgctttttggcttgatcagtcagcgtatgaatgtttgcttaccccttgacttcctgaaactcacttctgcctatggttatagaaaagaccccgtgagcaactgcactgtctttcataacggcatcgacctgcaatgcaaccatgcccatgtctatgctatgctgcacggtatcatcaagaaagtacactatgggaacaaaggctacggcaactatatcgtgttggagcatggcatctttgaatgtctgtacggacaccttagcatgataaccgtccatgagggcgatgcggtgacggcaggaaccatcgtggcaatatcagggaatacaggtaaaactacaggaccacatctacacatcagactacgaaaggaagacagaagtgtgaaccctaaccacttcgtcgattatctcaatggctacatcactgaattacaagataaaatggcatatctccgtttcggcacaaggccagaccgagaactgaatatagaaaacttgatgactgtactccaacaatacggcgtaaaatttccacagattgtggtagcacaggccctgcttgaaacaggttacttcacttctagagcctgtcttgaaaacaacaacctctttgggttgcggcggccaagcaatggtggctactactctttcagctcatgggaagagagcgtgaaggcatacaaagactatgtgcagtacaaatataagggcggcaactactacgatttcctgaacaagataggttatgcggaagatggtgggtatatcagtaaggtgaggagcattgaaaagagtattttccttagaattattgctgtccggtaaaactttatcaaacaaaataatttagagggtgcgccataaatgaccatagtcaattatgacacaccctcttattttgacagtagtgatatagaacatacaaaacgtttccatatacaataatgtggtttttgaaatcaatagtcggtcaaaataaatataaatttacagaataagataattgtgcattatctacactaacatgcaaataattgccagatgcaccgggtaatacacataggcgccatactttgcatattgccctttaatgaatccccgttccccattgtaagtggctaacaaagccaagaccatcagataacctagcaatccatattctgtcatgatcggggtggtaaacaccgccatcaatggccatcgaccacgaaacaagtagaagaatacaataaggaacactccatgccactcataatcggtgtgtagacaagtcgcaaccaaggccaacaagcccacagcaaagcactgaagccaaggaaaaactttgaagctctcaacagccctcaccgccaagagtcccgacagcagggtaaagaatacgttatgtgtattgtcatgattgagcatccaccacggtatatccgacacaagagcaaaactgaaaagactcagcgcgtatttcctcacggaatgggtatgcacatacccctccaccagcagaaatgcgaagatgggaaaagccatcctacccaccgttcgcatggcatcgtaggcaatgcttttgtccatcagataacaggctatgtggtctaatgtcatagacaccaatgcaattaccttcaatgcgcttcctgacaaccctttaccttgaacgaggatcatgtcactttgttttcttttctttgcccaataactctgcgatcatcgcatccacctcgtcattgacacgcttgaagttacgacccagcatgatttccttctcacggttggaggcaaactgataaatctttggcaggtcggcatacagactttcctcctgtttgatttgttccatatcaaagtgggtcttacagaaatacttcgaggtcttgaactcctccgacttctctatgtcaaacccctgcatcatgctactttccgtcggagtaaagtcacgagctgactgaccagcgagccaaccagtcgccatgtccgctatcttggcagcagggactaggaagtccaaccgctccgagatagatgtggaaaccttctggtcattgatggtaatagacctggacgtctgcttcgctttaccgaacacatcattctgcgcccattccagcgtctccttgttgcgggcggcacccatgaaaatgttaccgcaagtggtaataatcttctgcatcccattcttgccatagtccgcctccagctgtggcaactcttgaaaaccaagcgtcactgctaccttgttgcttcgcgccgtaccgatcagtcggtcaatcttatgaaagtacaaggttggcaactcatccacgatgatggaaacagggatattccctctgctgttcacacgggtcacgagacggttgagcaccaacgcattcagtgcccccacaatctgctctttctccgggtcgttggcaatcacgagataggaagggctggcagggtctgaaatcttcaggtcgaagtcatcccccgtaaatatccagtaggcttccggtgaaaccaagcgagctgcattgacacggagcgtacccaccataccttcgagttggtccatcgctttgttggtataagcagactggaacggagccatgagcgagagtattttctgatcctgcatcaggatgtcaaatacgtcactgtactgcttacctaagaaggatagtacatgtggcatgtccgaatattctcctgtaatggtgtcaggctccactacctgcccctgctcatcctcataccaggacgaagtgatatgcactttctgtccgttacggctgatataagtgaagtcattcagatccacgaacatgccatcttcatccaccgacacatcgtggctcagctcatccacaaaatcaagaatcatgttaccgttcttatcgacagcccggtagtcatgccagttctttgtcatcagccttagtttcttccccttgtatttgatgtaacgagtgagtttcttgccgtccttgaaccccgtcgggtggaagttgacgaagaaatagatgatagccgaaaggaagttgatggccgagttctgaaaaaacgcctccgagccgcctttcttgtcgccccccttgttaagcgattcaagcaacgttgcagctgtctcagccgctgctgccaagtcaggaatatacttccgttgtatagggttgatacggttggaatactccacatcggtaaagttcacgatgtggaaaccacagttttccggcagcctgccaagtcttttgtttttgcagtactgatagaacagcgtctttcccaatgccgggaacttatagtcatacaccatcatagcaaatcccttggccgcatgctgacggataaatgggtcgatgatgccaaacgacttaccagaaccgggcgtacccagtacaatggtcccacggaacggattgatgatgttgatccatcccttgtgcatgcgccccttgaaatagtagatcatcgggatattgacagaataaggattctcattcagttcctccgactgctggaacgactcattctcaaagttgaaacggtcttcacccaatttgtaattgtagtagcgagagataccatctaacccctgatgcagaagcatcgttccgataatggaagtcatggcgtagagcacgcgattggtagggaagccaaatgaaactccgccccagacgcctttatgaagcatcatgcagagcgcgatgaacgtaatgccgatgccgatagggtaaagcaccattgtcttgacattgaacttcaatgccttctgtggacgtgtaccgatgcatgtcacaccaatacatatcagttcgatgagcttacacgatgctacattgttgaaaaccttgaagcgtgtgatgagttccaggataaatcccgtcacacggttgtccgccgtgatggggagattcatgatcagttctacaatcaagaaaaggtagatgcaactcctgaacgtgttgtacatctgttgctgttcccttgtctcttctactgccatgatgctacttttgagaattaagaaccgggaggaacgccattatctgttcaccaatgccatcggcatgaagaatatccttatagtcgatgttgagtgtgacgacacgaccagaaatttgttcctccgaaatctccagcttcagcaccttctcttcaggaaaagtcagcttgtcgagtaccagcacgttacgatatgccttcttaaagctcttggcactgttcagggaatagactggagtcagctcaattgtctgcgaattggtggccttcagctccttcttgtccgtgagtttgatgcgtacctcactgatgtcatacttgattttggtggcattgtagagtgaataatcgatgaagaaataatcaccaatgctgaaaatattgttcactcttgccctgatgccatactcatgggaacggatatgcttttgcggtttactggcaaagatagcccaggcgtaggctgccatttctttacgtggcatcgtcacgtcgggattctcatatcttcccatatccctggtcttgatgcggtagatagagttggctttcgctggtccggcagtataaaccacgttgagttgtacgatatgccgctcaccgataacggtaactgtacctaccaactcattgtcgtacattctcccagagggtttaatacgcacgatattgtccgtacactggttacctacaatcttgctcgtcgaaatgtccacgagcttgatattctctggcatcagcagatgcgttgtcacctcttcgttgacaaacaccacatccttgcgtctgttctcgtcaaagatgtagctgtccgtgggccttacgttgcggatatatctcaccgaaaccgagtctgcctcaatgttcttatacattttctgtgcctgaaggctgccacacaatcctatgagggcaaccatgataactaaaaactgcttcatattttctaatgtttgatgaattgttgaatgctaatcagcattggtattgaccagatagacgatggtgttgtacttgatccgtgccttgttctttctgatattggcagatacggcagaggttgctgactggtacatgttctgtagagcctgcagagccactgcttcagaactcagtccgccaccatacccaccgtcgaagttgatattgctctgcaaggcgttcgccttggcatccttcatcaagtcacggaatgccgattccggcacataaaagccctccatgccatcattgtcatagacggaaagtcccaccttgatgaacttatccttaaccaagatgctggtgatggaagccatgacacgctgctgaccgaatcccgtcaccgtaccgtagagataggtacccttcttcagttttgtccccttgagcgtcacatcatcgaggagtttgaagcggaggcgcgtaccctcgtgtgctttggtcgtcttgtctatcatggcgcgtatcaacggaacctccgccgtagactcggcactgacggtgttgaacttatccgcattaccctccattaccttcttgacaatagctggtttctctttgggcttacgattaggtgcattgaagggttgtgacacttttgattctttgccactttcatcctcatcgccgatgcccatccttctctccaaggatttttgccgggcaaggcttctcttctgaatcgcttccacctcccttgcatagtcatccatctcggcttgtcgggatctacggccgtagctgctgccagaaccgtatttggatgcaccgccgtaatttccaccctcataggcattgatgtgcttccgagactgttccagtcgttgttgcaaggcttccatgtccttctgccgctgtgcattgatagcattctgccggtctatatcgtccagctcatgctcttgataactgttgctgagcgagtcctgctgtggctggtcctcaccgatgccgttcactgccgatgccgcatcttcctcgttatagcgtttattcatctccgccatcttgtcccccatttcatcattggctgctgtgggcagcgaagcgttgatactgtccgtggcaacacccttcttggcatcgtcctgacctccgaacacacctatcagctcatagcctaagaacaagatgggcaggagaatggccaatggaaagatatacttgggctgttttaaatcgatgcgccaccaactcttgccctgtgacaagggcttcaccactggaggttctttcggacttgtcttttccctttcgtcggactcttccttattttcgccctgcgcttctgcattaggctccgtccgtgcagcgtccgacggatcatcctcctttctcagtccagctttaagcaagaatttcttaatcagttctttcatatcattaatgttttaagtttgtcactatcatttcgagctgcctatatttatagatgataagcgtggaatcctgatgcgtcttgataggaatacgcaccaaggaatccagttcccatttcagccgctgtcctcgcagagccagttgtccgacctctcgaacctgtacgttcttgccgttctgtatgctctgcagtccggcgaacataggctgcacattctctatctcccccacaatatccttgctgggttgcggagtatagagtgacacgactatccccaagcaaagcgaacagaccagcgcaccgatggtcatggccgccgtacgcttcgggtgtttcacagcccatgcgttggcagcatctatccgttcccgtatcttccattgcaaagagagcttccttacaaaggactccagcttccacttggtttcctgttcccatctggccttggcctctttcgcacgttttattttcttcttcatacctttagtagtctaagtctttgttctccaatgttctccagttggtaatcagcagaccgtgcggattgttccttgtccggggtacattctcaatgccgcccaccgtaataagagagcgtttcatgtcgcgtgaacgacgtttaataatctgcgtaccgtagtatttgaactttcgagtgtgttcgtccagcttgatggagtcacagatgatcatgcacacggccgaagaagagacgatgtccgagtaaaaaccgttttcctccatcgcctgtttctgctttagagccgtaccgtccgccatatacatggctttggacagtgtccatttgatatagtcgtcatcgggcggcagattgaagaaatactgatggaagagctggatgtgtgcttttgcctccatgacaaaattcgcctcttgcttactcctttcagcgaggaaaggaatgtcgccatcgaggacataaatctgattacgctcttccgttaccaacttggcacagtagaagatgcagcaggcacagaccaccgtactgccgatgatggtcagcagtacagttgtcagtgcgagccttgttttctgttccaaactttgtattaacatatcctgtcgtttttagtttattttcctctgttgtaagaatctctcatggagctgcccatcttcgatgccgccttgccagcagagctttctgtgaacatgtgtttggcctccttcgccatccccgaggcagcgcctcccatgactccagccatagtagccactccgccatcggaatagccacttgcgctgctcactgctcctgccataccagctgcgccaagatgcgccgcaccagagactgccgcacccgccattggtgtcgccactgaagcgatacccactccagtagaagcggcactgcccacagctccgcccacggctcctgctacgacacctccggctgcactgccagcacttgaactcacaccccctggaattagccatgatgccacttcagggacgaaacggatgatataggcacccaccagcatacccatagcatacatgcagttggagccgatgccctgaatgcccaaagcgcctatctgtccccaagagttcacctgcccctgcagaagcctgccataggcattgaggtcctcgccgaggttatacattaggatgaagtcaatatagtacaggcacatataggtgacaaatccccatagcgacaaggacagatatttgctgatccattgcgaccatgcactgctccatggcggtactatcgagagggcgaacatgatgggggcaaatgtggccagtatggccatgaaaatacgctgggctaccaagatgccataatacgacatctggaatatcagttcaccgatgaaacgtatcacgtcgtttatccattccgacacctttgtctcagcggctacggtggctcgctgcgcatagttgttgatggtcgtgcccagattttccatgttgtagatgagcttatcccaccaatgggcatcctccccgagggtctgtacctgcttcgctgtctcaatactgtcctgcacctggcggagtcgtttgagatagtccgactgcttctgtgcgactttgagttccagcgcagccacttccttgttcttgctgctcgccatctgtttggtggtcgcctccaacgctttgcccggtcgggtcagttcctgacagatccaagaactgtaagtgatgcagatggacagtcccacgatgcggagaagtttcattacgtccatcgccctacgtccaagcatcatcatccagcactcgtaggaacccacacaaagggcgaggcacaagcctatgacacgggcgtagcccacggtgttgcccagcaccgccgacttcggaaaagtctccatcgccaccagcagcttctcaaggctttggtcaatagagggcagtcccatggtgagtagctgacttgcaatattcatcaaaatatctgtaaccataattttatcgtttgtaatagttttgcgccatgcctacaagatgtgccacgcgactgacaatttcctccatctgtttcttatattgttggtaggctttctgccgtttggcgttttctagttcatatcccacacccgtccgatggatataggctatatcctggcaaatcatctcgttctgccgggtcagttcatcgacctgaaatttcagtttgccgctgctcctctgcatacagaagagcagtccgtcggaaatagatttctgcatgcgttcgaagtcggctttgaaggcggaataaaccagatcgacattcctgtcagcggcacgcgccacttcctccttgtagagttcttctatcttcgcacgttcatgctcggtttccttcatcttctgtcgttgcgtctcttcggcggtgatacgagtgggcatgatgcgtttcacgctggacttactttccttaaacctgactctccagccagatttgagaaatctccattgccagtaagcctctccaccgctatatttcttgtgtaataagtaataataccatgctggagcaaagtcccatggtccgttctccatcgacttccactgcttttccttctggtcatcgtaggtcggatgctgtgcaaatgcagacagtgaaagataaagtaatccagccgtgatgaatagaaattttctcatatactgttccatttgttaattactccttctgctattttgtccgtcacctcactgttgaggatgtcccaaatataatcgtatctgaccccgtcgacggtaatgatgctacaccagacgttggcaccatcgatgatacctctcatgttctctatggaagtcttcaactccatgataaggtgaagcttctcgtccatcgaggccttcattacgttgacaccgctggcggcaagcgatgcataaagggctttgatgtttttgatttctcttgcacaagccatgttcgcttctgtatagtaccatgccaccatcggcttcttggaggcatattgaaaagtggagcgtgtaaactgggagtactcctgtatcaggcgatacatgctgttgactgtcgaacccaatgcgctggctaagatgacgtaggaatagccattattcaatttactgtccaaggtcgttctgacatcattgaacttggtagcaccctttgtgatgatgctctgttcaccaaaactcgttgccacctttgccaaggccttgtcctcttcaccctttatgagtttatgcagactaataagggcttcaatggttaatggatccctcggcgtcggtataacatcggcaaagatgggaactgctaccatgaagcaccataacaacagcccatatctttttatattccatgcctttttcataagccaaacttctttagacatccaagccgttccaattatcaatcaacccgtcaacggagttttgagccgtgatataggcagcccacgactccacgtcaatggccatgagtacatccccccagttgttatcgaactggcacatcatcaccataacctccagcttatagtggatttcaagcagacgattgtagatcttgttggccatcgtcagccgctcatagcggttgagcaggttatatccgtcgtccttgccgtcatctttggccgtgtccaaaggattgcgtaccttgccgttgtttacaatatccacaaagtcgtgtaccagtccttgtgtctcggacacgagattggtcatctcattgaggcataccacatggttcttgcccggtgacttgccgagctgtttcagcacgatgggcacatccttgaagatgctggctgtgagcgagacgatttcaccgtagtatctgctttcttccccaaaaccagtgatgttctgcatggagagttggtaaagttctttgatgcttgccatcgtagcggtatatttcatcagtttctcttgcttggtattgatggaatccagacgcccgttgtgcctgtcctctatgagtttctgcgaagcagcattggacataacggcggccgtggttttcttgtctattaccactcgccatccagcccgaatgttcagcgaggcaaggagcatcgccagaacgaaaattaaccttaacttttccataagctcataaggttttgatgttcgttgacatgccgcgcaaaatcgagatatttgcttatccctgcctttctgcggtctttctctatctctgtgatggcacgttggatgttaccaccataatgcttcgtgtaaattttgagggcttccttttccgcccgttccgtggtgtaggcccagtaacattcaggcggttcttccacaccatacacatccgatacctgtccacggcaaatccatacctccttgaagtaattccggccctcgtggttgttaagactgttgatggtgaagatctgctgtcgttgaaccgctgtcagtccgaggatagccgcgatgtcatcgtaccgatccttgaatttggcctggtcaagcagaattttcacgtcgctgttgttgatgatagcctccttgacaatgggagaatcaatcacgtcgttcagttcctgtgtcactactccggcgatgccgtggaacttacgcaccgtcttgtagagatacttgatatattctgccatcgtaggcgaggcgatagctttccatgcctcttcgatgatgagagcctttcggcctttcttgatacgcatcttctggagaaacacatccatgatgatgagcaccacgatagggaacagcacagggtcatctttgatcttgtcaatctcaaagacaataaaccgttcatcgaagagtgactgttccagatcgttgttcagcgtgcactccagctcgccaccacggtagaactgttcgagaatggcagcaaagttgtcaatgtcgaaggctatcttcttttcggtcatcagctgtggaatacgttccagcgcatattcatagaaagtgttgaaggacagcttcctgaccgtcatcttacgtctgcgctgctccatcttctcgattttctgttcgatgcgcatgaggtagctgccttcgataacctcagccatgaggcgcatgagttgacggttggcagccaccttctcaccctccgtcgcagcctggtcattgaccagagcatgcagcttttctacctggcgctttgccttgatgtgatgcgcaacctcggcttcagaaaagatggtatctctgctttctgcatttacacttgcagaagtgtttccctgatatccctcaaaatcttgatagtagctatgctccaccttctcaccatacttctcatactcaccgttctttttatcctccagcaagagccggtggcgcaacctatctttttcttctgcggaaaaaccacggaaggggtggaagaaagcgtcataatactccacgatgacctgattgatgatagcatcttcaatctttgaaggcatctcgcttcccttgaagatgaggaagataagcgatttgagaaagttcttcttctccccgaagttctgtcggtattccgtcttggtaatcttaaacggattcatggagatgggatgctctttggagtaggtgatataggtgccaccgaagtagctgcatataccctcgtagctatctccagtatctaccatcaccacatccgtattctgctccagaagctggcgcaccacactattcatgtggaagctcttaccgctgccactgggtccgatacagaagaaattagcattgtcagtgtatttgtgtactccctccttgccggtaatgtctatcgccacaggcagtccctgcctgtctgtatagtaggttttgagcggtgtctcctcagaatgtttcagatgctccttaaagcataggcagagtgctgcgtccgacagcgtaagaaaaaggtcgtaatcaggattgaaggcatagccattgccaggaaagctgcacgtgaagagctccagctggttataagccgagcgagagggcatgatggcacagtcgtagagctttgtctcgatgtacgatgtaaccggtgttatcttgtcatgcggacaactgacgagaatattgaaattggcataaaccatcagtttgctatccacagccagtgtgtccaacagccgttctatatcttctttggcgatgcggttggatggatcgggcatggatccgtggcgcttcgccttgctttgcagcttgcgcataagtctgcgctgggcaggtatttgtatgacctgattgtagatgacgcagtcagtataaggtatctccgtcaggaaagagaagagatcggtggcaatgtaggtgccgttgatgttgaccgaaaggaacggcctcacgaagttgggcatattgatttcatctatatccaccaagggaaaagactttaccgtccggtcgcctatcttcaggttctcgtcagaacacttgaaattggtcatggagaatggaccctgcttgaactggaatgccataaagcggtgaagatactcgtctatctccgacttgctcagcttgcggtgagcgatacctttctcttgcagaatgtcagctaccttggctactttgacatggaagtcctcccatcgtttggcgtcgtatttcacgaaagcattgtgcgcacactcctgcgtaacgatgaggaatgtgcgtatgtcggtatattcccgtccctcgaagtagttaaagtagctttcggtcaggaactcctgttctccctccagctcatggtgatactcctgcttgcagaagatgtcttgtttttgtagggcatacccctcaccgagtgtctttataatgttggccagtacgtcctggaagaggcaatataggtcagcatcggtacaatattgctgcacgggattctcaatctcgaagagtacggacggatttcccttctgggaccagagcaccgtattgagcagtttcccgtccttatccctgatgtcttgcaactgggagaaaagtttatcgaaaggttttctttgctgtgccataaccgttagtgtttgaaaatcccgtgatagatgtaaatacccttattccgatgcttggcgtgaagcccatttcgctgccgtatgtagatagttgccagtccgacaagggcaaggacaatcatggcaataaagccagccagcttgcccaggatgatggaaaaaaggatgaaaccgagaaaggatacaccgatggcaatggcggcaaaggttaggaaacgccctctgatgcccatgaactccaacggtttctgtatgcctttgtatataggaaagaaatcttccataaaactttgaaatttggtaggagccagacgcatggttgcaggtccggctcccaccgattgattacttgaagaagagcggaagagcttccgacatggcgatgaaagccacacagccaccgatggtgagcatgatagtctttttcacgtcctggtcgccgttctgcatcttgaaatacacattgaacgctcctactaacacgatgacggctgcgatggccttcatcaggttggaaacaggggtctggtacgaagagatctccgtggtagctttggaaaatccgccagcacccttgctgttggccagcattgttccagtactcatggcgaacattcccacgcttactgctaatttcaaagactgacacttcgcaaagctccaagcacgtcccacgcattttactgtttgttttctcaattgcgacataatcgaatggattaaatttgaaattcaattccatgttaaagccgaaagtcaaacaagttaaagtgctaggtctaaatattaaagataaaaagttggtatgttttatggagaaaggtctcctctttctggatcaaactccttccatttggcaagcaagctgcccagttcgctgttctcaccgtctttcgacaggtcttccaccttgaccagcaggttgtttacttcaataccgccggtcatcaagagttttgctgtttgctttcgtttcagggcagctgtcttctgtttattgatgatggggcgagtgataaggataggcgtaaattcccttacttcatcggagatgtcaatggcttcctcctgtaccttatcgtcttcgctggcagcaagctttctgcctgccagcaggtcgtaggccaccgtacccaagtaatagcagaggtagcaagccacaataaaaccgaggaatatttgaaaactcatacgcaataggcattatgtgaacgatgggcattgaaccggcatggcaagatagacactcattggctgaaactgcaatcccagcttcagcccattgctctcacggattggtctgcgcttcagctgatcatcataatataaggtgttatggccaggaatgactaaatagccatacgatttcaggatgctcttcaagactacacgtttcttgttgcctaccaccttgatgtttgttttttgtggtagtccgaacaacacgcgggccttctcccgtttgatgatgctcttcctgctgcgcgaccgtatctgtcggatttcgtctgccgttctttcaaggtggtactttttaacgattcgtgaaaccgacctagtagatatacctgtaagcttggctatctcactataagagtgattgtaatataacttcctgaccgtatttgcctccgccatcgccttggtgacagggcgtttacgcaagcccaactcatgcaacttccgccgtaggcagctcagagaaatactcaaatgttctgctaaagcggtattgttcatccccttgtggtggtcgataaggaaatccaccatagatgcggtccagataatattttgcctatacatgattttgaaggttattgacaatataatcgttacggcgtagaaactctttgaggtagccactgttggtgccgataaaggcacggagggcggcattgatgatatcggtaaccgacatattgttgatattgcagagcttcaacagctccaccacctcgttgtctatctcgtagttcttgcgatcgtacttcttgacacggtagccgtattgttttgcatactgctggaagagctgccaactgtcatcagacttgtggatgttgggctgcactgtcttgggcgcagtttgcgaaggttgtggaacagatggttctttcacctcattaaacaccccgtctatatcgggtaggttaagctggtcgttggtaggcagcgtctgcgaatggagaatgtctactttcattttgtctgctctttaggtttgaatatctgttgatacataaagtcgaaggtaggtgatacgatgtccttttgtggtcccatcagttcgatggtgttgtatcgttgcatgtccgccttgacttctatgcgtggcgtaaccagaccgaagtggcgtagcttttcctccgttttatcccacaactccagttccgctttcttgccataccgtttgtcccatttattaaccacgaagacgaactggcacttcatgatgggcagcatacgttggagcttggcgatgaagccgatgaaagtagcggtggaattgatggaagttgcctcgaactgataggggcatacgatgtaatgactgagggcaaagataggcactagtccctgttgcgacaggttgccgggtgtgtccatcagtacgatgcctttgtaaccctcgcgcagactggtaagaaactccctgacgttattggtgtctttgatgtcgaaaggctgtacggtataaggcaaacgtacccctctatatttctctacatcctcctttcgtttggagtaaatggtctgctgtcggtcaaaatccacaacgagtacgctctctccctttgccgccaggtaatcggcgaacatggtgcagagcgtagtcttaccgacaccgcccttctgattggcaaaggtgatcatgatattgtctctcattgtcgaatttgttattagttgtgtgataataacaaactcctttttggtaggccggttatcaaatggagttgggccccagtagcattatttcgagaaataggtatcttgcgaattaagtaaatgaggaagatgctaaatcgtgaaatcattggcaaagataaaaaatggaaatgaaatttgcaagaggttattaactcgtcagcaagcacgataatgccgatattctggtgatggtttcaagccataataatatttatagtaaggtagtgatagtacgcacaacttattgggaatatggattataggttgcaatcctttttctttaacgtagtttaactacaggagatgaaaatatccgtgaagccctgctatgattctagttgttaacgatatcatgggataataccaaaaacattcttcttgtagtttataaaaagatgtagaaaagttaaatatgtatatagtgaacaataacagtattaaaaaattaccatatttgggaattttatcttatctttgcagcataaaggctaagatacatttcaccgtatgaatataatcttcaaggaagaagccttatctgagctgtatgaaacaggcaaaaccaaagacaagaaatacaagcagatatgtaagaataaacgtttggtagatggctacatccgggcagtaggaatcatttatgatgtagagtgtacagacgaactaaagaatttcagcttcttacactatgagaaattgagatatcagcagaaagagcctctaagctctgttcgacttgtaaacggtttggtagaacgcctgttgttcaaggagataaaggatggcatcgaagtagaactaattgaaattgatagtacacattatggcaacaagaagtaacagattggttcctgttagggcaatccacccaggagaaatcttgcgtgaagagttgcgggaacgtggtatcaagcaaaaggactttgcaaagcagataggtatgcaagctacccatctgagtgagtttattcgtggcaaacgcaatctgaacgacgatctggccatgaagctggaaaaccatttagggattccctataaaacctggatgagcttgcacaatggttatatgtatgacagcaaagctgtcagtatgaaacaatcggaagaacaaaatgcacgttcgtttgaggacgcatgtgctcgtatgttcaatcttaaacttctttataagaaattgaatttagctgttcttcccctccttgaacgggtgaaagaaataaaatcgcttttctcctttgacctgctgtcatctgcagagatgagtaagcaagtagcaggattatataagcacagcgacaaggttcagattgacgaaaagaatatgcagacttggcttctgctgagctggctgacaacttcacgtgaaaaagtagaaaggacttatatacatggcaatggaataaaggccgccgatacaatcgcgaaattggctaatgagcggaaacttacagccaaggctatcaaggattgtctatatcaaaacggtataggttatgttgtagtggaaaagttggataaagcccctgttgatgctttctctacttatgtaaaccaacaccctatagtgacggttacttatcggtataatgatattgataaattagcatttgatgttcttcatgaattgtgtcatatcgaaaagcacttctcagaagagcacacatcgttcatctctatcgaaggaactatctactcaaaagatccaagggaaaaagaggcaaacgactttgctaaagagcatttaattccatgtgaaatttggaataaaatactttcaggtaaaagcagtagcctatcgccgcacattgtagtgaaggctattgcaaaagaagctgaaaagtatggaattagtccgactatagcagtttcaaggtataaacatgataccaactggtatcagacctcggcttacaagtcatctaaaatttattgatagaatatgagctgggcgacttgcccggctcttcttggtctatgggcttacaagtctatcgtttcaggcttcgttcgtcatcaacctcatagctatttttactatccacttcccattctgcatttcgttcggaagccgatgtctggtatgaaagaatatttttcaggatgctattaggaagatgagtgtcgtggataggcataggttggagtacttgcagagctgggagcaaggctttgaagttaataccttctgaagccaagttaaaaatgcacttgtgcgagaaatcgacacaatagtattcgtcaccttgtctgaaaatggcaagatgattttcttttaatgctgcccacaagtcttgcttctcggttgatgcagccagattgttcagcacctctacggcaaagccattgttgggtttgctgtgaggatctatataaataaggtagggattttcaatcttccagatacgacagagtatatcacgctccacctcgttggtggggcaaaaggcctggacacagcgcaccataaagttgaattttaataccttttgcacactgtcgctcagggcgacctccctgccattgagcagcctgaaacggcctttggaaatgcgagtaccatactgtcgccataacattctgttgagttcataagcaatcatccggggattatcctccagcatggcatccacgtagagctctaccttattgattcgttccttttcgctcatgaagtgttgcagttgtttgatagagagcacactgcctcctttatacaccgcttgtttgtagtgatccactatcatgtaaccgtatggtttgtcctttgaaccaaagaagacgagcgatacaccaaacttcttttgtaagatgtctgacagttcactgcggctggcaaccatgttgcgatactttttcataacagcccccagttgcctacgacgtttgtaggttttcttttcatcaataacagagaattttgaggtcaaatcttccatttcgatttttgttcgtacccgtccgccacgtgcaatttcgaggttgccgtcacgctcaaaacattcatagccagatgcctccatgatggctttgaattgtgtatgcgaattgaaattgtaaccaagagcctccttcaaaaacaaactagcacgcaattcctcatcttcgccaacaattttgttgatggcctcctgcgagcggatgcgctcgtggttgtggtctattttctggccattgggattcacccggctggtgatgatgtgcaagtgattgttgtcggtgtcattgtgcgcatagataagaagcggctgcccctcatcatcatagtccatttcgtgaagatactggtgggcaatatccaaaagctgctcttgagaatattcatgtccccggcaggagatagccacatggaactgcgccttgcggatatgctcgtttcttgccgaataatcaatcaggtattgttgcagctgttcgggagtgtagccatcagcagctcccacataaccgaagttcttcatttcaaggagtactgcttggcctttggccacctttcgctcgttgtactcgacggcatggaatgttgtgctggagggtagtatggttgctatcattgttttcttgtgtttttgcgttatcgtgagaagctggaaacggtaaatcggtatttaccgatgacggtttttcgctttatcgtgttaatcgtttgactatttgatgctgttcctgttttaccgctgttaagagcttttgcagctccatgatttgagggtaaagcactttctcaaaatagggaagtgtcagctcattggctatcgccagttcgttggcacgcttgaccacctgattgaagttgccgcccatccatgccaagtcctgctgatacttcttgtaaagagccgtcatctcgttgagtgcggctatcttccgctttgttcccgtgtcgtcaaattgtttgatggcatcccatatcatactgctgaccgtcttgtagttggccgctttctgcttaatcagttcggcatcctgtgctgaaatccttatccagagtcttttcgttttccgttccatattcttctgtttatattctgagttgcgaagaataattcccaacttgacagagttggcaattcacttttgtccgcacaaaagtacaacttgctacccaaattccgtaagggaaatgtagtcccgccacctgcttgtctgtaataaagttagcaagaaatgatgagttgcaatgtccctcgccccttttttcaataaaagagttttcgtgaaattggaatatcgaaatcccgatttgttgatattgggataaaccgaagtcacgagtccgttgcttcgagaaaagccgaaaaaccgaagccgtgaaatagtgacattacgagaatatataaccgcaaaaaaaactactgattatcaatgtttagatggtgtttttcttgcttttctcagttatttttcgtacctttagttggactaataatgttttaagatgcaagtgtttctcttcgtatatatcatggtcagggccatcttccagctgataggttgggtgattaaagcctttttgtatgtcttgtggatgatttttggtggcattgcctacctggtgaattatctgacggagcgcaaaacataaagccatgcctcgaaggagaggtatggctctatgcggtgtgtcaataaatcatctgattgctcgctgaagattctcagcgtgccgttctatcgtggtctttagtactttagcgtagatttgtgtagtccggatgttcttgtgtccgagcatacgcgatacattctcgataggtatgtcatgtgcgagagccaatgttgcgaatgagtgcctggcaacatgaaaagtcaacggcttgttcaacttcagggcagtctcgatgaggtgaagaaagtcatttgccttctgatttgaaatcttaggaaggacaaacttgtatttctttagcacttccatggctggtcccaggataggggtgaaaaacttcgatgcagtcttgatacggcttccatctatgtaatacaactttccctgctgttctgtcattttctcaaaatcaaaggcctgcacatcacaataggccagcccagtgtatgcagaaaagacgaacaggtctcgaaccttatctaatttttcgtccaactgaatctttctcaacttttgtagctcagcctctgtcagtggctctctttccttgcattctccacgtttgaatttgacctgggtatatggatctaccccaatcttaccctcaatatataataggtgagaatactttttcagatgtttgtgataggtatgtattccgacatctgatcgcgtaccgtcgtgtagccattcatcaaaagccaccagattgttgcttgtcaggtctgtcagcttctgaatcttgccaaatctcttcaatgcgtccagcgtgcattgcttgtgttttcgagtaccctcactaatatcttcagcctcgatatgctctttcatgtattctatgaggttgatggaaggttgaactttcaccttgtactttgtgggggctatcttcttaggagaggaaatgaaggtaggccgttgttctgcaccataataataagcatcgaaagtggcaattgtcatttcattgcccagtagctccatagctccgacaatctgttcacactttcttcgctcggctttcacctgtggtgaggaagcaaatttttcccacttttcagcagggaagtcacctaaagaaatgtacttgcgttcagttctgccaagatagatgcgtaattctaccttgccagagccacgtttctctacttgtttctttcggtcaaaaataaccgttacattctcttttagcataatttaactaattaaatcggctaaaggagtaattttggggtcatcatgtacaagtggtaacacatttttggggggtggtaacacatattggtaacacattttgttcccgatagggctttttaattcccgttacgtcctgttagccgcaggttcaacatttagcataacttcctctaaatgtgctatttagctaacaagtggcttgtataaacggaaaagaggacttcattgctgaaatcctcttttttagtactttgtgacccgcatggggctcgaacccatgaccccaacattaaaagtgttgtgctctaccaactgagctagcgagtctaaccatatagcttattttctttaagcgagtgcaaatgtacgaataaatcttggaagactgttatacaagtgcaacaaatattactattttgtctttttttaacaatcattgatcggttctgcgctgtgataaaacgacagtaagtggagccgtatttcttgttttaattagcagtatcacggaaggcaaacacgtgcagttgcacagaatccatataaataaggattgaataaatgctaaaattaggataattttgcaacgtttttaatggcaaaattaaatcaaagaatatgagattctacacaaattttacaagtatgttatttgttattttaatagcaatgccagtgatggcagaggagaaagataccattaaagttggagacgacttaggagaggtgtctgtcattgggttcaaacaagagagagcggctctgtcgcctgtgtcacaatcttctgtgggcaatctctacatccaaaacaatcaattggatggactacgagaactgagtggacgaatggcgaatttttacatgcccgactatggttcacgccaatattctcccatttacattcggggtataggttctaaaaccagcacgccttcggtgggtgtgtacgtcgacggaatgccatactttgaccggtctgtgttagatatggacttatttggaattagcaaggtagagattttgcgtggccctcaaggtacactctttggcagaaactctactgcgggtctcatcaacatttatactcattcgcctttggactatcaaaacaccatggcgaaaataagttatggctcttataacgacattcaagccatggcgtcaacgtatcagaagctttccaattctttcggtttttcagtggcaggcaactatcatcataatgacggttactttatgaacacctatctaaataaaaaagcggaccctatggataatgggacgataagaataggattggcttggaaaccatcacagcgttggttgatgcgatattctctcaacttagatgttatcgaccaaggcggcttcccttatgcaatctatgactccaaaaaagatgcactcaatgagattagttatgacgaggcatcaggttatcatcgatttgtgctttctacaggaatgaattggagatacgaaggagataaatttagtttcaatagtcaatcttcctttcaatacagtaaagacaaagtgtcaatggatcaagactttaccaagaaccatagtctctttgtgaggatgccgcaacatcaaaacatgttcagtcaggagtttacttttcgctcaaagaacgaccattggtaccattggatgactggcgtttttgcctttacacagacgaaaaacttcgcgacagccatcaactattttacgcctaaacacgccctccgtgccaaaggaacgaaagataatgagaacgaaatacccgttagtggacttgctgcctatcatgtatcgagctttgatttatacaaaggtttgtccgcatccttaggcattcgctatgattatgaaacttctaaggttgataatcatacctattggacgccagaaaataatccttcaggcaaatcaaagttattggttcagtacaatgaaaagatgtattccaatcaaattaccccacgatttacgcttaaacaacaatttacacccaatagaatggtttatctcacggttgcccgaggatacaaaccgggaggatttaatgcggcgaaagagagtgaaaacgaccgctcgtttgcgcctgaatacacctggaactatgaaattggcactaaactcaatatgttagacaaccgcctttctttagaagcaagtgcgttttatgtagactggaaagaccaacagctctctgtcattgtccctatggtaggggctgtgatacgcaacataggacactcggacagcaaaggatttgaggtttccctgtcaggtcaacccttaaaaaatctccttctttatgccaattatggatatacttatgttcggtttcttgctgccaatacaggaaagaagcgagattacacggggaacatcctgcctatggtgcctcgacataccgtctcgctcaatgctaattactccttataccagcttggcatgttggacagattgatgttcaatgcaaatctcacaggcatgggaaaaatctattggcatgaaaacaacgagaaatatcaacccttctacgccctccttaatttgaaggtagccgccaccaaaggacattttacatgggagctgtggacgaaaaacacgactgccaccaaatacatggcatactatttcgtgtcttcccaaaagatgggacagcccggaaagcctttctgtatcggtacttcattggtgtacacactcaaataagcgcaagcaaaggtgttgaaatcaatttagaaacgaacaattctacgtgtcaccttgtctgacactttacatcctgcatcacatttatgtcaactcaaaataagtcacatctattaggaacattttttagtttatacattgcccaagccgttcccatgagttttttctcaacggcattgcaggtgttgatgcgcgagcaggcattttcattgacaaccatcagtttgcttcagttgattaaggtgccatggattctcaaattcctttggtcgcctttggttgatagaaaatgtatgagcgtaaaagactacaagcggtggattatttcctccgaagttgtttacgctatcctgatacttggtgcaggattattaaacttagaaaccaacatccaactgattatcgtcttggtattcctttcactcatagcctctgccacacaggacattgcgaccgatgcattagctatattgtgtacgcacaaggaacaaaagagctttgtgaacggcatgcaatccatgggaagctttggcggtagtttgttgggcagtggggtgttgttaatcgttttgcatcattatggctggaacttggttacccaatgtctcagtatctttgtgcttttggcaatccttcctttaatcatgaataaaaagattgcgcttgttcgtcctaaagagaagagccaaagagcgaaatggaatgattttatttggtttttcaaccagcggaaagtttatccacagattatcttcttacttctttattatgccagcatcatgggattgctgtctgtggtccgaccttatatggtagatcttggttacaatatgaaagagattggtgtcctcaatggcattgtcggcatctcggcagccatggtggtatcttatcctgccagtatgctcatccggcgtttcggcatcgagcgcgtgaagattctctttgcggtattcatcctcatcgctacagtctatttcacaatgatttcattttcttcgccctcgaaagcatggctcattggaggcatcatgttcctttggatgtgctatggcatgggaactgtagtggtgtacacttcttccatgtttattgttcgccaaggtcgtgaaggaaccgatttcaccatccaaatcgttattactcatatcagtggtttgttaatggcgcttatcagcggcaatattgccgaccgcttgggatatcatgggctattctgtatagaggcggtcattgctgccgtgtctctgctctatgtgattgttttgttcaaacgttcaaaaaggagttcacttcctctcaaaaataaagatacgctatgaaaccaaccattctcattactgcccctcaacattattcttctcgcttagaggcttcgttcaagcgttatcaagaccaagtgagcgtcgttcacatcccgatggttcaatctactttcgctacgaacaacaagcagatgcaggagttgtgcacccatcttcatgagtatgattttgtggtttgcttgagtcgaaaagccattgatgccatgcattattatggacacaatcacgatgacctcacccaaactcaattcttggctattggaaaagacaacgactatcttcaagataaattaggagtcactcctcctttcattgccgaggagtccagtccgctcggcatagcccaagcgttagaggctcgtggcttcactaagggatgccgcattgctgctctctcgcctgccttcgtggatttggaagaacctcaaacggttcctgttttcatcaaacgactcaaggagttgaacattgatgtgcagcgcatcgatgcgtacgtcaatatggcttccgaactttcggagcgtaaaaaagcgtatgatttaatcatcgaccaacaaatttccaccgtagtatttaccagtggtagtgaggtggtggcattcaaagaaggtctcgaagaagtgtatggcaccgatgccgatagtgttctcgagttgattgatgttgcctgcatgggtccttatactgcagcgcaagcaaagctgataggcttgaaagtggataagattcccactaagtttcattcctttgacgacttaaccgcctatctcattgcctcgaaacaccttaatgcgcaggctgccttctcacttggtataggtggtcactaactttacactctcttcatttgtgcgcttctgaatccattcacgcatttgattattttggtcgtttgtcagtggtttcttcaatttgaattcagcaatggctaaaatgtaaggtttgtttgccgtgctatccaaattagcctcgacaacaggcgtcaatacaaaagactgcactccgggatataacaccaacatctcgttaaacatctctgtgctcaactttgaataagagttcactttcgccaacctttgctgcaagtctgtgatttcagctgcttgctgttgcagtaccttgatgctttgttcctgattcttcgaaattgttagtagagaaccttcttctggagcaaattcggaggattctgttccttgtatgacggcaagctttagatgttttagccgcgaatgttcgttcagctccttttgtgctttcttcttttgctcaggcgtaatctccttccctaatgccactatttgtaatacgctgtcgccatagagatgttgtgagaccacttgcgttcccttccagtttaagctgtgtcgaacaaagatattcaactgtctatcaaacaagctcgatcgcatcattcgaacagtcatataagctgctggtatcattgttaaaacggcaatggcgataatcatacgatgtacaaacttacaccgttgagggtccacaaagtgtttgcgtctgaaacgcaacaagaagacaccaaaggtggttgccacagcaatgaagacggtattgatgaagtacaataaagaagcaccagcaaaaaaggctaagttccccgtagcaataccatatcctgccgtacatagcggtggcatcaatgccgtagcaatcgccacaccgggaatcacattgcccttgtctttgacagaggcagccacaatacctgctgcaccaccaaagaaggcgatgagaacatcgtatatggtaggctccgtacgcgccaacaactctgattgtacaccttggtaaggtgataagaaaaagtaaatggttgcggtgataataccaataatggtcgccaccatatagttttttacggctcgtctcaacagtggtaagtcatcaatgcccaccgctaatcccatacccaagatgggtcccatgagtggtgaaatgagcattgctccgataataaccgccgtagaattgatattcagtcctaaagaagcaataaacacggcacatattagaatccagaggttagctcccttaaaggttactcccgatgttatatcttttacaacatcctcttccttctcacgattctccgacatatcgaaatactgtctcaaatatgctttcaacgaaatcttttccattttgtataatatctcgcagctaaaagattgttctatcttgtgaagtacttctgctcccgtaagcattgagcgcattgagcgtcaatcctttcttaccaaaagcgcatctgcctttgtctaattgtgatgttgcaaagataacaaattcaacggaactcaccaacaaaccgtttcattaactcctcttctgttcaccgtcctttttatcgtagggtaatgttgtcgaagcagaagaacattattgtttttggcagcaagtgactttttgttaataaatgagtcctacggttattatctataccatgctctttgtgcaaataacttcaatgaaatgggggtgtaattattgtcaaaatatttaacaagcatgcgtttataattcgaatatttgcaaccaactttactttcggtcgcaaatacgcgagttatgcgatagttctgtaacacgttgttagttaggtgattatgcgaaatcgaacgcacgaaacctcattcttgtcccttttttgttcccaaaaagcatcaagaaacggcgttgtaacaatgctttagtgcctcaatagtaacttagtaagggtgttattcacatgtaatagttgccttaactcaatgcttcagcgagccaacagcacttttttcatccaaaaatgccgtttagactgcttttttcactcttgtctttttctatttcgcaatttttcaattgcggttttattgtcatttatattgacaaaaacagaaagtagaagattctgcatcgcaagcattttgtatctttcgttgctcaacactttttttagtttatctcctctgtaaacattatgagcattgaggtaggagagcatccctattttgaaatatcctctcaacagcttttgcggtcatcgtcaaagaccttgctctgtgaaaaactttgtacttacacgagaaattcgttaatggggaataaaagataaattataaaaaataatagtaattgataagtatttgaaataattactgtatctttgcagtattcaaaagtagaaaactacaatgtatataatttgatgatatgaaaatcgagttacggtgaggaattgctgttatttcgataagtactattttatacaaaaacattaatttacaaaaaacaacattatggcttacgtaattggaaatgactgcattgcatgcggtacatgtattgatgaatgcccagtaggagcaatctctgaaggtgaaatttattctatcaatcctgacacttgcaccgagtgtggtacatgtgcagaagtttgcccaagtgaggcaatctctttacctgagtaaaggacagcatttataagaacggtaaacgtctgtgttaggtgactcatttcgatttgatatcctaacaatagcagaatgatttgtaacgagacactttgaaatgatcgagtgtctcgttttatgtttggtcatcgtgacaaattcagaacggagaacatcatggctcgtttgttcaatcataagtttaccttgatacatacgcaatattctgccaagttgtcacatacgtatataaaataacgagggtgtatccgtttatatttgacacaccctcgttatttggtttcttatttctcttttacttcattcctaaagcttgtttagcgacctcattgttaggatcaagttcaagaacctttttccaataagagttagccgtagctttattatcctgtaacagatagtaatatcctaagtatctataagcttcaatcaatctggtgttatcgacatcatcacgacttgccttctcgcttagcgacttggctaatgcctcatagaaaggcttggctaatccttgctttgtttcaggatccaagttagagttaacacgtgcacgcaggaagttcgcaaaatcgatgtttgcagggaatttctcacctaattgtttatacacctcatcagctttgagataagtagctttttgttcttctcctgtttgactggctgccatggtcgtgtagatggaacctaatccagctaagtctgtagcggaaggcttttggacttttgccaaataatcttcataatatttgatggcattagcaaagtcgcctttacccaagtaagcatcagagagccctttcttattgttatttaagagttcggcattctctttatttgcatctaatgccttctcgaacatcttgatagcgttgtcgtattgcttatcacctaaatatgcttgaccataataggtataatcatatccagagattaccgcactatcagaagcgttgaataatcgatcggcatatttaagtgcgtcttgaatttgaccttcgtctgtgtaattgtagaatgcaattctgttccatgcagcgtaacgaggattcttactcagtccatacaaagccatatccaaactcttcttacgcttttgagaaagatagcctgccatagcataattcgtaatgtctacattttcgagttttgacttatctactttttcgtaatattgcatgctcttatccagcatgtttgaattgtagtaaattcttgcagccaatgcatcaacagcaatgtcaggtcgttgaatgcgcaaatcattcaaattcgatactgcttcctctgggcttctaccacgaagaatgtttgcgtatttgaaatatgcatctggattttttggatcaaagtatttagcttgttggtaccaacctgctgcagcaccaccatcatctttcaacacttcaacgtcacctgccaagatataggctggcgcatatttcttatcacgttccatagcaaggttggcatacttcatagccatttcagtattcttctgatctaagaatgcccttcctattccaacaagcacagctggattctttttgtttgccttgtaaataggttttaatgccttttcaacatcgttctttgttgatttgataatctccgttgcttgtttgatggcaacttggtcttcgctttgtgctatcactggagccgacatactcatgagtaggactcctgctaatacgtatttaattttcttcataatcgttttgtttttgttttgtttttttgcgactctgaaatctgttgtggttattcattagaaacacgtacatttcttacagtcagatttccgtacgcaggcaacaagccagtctttaaaataatcttttgtcctttgtcttgtgatataatgaagttagaaaaacctgtgggtaatcccatatgggtgtcgttaagtaatatatacaaagttcgtgccaaagggtaactcccattgaatatataatattggtacggtttccaactgttctgtacatttgcgactggaacagaagatactgccattgggcggatttcttttttgaaagtcaagttggttgtgtcacgtttgtcgtttaaccagttgcttccaataattccgatagcacctttgttttcttctacatacttaattacttcagctgtcttcttaactgctgctacattcttatttagaattggtttccctcccaaaatagaatcttctacgaagtgaaccgctgaagagtttggattatcaaatactatagtgatttctcctattttagatttcggatagatttgatcccaatgtgtaatttttccgttgaggatatcctttatgttgtcaacactgatacaggaatcagtgttgctgatgttctgaattaatgcaagtccgtcgtatgcgaacctgactgagcgaggaaattgttttcttgcttttagactttcaagttcctctttcttaaaatcacgcgaggtaatggccatccaaacctctcctttcagtagcttgttgatggcttctgactcatttgtatagatgggagtcagcttggcatctgggtaagtaaattcaaagagctcgcgttcctcttctattactggactaaaactttcgtcagaagcaaaaatgattgctcctgacgaataagtgtctgttctcccatcttttggcttcttatttttacaagaagccaaaagacaggtgattagtgttaatcctacaagtgtgtaagatatatttctcttcatgttattgtaatttgaatgaaacaggtacgttatatttcacacgtacagctgaaccattttgcttaccaggaatccaagcaggcatgcttcttactacacgagcagcctccttatccaatgaggggtctacagaacgaactactttcacgtccgtgatatgtccgtctctctctacaacgaaagacacaacgacacgtccctgaacaccattctcttgtgctactacagggtatttaacgttttcgctcaagtacttcatcagtgcagatggaccaccagggaatgatggcatctgttctactacgtcgaagaccttattttctacttctggtttaggctctggttgagccactgcttctttcagtttcaatacttcaccacccttgtcatcgttaccttttacatcaatggcaccgatggcagttttggaactcatcaaatcgtcttgagttttcaattcttcttcaggttttacttcgttatctttcttgataacaggtgcagtaaacttgatagaactttttactcgctcaactaccttttcaggttctacttcaactttcttggtttgctttacttcagcctttttcttgggttgttcaagcttagaaagttctacaacctctgtcattgctgctctcctttttgcttctgcgtctgctgcctttttaatagtaagtccaacttggcagagcaaaactaatacgactacagcaatgatagagataacatttctcttacctgtgccttttcttagctgataggcaccgtaagactggttgcgtccggcaaaaacgatgtcggtccaatcaccagaaatcaaatctatttttgacattgttactcttttttaatggttaatacgatatcctcttattcgacagctttcgctttcaacaacttttcgtcgtcttttgaaatcttatcgaggacatacttaccaatgctgcaaatctgcatctcgtcgagcgcatctactacattcttataacttgctttatctgttgctttgatgatgactgtcatggtctgaattttctgaccattgatttcacctctctttatctgagataattctttgctatatacagaatcgggcatttgatctttcttcaagtcaagttcagcctttgctttcatcacttccaatactggttgcgtattatcttctgtggtgtgctgtatcaatacttttctgattccatctttaccccatgtagtttctttaagggttgatggatcatcgtatttcggtagccctgccacgtagtagattttgttgtttccagcaacatagatggtaatagtgtaagaagccttggtaaccgacttgtcttgctctgtcatgttcttatcgttacttggcatactcagctccatggtttgtggtttggccaaagaagtacagagcatgaagaacgtaataagaagcatcatcatgtccaccataggtgtgaagtctacgcggacattaatcttcttctgtttacttgtatcttttgaatttgccatacttatttatcctccccagtctttaatgaagtgatgagataataacggttttggttcatgtcttgaagttcggacattagcttcttgacgttagcataaggcgtatcggcatcagctttaatcgcaattttgatatcctcattcacattcaaggcttcggttacccaaagttggaattcactcttacctccatcaatagaatcaagaggaacacccgcttcagcacccgtaattacttcggtcattttctcattaggaagacctaagtagccttttaagctattcaatggcacaccccacatagggtctgcttggaacttcatcatttcttgatttgtcagtccgatactgtttgtctcgttcattccttgaataagactcaacaggtcgttctgattatccatactcataaacaccttgccagttttatcgacaacgatgtttagcacgtcgttttctggaaccttgatctccgagacagacgatggctgatttactttcactggttcgttcttaacgaatgttgaagtcaacataaagaacgtcagcaagagcaccatcacgtctgacataggagtcatgtcaatccagatgtcatgtttcttaacttttaacttacccataactgaataatttttaaggggttagcaaaaattaagcttctggatgcttttcttcgaatgtgtgagctattgtataaccaatctcgtccattgcaaatgttaacttatcaatcttgttggtaaagtagttgtaagaaacaacagatacccaagatgtagcaataccagatgctgtatttaccaatgcctctgaaataccagtagaaagcgccatagagtcagcaccaccaccagcagccaaagctgcgaacgaacgaatcataccaagcacagttccgaacaaagcagtcagagtacctaatgttacgacagttgcaatgataggcaagttcattgtcatggttggcatttccaatgctgttgcctcatcgtgtgagttctggatagtattgattttctctttcagtttgatagaagagttttccatctctctgtaagatttcaagtcagccaatactacattagctactgaacctctttgcttgtggcaaagttcttctgctttagcgatatcaccatttctgagagctgcttttacgttttctgtaaatttagttacgctacctttaccagagcaagcactgattgcaagtaaacgctcaacagacattgcgataacggtacacaataaaccaaagataataggcacaacccatcctcctttgtaaactgtacccaacatgttcaatgggtgtcctgcacggtcaccgttagcgaagttggcagggtcaccaaggataaagttgtagaaagcccatcctacaatgaaggctaaaatgatgataataaacgcatgtctaacgccctgaaatccttgtgacttcttctgaggggctgcttttgttgttgccataatttgaaattttaatttttggttattaataatttaagttgttatagttcttttgtttttctggaagtccatgtaaatttgaattttcttgtggactttgttcttaatcaacaacgcaaagatatataaattatatataaattcttgttgaattaagaagttttaacgagtattcttttttgatgatagcgctttttaatgctagctttgtcgttttattgtagctgctcaagcgcattttttattcttcgaaaagcttcttgaatattctcgtcgcttgttgcatagctcattctcaagcagttggactctccgaacgcatctccacctacggttgcaacatgcgctttttctaataggtacatcgataaatcggttgaatttttgatgtaatagccatctgtagatttgccaaagaaatagttgcatttggggaagagatagaaagctccctttggttcgatgacttccagtccatgaatatccttagctaattttacgatgagatctcttctacgttgaaaggcttgtcgcatttcttctacacacgcttgactctgcgtataagcagcgattgctgctctttgactgatggaacagggtccactggtgtattggccttgcaatttattacatcccttgacaatccactcaggtgcagcaatatatccaatcctccatccagtcatagcgtaagctttcgaaattccatttacaatgatggtgcgctctttcattcctgggaattgcgcaatactctcatgttttcccacataattaatatgctcatatatttcgtcagcaatcacatacaagtcttcatgctttagaattacatgtgccaaaccttcgagttccgattgagaatagacacttcctgttggattactgggagagcaaaggattatcaccttcgtcttaggagtaattgctgcctctaattgtgtgggcgagattttaaactcttgggcaaaaccagttttcacaatggtaggatttcctcccgctaatttgaccatctgcggatagcttacccagtagggtgcaggaataattacttcttctccctcatcaacaagtgccataagcgtattgcatacactctgcttggcaccattggacaccaatatctcagctacttcatagtccagttgattctcccgatgtaacttgtctacaatagccttgcgcaaatctgggtatcctggaacaggtgagtattttgaatagttttcgtcaattgcttcttttgcagctgttttaatatggtcgggcgtgttgaagtctggttctccaacgctcaggttaatcacgtcaattccttgcgctttcatctcactgctcttttgtgacattgcgagcgttgctgatggtgctaaacggttgagacgttctgaaagctttgccatattattttgctttttattgagttgatgtatgcaaaagtaatatttttattcttttatctgaaataaaagtgacattatttcatttattgttttacaattgtaatattttcacactatttaatgtgcaatgtgtgtcccattctgttctgtttggttttcaaatagcgttcattatatttattaggtgtagtttcgataggtacaatttctgtaatttccagtccgtaggcttccaatcctactcgtttcacgggattatttgtcaataatcgcatctttcttacgcccaaatgacgcagcatctgtgcgccgcaaccatagtcacgttcatctggtttgaagcctaagtggatgtttgcgtccactgtatcgtacccttcttcttgcaatttgtaagcggcaatcttattcatcaacccgatgcctctgccttcttgttgcatatagatgacaacgcctttcccctctttttcaatcagttgcatggatttgtgcagttgttctccacagtcacagcgttgacttccaaagatatcgccagtagcgcatgaggaatgtacacgaaccaagatgggttcgtctggactccatgttccttttaccaaagccatgtgttcgagtccgttgctttgttgacggaaggggataaggtggaaagagccatattgggtaggcatttctacctcttctccaacatctataatagattctttttgaagtcgataggcaattaagtcaccaatagatatgattttcattccccattgtttcgccaacttctgcaattcgggcatacgagccatggtgccatcttcattcataatttccattaaagcgcctacgggatacaagcctgccagtctacataggtctatggctgcttcggtatgtccacttcgtctcaatacaccgttgtcttgtgcatagagagggttgatatgtccaggacgtccaaaagtttgtggagttgattttgggtctgccagtgctttaatggtggcagctctatcatgtgccgatacgcccgttgtgcatccttccagtttgtcaatggtaacagtaaatggggtgcccagcacagaagtattatcgactacctgtcgcggcaagtctaactcttcacagcgagagagcgtaatgggcgcacataacacacctctggcattcttcagcatgaagttcaccttttctggagtaatcatttctgctgccataatgagatcaccttcgttttctctatcttcatcgtcaacaactatgacgaatttgccttccttaaaatctttgatagcttcttcaatcgtagctaatttgaagttttccatatcgggtatatattatgattaattatttcttttgtaacattctgtcaatactgtctatcatgcgattgtttgtttgtattatctgttttagatctcgcatgagggtaagtctgaaccgccacattcttagatagaagaacaatcccaatggtacgatcactgctgacaacacattgagccattgacggtcaaagggacgtgtgtgggcttttgtcatcaatatgggatagttgttcagttcgttcagtatatacttgtctcgggtattgctcaaatcctctataatgttctccaacaattcgctcaagtgttcaatctcatgatcgggttcgtacttaaagaacaccttttgcacatttggcgctgttcgtagcttgtgctggctcacatagttttcaatagcctgagtcatcatttgcagttgattcctcgcagctgtatagtcggggtcatgaataattacttccttaccgctgatgtgacgcttggttttaattccaaaggctttccttagtacactcttccatgtgtcaatattcagtaccatggagtcgttgttcgctttgtaggtaacgaaagctgctaaaggaatgagtaccgcaggtgccaatcctttgccaaaactcacagtccatataccacttcgagccatttggtatcctgtgtgttcaaaaatataatatatgataaagaccaatacggagatgatgataggaaaacctaatcctccttttctgataatagcacccaagggagctccgataaagaagaagatgagacacgttagtgccaacgtaaacttaccaatcatttctatgcgatgttctcgcagcatcttatctccgtcactggtaatcatgctttggaagtttaactcgctgatttcggactgaatattactcagtgccatattcatcacatttatcttctgatcgttagaaagcttattatatatggtgtcgaatacaaatgttttcgctaatcctgctcgaactgcttttacggagtctcgtttatcaatagaaggaatgtagtaaaacatgcgttgggtttctttatagatgctccgcccaacactgtcgtaaacgccgttcagtgaatcaatatcagcaacgagttgcgtaagacttttcgagcgtgcatctccagagagagcggcaacatccgtcaaattgaaccctccatcatagtcaagaacaatctttttactggcaaaagtttctctgcgataaggtatggcagcactaccacccaattcttgcgattgcatattttcgaaccattcgccactccaaaggcttaacagcaaatgtttcttgtcggctgtagattggagcatgccagaatctgccagtataatggcttggtcttcatagcttcctgtcattctataaatcatgatgccgtagagcttgccagtttcaacgtctttcttttgtacatacaggttgctgttaggaataccatcgtaaaagataccctctggaatttccaactccggactcttctgtttcatagatagtatgagttgggcgagcttcatattggctttaggtcctacataattctgaaagtagaaggaactgaaactgataaagatagtcagaaagatgagtggctgaaatgttctgaacatcgagatgcccgacgatttgatagctgtcaattcgctgttctctcctaagtttccaaaggtgatgagtgaggataatagtacagcaagcggtaaggcttgaggaacaaggaagagtcccatgtaccaaaagaattgtgccaagatttccatggacaatcctttgccgatcagatcatcgacccaacgccataggaattgcatcatcagcacaaattgacagatgaaaaatgtgccagcgaacaataatccaaactgcttggctgtaaatatatctaatttcttaattcgaaacatgtagacttctcattttgtacgagtgtacatacaaaatgcaaaattagtacaaaaaaacaagaaaaggctctatttgtaattttttatattccgtaatcgccgttcgtttctttcatctcccttgtatataaggtgttagaaagcaaatctccatgagggcttgtgcaagacctctgcgccctaaagcccactgaattgatgtaatttgtccagattatcagcccataagtcttccatggtatcaatgtcgtcaggctccgcaaagtcggtaatggacaagacataattgtcggaaatgttacttttctccatgcgaagttccaagaaagcattgggatcttcttcgtctgtccacttcaaacggatatagtgatatttcactttcttggcaatagtcgccatcctgctatcatggctgctctgtaagtctccccaaatgaagtgtagctttttgccttcttcctgtatctcatcggctatccagcgtgacagtttgtcggtatcgctgatgatgctccatattctgttttttgaattggactgcagttctctctcaattaggacttgttgttttgacatttttcgttgctttatagataaaaagttcacttggtacaaatatactaaaataatttgggataaaataaaaacttattttttttgtgagattaaaaagattgtattatctttgcagccgaattgaaaagacatggcgggatagctcagctggttagagcgcatgattcataatcatgaggtcaccggttcaatcccggttcccgctaccaagtcacaaaatttatcgtcagaggtgttgcaacaatgttgtgaacacctttattttttctacactcgtcttgtcttcttgccacgaacatgtgtgttgcttgcactcattttatttgtttttttttgtacttttccatgattttgagcctatgacgtatttttgacctgctcaaaacagcttgctaattgtaatgttcgatggctactttttatggcatgaaaagactcgtatatttccagaaaatgtaaatataatatcataaaaaacgccttcttaaaatctttaaaatagaaaattttagtcctttgaaaaggcacttcaaagggtgaatttggcgaaaaatagtccttttcagcattactatcatgctataagtggcttgatccattgacttaatcggcttaaaacaaacagttagtgaggcaaagttaatgtaacaagaggcttatctccatgacttaatacgactaagtaatgcttttagtgtctttcttgttgtgatttttaagtaggatttctataagtcgttgggattcagaaatttgttttccttgctcatttctcgcgtatttggaggcgatggacgttgtcgtggaaaatatttgagttttgaaagggcatttgtccgtatttttcatttttttttctcctgctttttttcacaatagcgttgattattttttcttatgaaacaatgcagtctggatgtttcatctttagcctcgttgtcatgctactacttgcttttcttgtaaaaagtacttaatagtttgaaaaatataaaaaagaaagatttattttcgaatattatacgtatatttaccattcataagacttgcagacgagtcatgttatgctcatgatttttcgagacatttacaagcattttttttcaactaataatatcaattatgcatcaccattttaagaaatcaattttaagaattggaatgttatgtgcagctgtgtgcgttggcacgctgatgagctgtaacgacaagaaaggagccgatttggaaaacaacccattgatgaccgagagcacactaccttttggtgctccagactttagtaagattaaggcagaacactacttacctgccatgaaagctggtattgaagagcagcgcaaagcaattaacagcattgtggagaataaggatagtgccacatttgagaacactatcttggcatacgaaaagagcggtgttcttttagatcgtgtgacgagtatcttcttcgctttgacaagtgctgacaaaacgcccgaaatagaaaaagcggaagacgaagcaaccccattgttgacagcttttgaaaatgaagtctcattcaatcagcccttctttgagcgcgttaaatatgtgtacgatcacgaatacaaccagctgaagggtgaagataaaaaacttttagaagaaacctacaaaggttttgtacgttcaggagctctcctgcctgctgataagaagaagcgaatggaggaaatcaacaaccgtatcgcaaaacttcagcaagattttggaaatatgttgcccaagtctaccaatgaggcagcagtctgggtagataagaaggaagacttagcaggattgagtgaagccgacattgcgcaatgcaaaaaagatgcagaaagtcgtgataagaaatctccttattgtattgtgatcaccaacactacgcaacagcctatcttgaccaatcttgaaaatcgcgcattacgtgaaaaggtgtataacgcctctatccatcgtgcggacggtacgaacgacttcaataccttgccgttagttgtcgaaattgcaaagttgcgtgctgaaaaggctgaactaatgggttataagaactatgcagcctattctttagacaatactatggcaaagaatacggctcaagtagatgcgtttttaaaacaactgattagtgcttatacgccaaaggcagatgaagagacgaaagcgattgaggactatgcccgcaagacacaaggcaccgactttcaattgcagccttatgatagattcttttactctgctaagatgaagaaagagaagtttaatttctcggaagatgaagtgaaaccttactttaacatcgatagcgtattagtaaatggggtgttctatgccgctcatcgcgtctacggcatctctttcaaagagcgtacagatttgcctacctatcacaaggacatgaaggtttttgatgtgcttgacaaagatggaaagcaacttgcccttttctatgttgactacttccgccgaccaaccaagcgaggaggagcatggatgagttcatttgcaaaacagagtaaattgagaaatcagttacctattatatataatgtgtgtaattttgctaaagctcccgaaggaaaaccaaccttgcttagctgggacgaagtaacgacaatgttccatgagtttggacatgccttacatggaatgttatccaactgtgagtataacacgctgagtggcactgctgtgacacgtgacttcgtggagatgccttcacaatttaatgagttttttgcggtggttcctgaggtttttgccaactacgcaaaacattatcaaactcaacagcctatgcctaaagagctgaaagagaagatgctcaactctattacttttcattcggcatacgcattaggagaaaacttagccgcaacctctttggatttggcatggcatcagttagcttccaatcagattccaactgccgacaaggctttggcgtttgaaacaaaggctttaactgatataggtttgttgaatccgcagatacctcctcgttattcaacttcctacttcaaccatgtatggggtggcggctatgcagctggctactatagttacctgtggtctgaagtcttagcagctaatattgcagattactttgagtcgcatggtgcattgaaaccagaagtaggtcaagctttccgtgacaaagtgttgagcagaggtaacacaggcgacttgatgcagatgtttagtgactttactggactgaaagctccagacgcaaaagcattgctcaaggcaagaggtttgtaacgattaaagttgatatgataaaaatgaggtgtgttccagaaaagaatacacctcatttttattggtacgatgaatggcttagtctaactcttcttgtgaatcgccttcttaatagaagattttgcttgtagccatttgagttctgtgttgatggatacttcaaaaatcaatgttacttcttctttttctggaagtgatagccaagaccgagcattaaatgattaggagtttggaagttgtaaagactgtatccgatgtttagaaacagtctgttcgtgatattagtcttgagagcaagaacttgataccatccatttagttcgcctttcgcattgataatatttctaccgatacctgcttgaatggtgaaatacggcataacaaattcgactcttcctgaaagtcctaaagcgatttgctttgtaaatgttggttgcgccaagtgttcaaaatcattagctggctgaccagtctcaacgatataatcttctatatataaatttgcactgctgtcatacaccccatcgagcgaaattcccacattcaaccacggatttagatgatatagtggtgtgaaagaaaagcctcccacttgatatgttttgggtagagcaactgctttatctcccagcatcaacccttttttgcgccatgctccatacaacatgaagtcataggagatatgtctttggaaggtagggcgtggtatgagggtggctgactcttcagttgggcggtgaatataataggctaaactgattctaccgcctgcaatatttaagccaccgttaggtatcgtggtgtttccattcgagaagtgactcaaagagagtcctgcattaaggtcgaattgtttagataattgccatttcaaataaaggtctgcgttcagataggcagtaatttttgagccaataactcgattttcaggattgtctgtttcatggtaaggatgccacccagtcgtgagaccaaagttccattcatagtttaacgataaggcgtttgtcagttgtttaactttagcaccctgaaaaataaaaacagaaagtggatttcctaattgcggattgaaattatgatatgccaccccgataccttggtacacgcctttatacatctgtgcttgctgacttgttgttgggggctgaaacgcatacttcaagcgggtggtgaaagcgtggttcatggttcgcttttctatattatcccctttcaagtaagtgttggtgtgaagtatggtggaagggacaacgtctaattctatgcgatgaatgattttgcttttttcttgcaaagtatctatttggtttgcagatacatctacaaagaagagcatcaagaaaaagagagccaaacattgcttggtttgtgcagtaaaatgccaactcatcataagattaatgtactttaagtaattggcaacggtcatgatactgggagaatggagcggttatcatagttgaatctcatgattattttcttttccttcaacgttttgtacacattgaaagatagaaaagttgacgctgccataatgacgatgttctacaaactctggcaaattggtaaactcgtcctttttcccatgttcaaaaacaaagacgccattttcttttaacagtccatgttgtaaaacaagttttggtatttctttaagctcaggcagtgcataaggcgggtccgcaaaaatgaaatcgaatgtctgatgacagcttttgatgaagcgaaagacatcggttcttatcaaaacgtcttgctgtgtacccaatttctccatacattgctgaataaattttgcatggtcacggtccgcttctacactcacaacttgtgcgcaaccacgagagagtaattccaaagagatgctaccagtaccagcaaacaggtcaagtgctgtttttccctctaagttaatgtaccgatttagcacgttaaaaatactctctttagcaaagtctgtggttggacgagctttgaaagtgcgaggaatctcaaagtgtcttcctttatattttcctgtgatgatacgcattattttccttttagaaatagggtgattaagtcaaatgaaatccctttaataatggtgattggcgcacgattaaattctgcaacggggttcacgtaatacactttttgtagatatcgtcgtagggattcgctcaacctttcacgttcgggaatatccccaacaagatgtagctcatctttctcgctgtccaacgctaatattttccatgtatataaaatgaaatagatggagtcattggcatgcgggacatgaaacgtgttgtaaaacttaaatctattttgcttgaaacaaaagatgtcaaccttcttatcatgaaagtaagcataaagtttttgatgcgaacctgtgaagctacgcttgtgaagataactccaaacgggttgggaaacgggaaaaaatctcacatcattgaaatggtcggtcatgaccattttcaagtctttgttcacggagaaaacagctacagcattgagattgtgtagtacagcgtgcaacacagcttcgtcttcatgacctgtaaaagtatgttggtacatacattccatttcttcttgacgaaactcttcggtgggaacaagcatcactggcgcatcaatcatcacttgtgcccgttgataacctcgattaagaaggtcactctcaatgaaggcttcacgcaaattagctgccaatgatattccacttctaatgacgtatggctcaaatgccaactgactttcttcggcattgtcaacgactgaaaaacttagcgattgtggactgattctgaaaaccaatcgtgcttttgatatgagtgtgttattcccagtttcctgcattgttatttggtgtttgaaggtcgcctatctttaatcctggataacgtccagcagaaagttcattctctattagttcctgaacaaatgacttgttaagaccttgtaaaaagtcagtatatttggctctacattccatcaatggtatttgtttccctgatggagagagttgcatcgatgtttccaattcaaacttttgacgatttgtaaacggaataaattgtagtgagtccgccaaatacccgtattgtatcagagagtcgaaagaagcggtatagctgcctgtcttcgcacggaatttttcttctgccagtcttatatgcactaaatagtgctttacgctggtttctctttcagtctgttggttgctgaaagcgataggactgtaaatgctcaagacacagataagagcaaggactcctacacagcaggtcagtatataattatgcttaattttgactttcataggtcagccttttattgtatctttgcagaagctgcgatgtctctcgattcaaacagcgtgagttgtaagttcattgcctgcatcttttttacatcacatgtggtgttcatccttgcaaaagtacaaaatactttccaataaagagataaatcggttaaattctcatattttcactgttcgaaatcatgcttatagacgaactcattttccagataatccaacaatttgaacttcagcccaccactgaacaaacacatgtgttaacgcaatttgctcattttatgatggatgaagacccacgtgtggtaatgattttttgtggaagtgctggtactggaaagacttctttagcaagtgctatcgctcgaaccatggtgaaattagagcaaagagtaatgctgttggctcctactgggcgtgctgccaaagtattctctgttcatagtggtcaacctgcttataccattcatcggcaaatctacagacaaaaatctttcgacagtgatggtggtgtgttcaatctcaattttaatcggtactgtgatacgttgtttatggtagacgaaagttcgatgattgctaaccaaggtcaaatggaatcctcgtttggaagtggttgtttgctcgatgatttggtgcaattcgtgtacagtgggcgcaattgtcgaatgattctaatgggagatgctgcccaattaccacccattggggaagaacaatcgcctgcgctatcgtccgattttatggaaggatatggactaaaagtgtacgagtgccgtttagataatgtgcttcgtcaaagcgaagaaagtgggatattgtacaacgctacgcttattagaacccatatcatgcgagatgaattaacacaattaccccaaattcatttcaatacgtttgctgatattgtggttgttcccggcaacgagctcatcgaaacactcaactcaagttattcggaagtaggcgttgacgaaaccatggttattacacgaagtaacaagcgggcgcacatttacaatcaaggaatacgccaaaccatcttggggagtgaggaagaattgtcaacaggcgacatgttaatgattgtgcgtaataactatcattgggtgcagccaccaacaaacaatgaagaacaggacacgacaagcatgacctttttggctaatggagaccgtgctatggtgcaacgagtgcgaaacattcgtgagttgtatggcttccgatttgcagatgtgtggttacagtttcctgactataatgactatgagcttgaggcaaccattgtcttggatagtcttcatacggaagcccctgctttgtcacgcgaacaaaacgaacgtttgtttaatgaagtgctggcagactatgcggatatacctcgaaaacaagaccgtgtcaagaagcttcgcgaagatatttttcttaatgccgttcaagtaaagtacgcttatgccattacctgccataaggcacaaggcggacaatgggctcatgtttacgtagatcaaggatatatgacggatgagatgttgtcgccagattatttgcattggctgtacactgcctttacacgagctacagaaaagttgtacttggtgaattggccaaagtcccaaacctttgaagatggcatttaatagatatgttgatgtttttataaattgtaggtaacaatgatagatgagctttggttagagaaatggtttcacaccttcaatcattcttattttgaagatatattaccgctaccacgtttgcaggtgtcttcatctcgaacgcagttggggagtatgtcgtgtaagcgaaagcttgcttggcgtggcatcacgacctgtgattacgtgattagagtcagcaattattacgtccaaacagaacgacaatatcagaatgtgcttctgcacgagatgatacattattatatctcctacaaaggaatttgcgatacgtcaccccatggtaaggttttctgtcagataatgcacaaactaaatcagacatatggatgggagatacacgtgagttccagatgtaaagcgatgattcctgctgccaaaacaaacaagaaacggtcgtatctaatactctttacggaggtagacaatcgtggctgttacttgtctgttgtgcatcctcattattttggaactcttgttcaaagtctaagtcgaatacctgctgtcaagaaatactgttggtacacgtcgtccgatccgtatttctctgactttcccaccgtaagaacgttgagaggtaggaaactatcacgggctgaatgggaaaaaatagcaagaaagttaaagccgcttgacatccattcatgccacgcagggtagggctgttccagcttttcataccagttgatgcttattgctggtttctttacaataaaattacaaaagaaacaactcatttaaccaacttttacgagtacttattttattgattttaatatggttagacgatgaatctgatatatcataaaacgtgagtttcaacagccaacttccatacaatcatggtcgtattttaagaaaagaacagctttcaccgtgtcattgttatgctacaacataacggtatttataaaaagaatcaagaattcttaaatgaaagagctgcgacatatcttgacttaaagattcatatagtttttgtcagaatagatataatttgtatttttgtatttggaataaaccaaataaccatttaccagcattaacataaatactcttaaagatagtacaaggtcggaaaggatttctttattgtggcgcttgcgaatggagaaaaggagcatgtgagtaggtgaacaaatagacctttatgatgggacaacggtttggagccatgactataacaatagatgtaatgagatatattttgtggaaataaagtaaaatgtatagaatatgaataacttaaagcttttgatactcgctctgtcatgcagtttagtattgtcttgttcgtctacgaaagacgtaaaagacatgtatttagttttaaaggttgatacgaccgcaagatatgagcaatatgcatacgttaatcaggatgggcaaaccgttgtgccttataatcgatacttgctgtgttataccgacacaatccgtactattggctttgtgtttaaaccgaatgtcggctgtgtagctatcaacaataagggcaaagaattattcaatgtatttatggctaataatgggaatgactacccaaaggatggactctttagaatcttagataagagcggtacaaagatgggtgttgccaatatgaaaggaaaggttattgtcaaaccgaagtatgatgctatcttcccatactatgagggattggctgctgtggcagtaggctgcaagacagtgagaccgcaagacgacccagagcatgaatatgttgttggtggtaagtggggatttatcgataaacagggacacgagattattccattgaaatatgatagtatcgccaaccatcgtcggtttaagaatggtaaagccctcgtcttaaaggatgaaaagttttttcagatagactataaaggcagaactttaaaatagatgaagtgagccatacatttttttaagccacattttttatctaaatcttatcctaatcaggatagagtgggatgtattaccatgaacaagactctaacaaggaacattacggttaacttgttaaagtaggtaggggcttacctcgaactgaagtaggtgaaatacaagaagggaagatgtaaataggtcgatattattaaactatcaactgtaaacggcagatagccttgtgtcgatataaaaaacagaacggacaagctgaaccatctaaaagaaaaaattgggtgatgaggctacctcatggagccatttgctttatagtagtggtgataacagacgtactatcgattcccaaaggcggttgatgaagggacgatgggtaaggtcactcagcttttctatcagtacgcaagcctcttgatccttgaaaaagacctccttcatgcgtaaagctaatgactgatcataaaagaaaatatttgcttcaagattgttttcgaaactacgaaaatcaatgtttgtcgacccacaagtacacaaattgtcatctgccactaacaacttggagtggttgaatccttcagtgtacagatacacttttactcctgcttctatcatagtggaaatatacgacctactcgcccattccacaatctttacatcgctgtgcttgggaagcatgagccgcacgtcaacaccagccacagctgctgttcttaaagcaaaaagcactggctccgtgggcaagaaataaggcgtttccatgtacacgtagtgttgggcttgtagcaaaatgcgtacatatccttgcataatttcgggccaaggagagataggactgctggtaactacttgtgcaatacagttgttggagatagaagtgtccagtgggggataatacttttgactacttataagggtgcgattaacaaaataccagtctaccaagaaagcccgctgaatgccataaactgcacctcctcgaatgcgaaggtgggtgtctcgccaaggttgagatttactgccacgcatatatcgcatcgcaatgttcatacctccaataaatcctatcttaccgtcaatcaccgctaatttacggtggttacgataatttaccttcccagtgaaagcaggaaagtgaacaggcataaatgatcgaacgtcaactccaccagtccgtaagcgttcaaaatatcgtgacggtactttccagcagcccacatagtcataaatcatgcgcacttccacgccctctgcggctttgtctatcagtgcatcagcaatgagatttgtcaatgcgtcgtcttcaatgatataggattcgatgtggatatggtcttttgcctgcccaatggctttaagcaaagctaagaaaaagtcggctccttcgacaaagatatccacctcattgtctttgaaaggaagggctgtgttttgatttgtgaagagctgtatcagtggttggtagtgtgtaggaagtttcaaatctttctgaacgacaaactccaacatcgaacgtttggttagttcatccatgctgcgttggctcatggaacgttcttttcgtgtattttgaccaaagaagaaatataaaataatgccaacaatggggacaaatattaaaactaacaaccatgccatcgtcttggatggttgtctattgtctaataaaatcgtgatgatggttcccaacacgatgacaatataaatggcaaggataatccaatgaacgtaaatcatgatttgttcatttgaagataaaatagattgataggtcttaagttcattattttagtgatatttctaaattggtattggagtattcatccttttgcccaaattgaaagatgccccacaacaaggttgcttataatacatacatcgcttacacaatgatgtgactacctaatttctttgccagcgcattacgaatttgttgcatgtccttgtattcagctactaattcttgtagtcgttccgggtcattggagacttgtccaatctgttgcatcaagtctttcagatgctgttccacataatccatgcggaagtccattagtagatgtatcgtatggttgcgtagcgcctcttgggcttctgttgccaactgtgcctcgtccatgtacttcatatcagatgtgggtttctcctctgctatcagctgatagcgatccgtactcatctccgtagccagtttgctgatttcaatatcttcatgatgaatgaaatacgattcggctacaaaaccctcctcaccgctatgttctacagcttcggtcaatatccgatttgaaatttcatggtcaaaatgcaaattatcttcccgcagagagtagtcaatgaattgggcaaccgttaggtcgaagagttgatgattctcatcttctacttgctccaaaaccaattgctcgccttttctgatgatgagttgtaccaacattttttccacttgtgacgcttgctccatgggctgagccgacggtagttgaggtgttggcgtggaagtattgagtgcttctatttgtcgcctttcctctttggacatttcttccctgtaatttctgatgtatcggttcatggtattaatcagcgtctcttctttcataccaatgcgtctggcacagtcttgcgcataggtatctcttaaaacctgattgggaaccactgcaatgcttcttataatagagttgattccttccgatcgcttgtaggggtcggtctcatttttcaccaataaatcggtcttaaactgtataaagtctgtttggtgctgttcgatataggtcttcaagtcttctgctgtatgtttccgagcaaagccatcagggtcttctccatctggcagcaacagtattttgatgttcattccttcgctcagcagcatgtccattcctcgaaaggcggcatggattcctgcagcatcaccgtcgtagagcagggtgatgttcgatgtgaagcgatgcaagatgtgtatttgatgcaggctgagtgctgttcccgagttggctaccacgttctcaatgccgcactggtgcatggagataacatcggtatatccctctaccatgtacacccagtcttctttggcaatggcttttttggcttgatagattccatacagctcacggtctttctggtaaatctctgaagctggagagttgacatatttctggttcacccctttggtgcgtgcatcaagtacacgaccaccaaagcccactacttttccattgagtcctatccaaggaaagataacccgaccagcgtacctgtcgataaagtcgccacggtcgttttggtagcaaattcctgtctttatcaagaattccttttgatatcctttgctaagagcagcttgcgccaaagcaagtcggttgggtaggtcgtaacccaactgaaacttttgaatgatgtcgtctctgaagccacgatttctaaaatattgcatcccgatggcttgaccgtcaggatggtgatgcaacaagtcactgaaatagctggcagcccattcgttgacaatgaacatggattcgcgttcgctttgttctctacgctcttcatcgctcatttcacgttcttgtatctcgatatgatatttacgagctaaccaccgcaaggcttcgggataagtcatctgttcatgttccatgatgaaactaacagaatttcctccttttccacaaccaaaacagtgacaggtgccacgggctggcgatacgaaaaacgaaggtgtcttttcgttatggaatgggcataaacctttatagttggccccactcttgcggagagtgacaaattcgccaacaacatctacaatatttgcagcatccttaattcgttcaaccgtaactctgtctatcatatctttaataaagtgtcgctttcaaataattccttaggttctttagagacggaagcgtgtctaaatttgatgcaaaaacgctgcgacaaatctttggtatgtttgctgcgcttgttgcgttaatgcacatttactgcaaagatatatataaaaaagtaataatggaaaaaatgcgtgataaaacattttccgtttgctcttttcgtggggtagaggtaaaaatgtatttgatggcatgtgcttagtggcagtaacgtgttgtctggagttatgccattgggcaaggaactcataacattaggacaccaaaacagactgttttgatgaggaaaacaggctgttttccactacaaaatagactgttttggtgggttgttgggatgagttgtagtgactattcttttggcttatctttgtggagaaatgcgcatttctttcttatttgtgcaattaagtaatcatttattttgcggacacttaaaaagttcgtatttttgtgacgagctattaccttttcgggggtgtatttatcaataaaatttatcacataaaataatatctatgaagttgaaaattgtcgtacttgccaagcaagtaccagacacaagaaacgtgggaaaggatgctatgacagaagcagggacagtgaatcgtgccgctctgccagccatttttaaccccgaagatctaaatgccttggaacaggcactgcgcctaaaagaacaaaatccaggctctacggtgggtgtgctgacgatgggacctcctcgagcaggtgaaattatacgtcagggattgtaccgtggtgcagatactggttggttgttgaccgaccgtttgtttgcgggtgctgacacattagccacttcttatgcacttgccactgccattaagaaaataggtgatgtagacttagtgataggaggtcgacaggcgattgatggcgacacggcacaagtagggccgcaggtggcacaaaagttaggacttcatcaggttacttacgcagaagaaattataaaagtggaggacggagtggctaccattcgacgccaaatagatggtggggtagaaacggttgaggctcctttacctgtcgtagtgacagtgaatggcagtgcagctccttgtcgtccttgtcatgcaaaactggtcatgaagtacaagtacgccacttgtccgttagagcgtaagggtgatgaaacttggagtgcgctgtatgaacagcgtccctatttaacgcttacccaatggtctgtggcagatgtggatggtgacccagcacaatgcggtctctctggttcgcctacgaaggtgaaagcagtacaaaatattgtgtttcaggcaaaggagagcaagacgcttacggcagcagataaggatgtagaagcgttgatgaaagagttgattgacgaaaagattattggataagtttttagtttgtcagttttttagtttttaagttggaaaacaaaattgcctcttgctaagtttttttgtacttagagaacttaaaaactcataaactcaaaaacttataaacttaagtatatatgaacaacgtatttgtatattgtgagatagaaggtacaactgttgccgaggtatctcaagaattgctcaccaaagggcgcaagctggctactcagttaggtgtggagttgcatgccatggcggtaggtactggaataaaaggtaatgtagaatcgcaaattttgccttatggtgtcgacaaattatttgtgtttgagggcgaaggattgtcaccttatacctcagcaccccataccgatatcatggtaaaactgtttgaagacgagcagccacagatttgtttaatgggcgctaccgtgataggtcgagaccttggaccacgtgtatcctcctcgttgaccagtggactgacagccgactgtacagaacttgagattggtgattacgaagatcgtaaagccaaacgagtatataaaaacttgctgtatcaaattcgccccgcctttggaggaaacatcgttgcaacgattgtcaacccagatcatcggccacaaatggctactgttcgttcgggggtgatgcaaaaagcactctatgacggtaaggcgaggggtgaagtggtttaccccgtggtgacagaatatgtgtctcctgccgcttatgctgtacgagtgatagagcgacatgtcgaagaaccgaagcataacctcaagggtgctcccatcgtagtggcaggaggatatggcgtaggaagtaaagagggatttaatctcttgtttgaattggcagacgtgttgcatgccgaggtaggagcgagtcgtgctgccgtggatgctggctggattgatactgacagacaggtgggacaaactggtgttacggtgcatcccaaggtatatattgcttgtggcatctcagggcaaattcagcatatctcaggtatgcaagatgcaggaatcattatctctatcaacaccgatccagacgcgcctatcaataagatagccgactatgtgataacgggttcggtagaagaagtggtacccaagatgatgaaatattataaagagaacagcaaataattaagtatagcctctccctcactccctcccttttggggaggggtaaggatagaggctgattatcaaactatgtcaaattactataccgaccatccagagatagcgtttcacttagaacatccgttgatgaagcgcattgttgagctcaaagagcgcaactacgaagatcaagagcattttgaagatgctccagtaaattatgaagatgccatcgagaactacaaacgcatcttagaaatcacaggagatgtggctgctaatatcatagaacccaactcggaagcggtcgacttggaaggaccacacttggagaatgggcgcatgaagtatgccagtaagacgatagaaaatataaaagctactcgtcaggcaggactgtggggtttgtcaatgccacgcagatatggcggattgaacttgcctaatgtcaccttttcaatgttgtcggagatgatagctgcagccgatggcggttttcaaaccgtttggtccttacagtcgtgtattgatacgttgtatgagtttggaacagatgatcaaagagaacgattcattccccgtgtctgtgagggcgcaaccatgtcaatggacttaacagaacccgatgctggttcggatcttcagcgggtgatgttgaaagcgacgttcgatgagaagaatgattgttggaggctcaatggcgtaaaacgctttattaccaatggcgactcggatattcatctcgtgttggcacgctcggaagagggaacaaaagacggtcgtggcttgtcaatgttcatctatgataaacgagacggaggcgtagatgtgcgccatattgaaaacaaattgggaatacatggctcgccaacttgcgagttggtgtacaagaatgccaaagccgaattgtgtggttctacgaggttaggacttatcaagtacgtcatggcgttgatgaacggtgctcgtttgggcattgcggcgcagtctgtaggtgtggcacaagaagcatataacgaagctgtggcatacgccaaggagcgtcagcagtttggacagcccattatagagttccctgctgtgtatgatatgctgtcgcgcatgaaagccaaactggatgcaggtagatctttgttgtatcaaacggcaaggtatgttgatatttataaagcactcgaagatattcagcgagatcggaaactcacatccgaagagcgtgtagagatgaagaaatacacacgtctggcagacgcctttacacccttagctaaggggatgaactcggaatatgcaaatcagaatgcttatgatgccattagtgtacacggaggttcgggctttattatggaatacaagtgccaacgtttgtatcgtgatgcacgcatcttctctatctatgaaggtacaacgcaaatgcaagtagtggctgccattcgttatattatgaacggcacctatctcaatattatgcgagaaatgatagaacagccagtgagtgaggccttgattcctttgcgtcaaaaggttgaagtgatgcttagtcagtacgaagagtctatagcttttgtgaaagatgccaactgtcaagagacacaagacttcttagcacgtcgactttacaacatgactgccaaccttgtgatgtcgctgctgatactcgatgatgccacaaaagcggagaacttgtttgctaagagtgctcatgtgttcgtgcgtcatgccgaagaagaaaatgcaggacacagtctctttattaagaacttcactccgagtgtgctctcttattatcgtacaagtgagaaagaagtaacagaataataatgtctacttatcaaaaaaaggctgcaccatgtaaagatgtgcagccttttttgataagtaggataagtcacgaattagaatttgcaggtgccatacttctcgtaccttatcttagcaagtacaggatagtggtcagaaggaaggcgatgcgtgtactgttggaattctaactctttaggtgcatttcccgatttcaacttaggcatcttttcatttgctgtccaataagcgtctgtgtgaatggcataattgttcacttcaaacttgtttgatacgaaaatatgatcgattcggctttctgatttcatactcgaatcaaaatcctggaatgttccattctctgcaaatcgatgttttgctgccacatatgaatctttcaagatgcctgactcgctgaatattttgtaaatttcatcatgctgatcgacgttaaaatcgcctgtaagaatgacaggggcattgtttccagcaatctctttaatctttttaattaccaattttgcagcctcacgccgtgcaacaacacccacatgatccatgtgaagattaaaaaaatagaaggtaaggttcgtcttccaatcatgaaactttccccatgtgcaaatccgaacacatgcagcatcccaaccaagtacaggtttgtctggcgtttcattgagccaaaaattgccattgtccaagcattttaacttgtctttcttatagaagatagccgaatgttcgccttgttcctttccatcttcacgaccaatgccgatataatcgtactggtctaagcctctttttagatcttccaattgatgtttcagaccctcttgagtgccaaatatgtcaggttgttcaaagtttagaaagtcacatatcacttgacatctcttagtccagccattgccttcctgtcgatcatcctcgttgtcataacgtagattgtaagttgctacgaatagattttgtgcttgaatgcacaatgatgcagtcaaaatgaaaactgtaagtgcgtatttcttcattgttttatgatttaataattctgtttgatgaatacaaaggtaaataatcttcttgaaaggtacaaagggatagttttctttttcgatagtgggaatgcttctcaacacagcgagtccttaggttagagcgtttcctttttcagtcttctaacggcttttaatatctcttattctttcgcttgtcttcatgagcgatgaaaagcagcaatcatgaggttaatctcttcataagtaactgttggtagacaaagtgctttaatcgcagtcctcccgttgtcaactcctatcttttggattacttgctgaatattttgtatatgttcttgctccatgaaatcgttgatgtcgatgactccttcttttacaaaatatcccaaatgcgtataaatagtagaaatagtaagcttcctctctgttgcaatctgtaagggtgtgagtccactcttaagaagttgaagcgtaatatcctttgtattttcttttttctcttttttctttttggtgcttttcgaccgacgctgggaagttggcgaaagttcgtctaatgccatgagcagtgcctcttgtttggcgcgtaaatagttttctgtagtaaatccgttggtgatgaccgtttgcaataggtattttttagctaaatacatttctctcaaatctgtgaggtagttgtccaaacggcgcatggcaactttattgttcgactttacttccaaggtttgttcaatcaggtcctctaaatagtgcttgaatgtcttcttgaaataattggcactggcaactactctttcaaggaacagtgggtcgtgaatctgttcaatcgttaattgactgatatacgttgtccatttgtatgcgatgatatttactttctcctgtagctctttgatggtggatttgtggattaagatgagtttagaatagctatggaagaactctatgagcaagcgacaaagcatctcttcagctcgccatatatccataaactgaaacaattcaatgagttggaaacgctcataatcatcctttaatcttggcaattgttcaatacttttgcgtgcttcctcgtcttgtcggttaatataatccgccaccccttggtcgtttataatggcttctgctgtaataggggaggccaataccagcccttccaaggtcttacatctacttaatgccacatatacctgcccaaatgcaaacgatgaacctgcatcaataatggcacgctcgaaggtaagtccttgacttttgtgtatggtaatcgcccatgccaagcgcaagggatactgactaaatgttccctgcaccgttggttctatctcctttgtcgcttcattaatcttataagtagtgttttcccacgtttgtttttctacgacaatagaatgctcatcgccagggcagagaacctcgatatgactgtcgtctaagtagataatgtgtccaatcttaccgttataaaacaaatgttctgctgaactatcgttcttaatgaacatcacttgcgcacccactttgaacactaacgactcactcgtaggataggaatattttggaaatgttcctttaatgcttgccatgtaatgataggcttttgcaggtaactgttccaatcgcatgtcattatagctatcagccttgttattgtgtgttgtcagacggatatatccctcttcctgttggggctgaaagtgaggttgataacgctcgttcagtatctgtaaatcagtaggcgacaacgtgttctcgcgtaaatgattgagaatattcaggaaagtctcatcttgttgcctatataccttttgaagttgaatggtcacatacggagtttgttgtagcgcatggctgccaaaaaagtagggggtatcataataagggcgtagcaaggcttcatctgctggcgttaccacgggtgtaagctgttgcaaatcgccaatcatgagcagctgtaccccaccaaaaggacggtcgtgctgtctgtatcttcgtagcaccgcatcaatagcatccagcaaatcactgcgcaccatactaatttcatcgataatcagcatgtcaagtgttcgaataatcttgcgcttctctttgccaaagttatatctctcacgcacggttgcattgggtacaaagggagatagcggcaactgaaaaaatgagtgaatggtaacaccaccagcgttaatggcagcaacacccgtaggagcaaccacgattaagcgtttgctactgtgctttttcaccatcttcaaaaaggttgttttgcctgttcctgccttacctgtaaggaaaatgctttgctcggtatgctctacaaactcccaagcaagctttagttctgtattttcttccatcgttttctgttgccaccaacgtcttttgacgttgtaaagactgataatgcaaagatacagaaaaataatgatgtctgccaatcggttgcttatctttctttcaatagggcattgacaccttgttgcgcagcattttccaaagaaacaatgttaataacttgtaattagatttacaaatgttacaaaagctcaaaaataacggtgaagccatacagttctgcatttttttttgtaagtttgcaataaatacattacattaaatattagacttatgatttcaaaaaaattacaagatgctctcaatgagcaaatcgttgctgagatatattcagccaatctatatctttctatgtctttctatatggagaaagaaggctttgatggtttttctacttggatgaagaaacaatctgccgaagagatggatcatgcataccaaatggcaagcttcatcattaagcgtggtggcgaggctgtagttaatcagatacctgccgtaaagcaaaaatggtctactccattagaggcatttgaagacacttataagcatgagtgccacgtgagtcaactgattgataagttgcttgaattggcaatttcggaacacgacaatgccagccaagacttcttgtggcagtttgttcgtgaacaagtagaagaggaagcgacagccagtggtattgtagataggattaaacgtatgggcgactctgctattttcaaccttgaccaacaatacggttcacgcgcttaaataaggctggttctataaattaccaccgcacataatcatcaaatgtttatgaaatacgttttgttatcttttggcttctttttggttcaaaatgtaagttcgttcagtcgtgtagctcgctacactccttcactctcttgcattttgacctcaaaaataagctcaaaatctaacaaagctaatttatagaaccagccataagtgaaatattcacccatatagcaataatatgtagggggaattgcgattggcaacacaatccttttcctccttttcttttgttttttcagcgaacaattgtaaagtaaaatgacaaaaaacagctacttttattttttcgaaatagaatcagaatttcattaaataagcaaaagaacggttgaaaatttgggaaaaacttgctgttacattacaatagggtggttaatgtaatgactttctgtcgttaactcattgacttaagcttgttattctcatgcttcagtacgattaaagcatgcaaattgggagggaaaatagactattttgcccttataagatagctctaatgcgagtgaaaatgcgtggtattacgataacgtattgatttataaaaacttatgtttctcgctcaaaactcgcgtatttctcaccgacaacaggtttggttcaaaatattgaagttatgagcgtgctgttgttaagatttttcacaataaaaaggttcgtattttcaacagtcattggtgaacttttgagcttgttttcctgtgttagaaaaatatgacgaatcatgaatgatttcatggaacataaagatgtggtaagtaccaatccttttgcggtaacccttttgaagtggtttcaagagtacggacgtagtttgccgtggcgtgagaccaccgacccttatgccatttggctcagtgaaatcatccttcaacagacacgagtgcagcaagggtgggagtattgggagcgattcatgcaccgttttccccatgtcgaggacttggcggcagctactcaagacgaggtgttgcggttgtggcaaggtttaggatattatagtagggcacgtcatctccatgaggcagctaagcaagtggttgccttggggcattttccgcataccatgagcgaactcagagccatgaaaggtgtgggcgactatacggcagcggctattggctccattgcttttggattgccagtagcggtagtcgatgggaatgtttaccgggttttgtctcgctattttggtatctcgactcctattaacacgactgaaggacaaaaagagtttgccgagttggcacagtcgctcttgcctacgtcagccccctcggcatataatcaagccattatggattttggagctatacagtgtacacccacatctcctcgctgtttaatatgtcctttggcagatagctgcgaggctttgcgaagcggtaagacagccgaactacctgtgaagctaagaaaattgaaaatcaagaaacgccatttttcatatatttatctcagatgtcaggggatgacagcctttcacaagcgttcagctggagatatttggcaagggttgtgggagcctttactgatagagaatgctgatttgcccgtattttcggcacccctatcgttaattaaaaaaggggtgaaacatgtgttgacgcatcaagttttgacagccgacttttatctcgtggagttgaaccaaagaccttcgttgccagaagattatatttggattccggaggatgaattggatcaatatgccttgccgcggctcatagaaatattgttggcatcacttcctgcatgatggacgtgacttctcttcgtttcaacagtatctatttgaacctcctcaatcgtctttaccaattttatactgtcttttccgaacataaatccaatccgaacgatacgtccaaattgcgcactacctttaactttcagtgggtgatgtttggcgtatgtcatggtgtcgcgtcgcgaagggtaggaaattaattggaggaattggcgtgtagagccgtcgccaatcacaaaaatatcggcactgtctaccgttttcgacacatcctttgataagtttttgtgtgacaaagtcgtatcttctggttcgaaaaccgatgcggctaccgtgtcgccgaggtcagaagatggtgcaaatttgcaggaggttgacagcgataggacaacccataacagagggaaaaataatacgagttttttcattatgttgggttcagtggcgtgaaactaacttttttaagcgttgtgtatcaccacttaggttctacacaagggctgattgtcgttgacggcatgcaaatatagttagtttagggtagaccagcaaatataaaaacacagaagttacgattgccatttcattctctaaataccaaaagtttgccatccttccaaaataagcttgtcattgctgcattgatgggagtgtggatcaaggtagcttttgtcatgccatgattgtagataacaattgtagagtgagccttcgtgtggcgtaactcgaacactcactcaagtctattgatcggttgttgcttcattttgtggcaacacctcctgttgtttctcttgcgtcacatattttttccaataagctatcaatagggttgtcaacggcagcgcaacaatcaagccaatgaatccaagcagtgttccccaaatggagagcgacagaagtaagatagctggatttaagttcatggcctttcccataatttttggggtaagaacggtatcgctaatcacctgtacaatgaggaaaacaaggagagagagcccaaatacaatcaagtaattctgacctgtatctgcggcttttagcatggcaagaaatgccattggcacgagagctaaggtgtgtagatagggtaccaaattcatcagacccatcataatgcccaaagcaatggccataggaaaatcaataatggttagacctattccgaaaaggatacccaaacagagggagactaagccttgtccacggatgtaattgttgagttctcgctcaacatcttgcatcaactctgaccaaaatggtcgattcttttttgggaaaatgcgaatccaattgtccgttaagaattcataatcctgtaagataaagaacgtataaagtaaggtaatcagtgaggctatcacgctgatgataatgcttgccgtttgtcctacaatgctaaatagcttgggcatggtagtcttcaccagctcactaaagtctttactcttcatgaatttctcgattccagcttggtttttttctacccattgtgagatataggagccgaaatcgctgctgtgagttgtttgactaatccaattattcagaatattattgagtttatctatctgctcaatcatcgaaggaatgatagcataaaccacaccagctatgattccaagcacgcctaacatggtgatgatgattgccaaggctctcactctaacatgcattttatattgcacaaattttacaagcgggtataagagataagcaaaaagccaagcaataaaaaagggaagtagtacaccgctaaggtaattaacaaggtagaaaaccactatgattagtaatatggtggctgaaattctgataaatctatcgaaagtgatttcttgtttcttcattatataataatgtatatgtattgacttcctaactacaaaaggtagcaagccacgggttagtcatgaaatatcattgttcttcctgcaaagctctttgataacactctctacaaagtggttcgtaggtttgcttctcacctaaaagtactcttttatcattgtccactaatcggtggctaatgtatgccaaagctccacacttcacacagatggcatgtactttcacaacctcgtcggcaattgcacataatccaggaatagggccaaagggtttcccttgaaagtccatgtcaagacctgccacaatcactctcacacctttgttagccaactgattgcaaacatcgatgagtccttggtccaaaaattgtgcttcatcaatcccaacgacatcgatgtttgatgccaataataagatagatgatgaggtatctatgggtgtggacggaatagtattctggtcatgactcacgacatcttctgcagaatagcgtacatccattgcaggtttgaagatttcaactcgttgttttgcaaacttagcacgtttcatacgccgaatcaattcctctgtcttgccagaaaacatcgatccgcaaacaacctctattcttccagggcgatgagattcgccagtcacatagtctatcattataaatattaataagcaaaactactgctaatcagttaaaaattcttcttaggagcgtacttatattattgcaaaaatacgaataggatttaaaaaatgcaaagaaattgaccgtttttttgctcgtgttgattatttaactatatttgtcccatatatgggagtgttgtatattgtacccacgccagttgggaatatggaagatatgacaatgcgagcaattcgtattctgaatgaggtagacctcattttggctgaggatactcgtacgtcgagcaaacttttgaaacattatgatattcagaatcgtttgctgtcacaccataagttcaacgaacacggcaccaccgcaggtattgtggagcgtctgaaagcgggtcaaactattgctctcattagcgatgcaggtacaccggggataagcgatcctggctttctgctggctcgagaagcctctaaagcgggtattaccgtccaaacattgcctggagcaacagcgtgtataccagccatagtgtcatcaggattgccctgtgaccgtttctgtttcgaaggctttctgccacagaaaaaaggtcgacagacgcatttagaatctttgagagatgaggatcgaacgatgatattttatgaatcgccctaccgattattgaaaacgttgcaacaattctccgacctctttggtcctgagcgtcaggtcagtgtcgctcgagaaatctcaaaggtgcacgaagaaagtgtcagaggaacattggaagaagttattaaccattttaagaatactgcgccacgtggcgaaattgtcattgtagtagcaggtaaaacaaagaacaagaaatcaaaaacagaagagatatgaaaaaattattaagtgtaacccttattgccatactgtctttggctttcgtaggatgtcaaggcaataagcaatctgctgaatcagcagatgctgcacaatcagattcattgagacaggtcattagtcaaaaagacaatgaaattaacgacatgatgggaaccctcaacgaaattcaagacggttttaatgagattaatgccgctgaaaatcgtgtcaccatcgctaaaggtggggagggagccaacaaagagcaacaaattcgagaaaacattcagttcattgctaaaacgatgaaacataatcgagaattaattgctaagttgcgcaaccagttaaaacagagttctgtgaagggagatgcccttaaaaacactttggaaaatctttcaaagcaattggaagaaaaagacaaacaacttcaacaaatgcgtgccgagcttgatgccaaagatattcacattactgaattggatgaggccatcaacaatttgcacacgaatgtaaacaatttagctaacgaaagctcaaagaaatcgcaagttattaacagtcaggacaagcaattgaacacggcttggtttgtctttggtactcgtaaagagctgaaagagcagcgcattattgaaggtgataaggtgttacagtccaacttcaataaaaattacttcacgaaaattgacattcgtgtcgataaagaaatcaagttatactctaagtatgcaaagctattgacaatgcatccttcaagcagttatatcttgcaacgtgacgctaataagcaatatacattgaaaattaccaatcctgagattttctggagcaccagtaaatatttggtaatcttagtgagataatactttcttgacgggcatttctcctgagttgagtagtgtctttcataaaaaacaaatcctcttcatctgtatgagcagttggagaggatttgctttttcgtacacatataataataggtgtgtgcatcaacgttgattagttaaagattttcaatctctccttctcttaaaaaaaagttgcatgagtgccatacaatcctctctgagtacaccatttgtaacttcagctttgggatgtaacactttcggggcatatcgtttgtatccccgtttgtcatcgctggcaccatacacaatacgagctaattgtgcccatccacacgcacttgcacacataggacatggttcaatggtaacatataaggtgcaatcggtgagatatttcccgcccaattggttggttgcggctgtaatagcgagcatctctgcatgtgccgtcacatcgtgtagcctctctgtgaggttgtgagctctggagatgacttgccccttgcacacaacaacagcaccaataggaatttcgccttcgtcgaaagcggcttgcgcttcgattaaagcctttcgcataaagtattcatctcgtttcagttcttcttctgttgccatagtgtatcatgattgtttgcatacaaatttaatataatctttttgatgtgaaccagaaaaagcgtatttttgcaaataagacaatgattaccttgatatggcacagcataatgaattaggtaaatggggggaagagcaagccgttgctttcttgcatcagaagggatataccattcgtgaatgtgattggaagcaagggagtcgtgacatcgatatcattgcgctgacgcccgatggaatcacgtgtgtctttgtagaagtaaagacaaggcgtgacgatgaggttactttgccttcagaggcggttgacctgaaaaagatgagaaatataggttttgcagccgatgcttatgtcaaactccatcacatacaagaggaattaaggttcgatattatctccgtggtaggaacgagtgatactaccatgcaaatagaacatcttgtggatgcttttaatcctgttcttctgtgacgatgatgacccgcaagctcatacagttggataccattggctctaccaatgtttacctatccgagcatgcctcgatgtttcaagaagacatggtggttgtggtagcggattatcaaaccagtggtaaagggcaaggacaacactcttgggagagcgaatcaggtaaaaatctactgttctcaatcttaattcatccgcatcacgtccccattcatcgccaatttttgctgtctatggcaggtgcattatccataaaacgggtcttggatgagtatgtagatgatatttcattgaagtggccaaatgatatttactggcgagatagcaaactgtgtggaaccttaatagagaatactgttgattcgcaaggcatcaaaaatagcatctttggtattggtttgaatgtcaatcaagccagattcttgagcgatgcacctaatccgatctcactttttcagattctgaagcatgaggtgaatcgagaaaaattgttaggtcgtctcatcgattcatttgcaagacaaattgatttgctttcagttgacccacaaaaatatgtcgtcaagccttatcatgaatcgctgtatcgtaaaggggaagcgcatctctaccaagattctaatggaatctttatggctattcttgaaggggtgaatgagcaagggcaattacttttaagagatgagcaagggcatttgcgtacttattcgttcaaagaagtagcatttattcatacgaagaagaaaaattattaaaatattaaatgatatggtaaagttcaaacgaatcttgttaaagttgagtggagagagccttatgggcaagcaaaactatggtattgatgcagaacgattgtcggactatgctcgacaaatcaaggaagttcacgacatgggtgtgcaaataggtattgtgattggtggtggtaacattttccgagggttgagtgggtcgcaaaaaggcttcgatcgagtaaaaggtgatcaaatgggaatgtgcgctacggtcatcaattcgttggctttaagctctgcattgggtgctattggagtgaaaacaaaagtgatgacagccatccgtatggagcctattggtgaattttacaataagtggaaagccattgaggctatggagaacggtactatttgtattttctcttgtggcacaggctcaccttattttacgactgacacgggtagttcacttcgtggaatagagatagaagctgatgtgatgcttaagggtactcgagtagatggtgtgtacacggctgatccagagaaagacccaacggctcagaagtttgatgaaataacgtttgatgaaatttatcaccgtcatctcaaggtgatggatttaacggcaaccaccatgtgcagggagaatcatctgcccatttatgtctttaatatggatgtatatggcaatttgaagaaagtcatcagtggcgaagccattggcactttggtacatgattaacatgtcttttcaataatgtctatgagttgtatcttcttggatacatctcatagtcttgacagaaagctacagtttttcttaaagtgtcgaacttttgaagcagaagtataagccttttgaagtagaaatgcaagactattttggagagaatgtgtagctccgcttaagcatcagggctgttgttctgtctcgtcatggatgggttcttcttgaaagtcaacatactcaccttcgttcttcttaaatatttttttatttgcctcttctgcattgcggtgatcaactacaacttgtccgttggaatatctatgttgttgctgccgttgctgtgtattttgctcttgagtttgctgcttaaattgttgcaaaccttttctaaaaaaggcgattactctgatggctgacaaacttacaacgaccagtcctaaaagaaataggataagaatgattttgaaaatcataaggatgcgttttgttgagtcttatttggagatacgtttagatttgcctgtgatataaagatatagggagataaagaaatagcaggcaatgactatccaccagcctttcaatacaccaaataagcaaagtacgatgatcgtgagaatcatgaaactgtatcgaatggtgttacccttccaagtccagtgcttaaatttcaaggcaaacatgggaagttcgcaaaccaaaagatagcaactcgtgagcatgagagctaagatgcaaaagagtgaccaagaattattttctatccaatagggattagtcaagatgagtgctccccaaaacagcgcattggctggtgttggcaagccgatgaacgaatcggtctggcgttggtcaatattgaattttgcaagtcgcaaggcagaaaaagctgccatgagaaacgccaaataaggaatcactgttcgataaacgtcaaatgaatattgcggtggagattgtaggaatggaggatagtcaataacacttagcgtgtagtaaatcatcgttgatggagctacaccaaaggtcacgacgtctgcaagcgaatcaagttctttcccaatgggggaggatactttgagtagtcgtgcagacatgccgtcaaaaaagtcgaatgtggcaccaatcagtatccatatcagtgccatttgtgtgttgcccgaataagcacaaagtgtagcaatgcagcctgaaataaggttgctacaggtaagtgcattgggaatatttgaggctataaaatgattcatattttttcaatctattaaaaattgattatccaatccttttgtacaaaggctgttttgggtaaggatagtttacttcagcttggctattatggtttgatctcctacggtcttttgtcccatcttcacgcaaacctctgtgccaattggaagatagacgtcaacgcgcgagccaaacttgatgaaacctaaatgttcgtcaatataacaatcttctccttcttttgcgtacgttacaatgcggcgtgccattgctcctgctatttggcgacacaaaatatctttcccgtcaggtgtggtaatgatgatatcactgtgttcattctcttcactggccttgggtaaccaagctttatgataatttccatcttgatggtgtacaagttttacatgtccatcgacaggaaaccagttagcatgaacattgaaaagactcataaagatagaaatcatgagacgtcgttcgtggaaataaatattttcttctacctcttcaatgacgacgatttttccatctgcaggtgctactacaatgttttctgtatcctccgaagggaagaaacgcacaggacattggaaaaaattgagtacgataccgtatataataccgaagacaacagtaaagacataaaagggaatttttgtgtcaaatgctcgccacaagagcaaatctatggctgcaatggcaatgaaaccccaaataagtgtgtcggttccctctcgatgtattcggattttctttaatttcttaattctctttatcatgcggtgatagatgagtggaatgtattggcaaaggtaaatgttttttgtaaattccacaaataataaagttattcttttggtcagttctgtgatattgagtatctttacgcttcaaaaatgatgaacagatgaatgattacgtacaccttcacgtccatacatattactctattttggatggtcaatcccctatcaaacgccttgtagataaggcagttgccgatggcatgcaaggtatggcaattaccgaccatggaaatatgtttggcattaaggaatttttcgattataccaatagcgtgaacaaaaaactcaaagctgaaggaaagcaaccctttaagcccatctttggctgtgagatgtatgttgcacgtcgcactaagcaggataaagtcaaagaaatgggcgatatgagtggctatcaccttatcgtattggcgaagaattacaatggctacaaaaatctgattaagttggtaagtcgttcttgggttgatggttattacatgcgtccacgaacggatcgtgcagatttggaaaagtatcacgaagacttgattgtttcttcggcatgtcttgctggtgaagttcctcgtaaaatcttaaaaggcgatatggaaggagtgcgggaaacgatagaatggtataagcgtgttttcggtgaagactattatttagagatacaacggcatgaagtaaaagacccgcatatccgtgccaatagggaggcttatccgttacagcaacgtgctaataaagtgatattggagttagctaaagagtatggtgttaaggtaatttgcaccaatgacgtacattttgtcgatcaagacaatgcagaagcgcacgaccacctgttgtgtttgtccactggaaaggatttggacgaccctactcgtatgctgtattctaagcaagagtggtttaagaccagagctgagatgaaccaagtgttcgatgatttaccagaggttttgacgaataccttagaaattcttgataaagttgaagcctattctatcaaccatgatcccattatgcctaactttcccatcccaaaatcatttggtaccgaagaagaatgggaacaaaagtttagcaaagaagacttgtatcgagagtttaccaccgatgagaatggcggcaatccgttatcggaagccgatgcgctaaagcgaatagaacatttaggtgggtatgaaaagatgtaccgcattaagtttgaagctgattatttggagcagttgacttatgagggagccagaaaaatttatggtgattctttttcaaaagagatagacgaccgtattcgttttgaactacatgtcatgaagacgatgggtttcccgggctatttcttaatcgtttcggactttattcgtgcagcccgtgaagagttaggcgtgatggttggtccgggacgaggctcggctgctggttctgtagtggcgtactgtttgggaatcaccaagatagatccgttgaaatatgatttgctgtttgaacgtttcctcaatcccgaccgtatttcgttgcctgatattgatactgatttcgatgatgacgggcgaggcaaagtgctaaaatgggtgatggacaagtatggacacgagaattgtgcgcatattatcacttatggaagtatggcgaccaaaaactcgattaaggatgtggctcgcgtagaaaaacttcctctcaatcgttcgaatgctttgtgtaaagctattcccgaccgtcttcctgatggattgaaaatgaacttaattaatgccattaagtgtacaccagagttgcgagatgcggaggcgtctaccgacatacgtgagagcaacacgataaaatatgccaaaatgttggaaggaacggtgcgaggaacgggcatccatgcttgtggatttattatttgtagagaccctataagtgattgggtgcctatctcaacagccgatgatcctgattttaaggatgaaaagacgaactgtactcagtatgatgggcatgtgatagaagaaacaggtctcataaaaatggactttttgggtctgaaaacactttctgagttgaaagaggcggtaaagaatgttaaattaacgagaggcatcgatattgatcttgataacattccgatagatgatgagctgacgtatcagctgtatcaagagggacgaactattggtacattccagtttgagtcatctggtatgcaaaactatctgcgacaactgtgtcctacgaagtttggtgacttgatagcgatgaatgccctttatcgtccaggacctatggacaatattccttcgttcattgctcgtaaaaaaggtcttgagcctatttcctatcccattcctattatggaaaagtatctgaaggatacttatggcattactgtctatcaagagcaagtgatgcttctgtcccgattgcttgctaactttacacgtggtgagagtgatgcgctgcgtaaagcgatgggtaagaagaagaaggcaatagtagatgccatgaaacctaagtttatcgaaggagggaagaagaatggttacgaccctaaaatacttgatgcgatatgggcagattgggaaaagtttgcatcttatgcgttcaacaaatcgcatgctgcatgctattcttgggtagcatttcaaacggcttaccttaaggctcattatcctgcagagttcatggcagccattatgagtcgtcgtaaggatcagattacagaggtgtctaaactcatggatgagtgtaagtcgatgaacatagcaacgcttggaccagacgtaaacgagagttacgagaagtttggtgtaaatcatcatggcgagattcgctttgggttagcagctatcaagggtatgggtaatgctgccgccaaagccattattgacgagcgtgaagcacatggagcttacaaagacatcttcgatttcgtgcagagagtggactttacgaatgtgaacagaaaggcttttgaaagtttggcattgagcggtggctttgatagctttgggcttcctcgtgaaagctacttcacagcaaatgccaaaggtgagttgtttgtggagacgttggtgcgctatggacagctgtatcagacgaagaaatcggaattggaacattcgctcttcggtggtgaaaatgcggtagagatagccacacctgccattccaaagcccgaattgtggagtaatatagaaagattaaataaagagcatgaactcgttggcatttatctgtcggcgcatcccttagacgaatatagcatcgtccttaagacaatgtgtaatacacagtgctgtgagttggcagatagggcagagttgtccaaaaaatccaatatcgtttttggaggaatgataacagacgtaaaggacaagttcactaagacgggtaagccctgcggatttgttaccattgaggacttcagtggttcgggagaattagcgttctttggagaagaatggggaaaatggaagggcatgatgattgtgggtagtactatttatttaataggtaagtgtacacagcgttttcgcgatagcgacttctatgacctccgtattcaggacgtgcaatatctacaaacggtgaaggataagcgtatagaaaagtttactattgtgatgaatagcgacacgatagatgatgtcatggtcagcgacattaccgctatgttggcagatagtccaggtagtacccaactatgtttccaaatagtcgacaagaagcgcaatgcaagtgtactgctgcactctaatataagaaatatcagtctcagtcatgaattgatacgatatgttgaaagtcatccagatatgagctatctggtaaattaatatgctgtattatttgcaggtttcagtataaacatctatttttgtaaataataatcgaacataaaaagaaaacaaatggaagtagaaattacatcaaaaaactttgagaattataagaatggtgatttgccattagttgtagatttatgggcaacatggtgtggtccttgtcgtgcagtgggtccagtgatctctgaattggcagaagattacgacggaaaaattgtggttggcaagtgcgatgtagaagaaaatgacgacttagccatggaatttggcgtgcgtagcattcccactattcttttctttaagggaggagaactggttgataagttcgtgggtgctgcatcaaaggcaaccttagacgaaaagttcaaggcactgttgtaaaccatatctcaagtttcctacttttttaaggtaggaaacttttgtctttaggacatctttgtttttgtttcgaatagagaaagcagggtagcaaatgttttctcaacttgtcattgttacattgctatcatttccacacctcgctttttgagtcgttttaccttgtccgaataggacttgatttcatgcgcttttctttgtagaataaatgccgtttgattttgcattattgtcaataaaatatcacaaaaacaagcacttcaaaatcttgaaaatagaatttcaaggggtagtgtaaaaaggtgaaaaggcaaattatccaaccaaaagatgctaaaccatgttgtaaaaaagcaaaaaacaatgacttttttgcgtcttttcatctcttcgccgtgttatgtcatgacaatggagcggttgtttgcaccatttagtctgcttatctccatgggttaatgcccttatcccaatgctataacttcgaagggagcgcactgtaaaagcgaaaaacaatgaaacaaattgaaatacaacggtttagctaactattaaaaataaggcgatatttccgacaaaagatttggttgtcgaaaataatcgaagcatttaacaccttttgtcaagataattcaaaatattatcgggtgtttgtacaacaaacaagctgtgataattttatcacagcttgttgcttttgtcgggattactggactcgaaccagcgacctcgcgccccccagacgtgtgcgctaccaactgcgccaaatcccgaactaactcttaaagtgctgcaaagatatatacttttatggatatctgcaaatatatgttttgatttttattctaaaaaggattatttaacgagataactttgaattcctcttgtcattcgttgataatttcgtaactttgcattcaaccaaatgtacccacgttcatgaaatattatatctatctatttctactgttatgcagcgtcttgggggcttgtaatgatgacaatgacgggcttacgaagaaggattattcacaggtggtagatgaagacgatgatgatacaaaggcaacgctcaatgatgattatatctatcaattgcccctcatatttcatgttctttatcaggatattgatgacccgacccagtatgtacctgtttctcgcatccaatcgttggtagttcatctgaatgagttgtatcaggggcatatttatggagagagtgaaaatatacgtgtccgcttctttcttgctcaatatgatgaggagggacaccgtttgaagacacccggtgttgattatatcaaatatacggggaagtatcccattgatgtccaagagtttatgaacgacaataatagaaagtatgtcaaatacctttgggaacccaatgaatacatcaacgtatttttgtatcatttcagttctgaaaaaaatacgcatgtattaggcattagccatctaccttatgttgtcaagggtagtacttcgttggaaggtttggaaacgatacagcgttcttaccttacaaagaagaatcttagttttgcttattgtacttctatcaatagcacctttatcaattcagagtctactcgttatcagttaagcgataaaggcaaaaggggctatcaatatctatctactgatgtgaatgttaccttagcacatgaattagggcattacttggggctgcatcacactttcacggagaagaaagtaggtggaaattatgaggctatcgacgaatgtttcgatacagactactgtaaagatacgccttcatacaacaaagtgaactataatgagtggcttaacgattaccttcgttctatgggcaagcggcaggtggacatgaaaagattggtgatgaggaataattgtgcgggcgaaacattcgatgccgacaacatcatggactatgccattgggtatggatttcgatttacaaaggaacagaaaaaccgtattcggcaagtcttgtattacagtccattgataccaggtccaaagaaaaatcgttctaagagtcgagctttgagacacgaggacgacgaggtatatcaattgcctattcaaacgatacgataaaaaagataagatgacacaatataagattacggctccgagctattttgatcataccgttcaattgccatcctcgaagagtgtgagcaatcgagctttgattatccatgctttatcgggtggaaaggttcagccacatcatctttccgactgtgatgatacgcaagtcatcatgaatgctatcatgcacatgccaccagtgatagatatcaaggcggcgggaacagctatgcgtttcctcaccgcatttctttccatatccgagggggaacatgtgcttacaggaacagaaagaatgcaacatcgtcctataggacctttggtagatgcccttcgctatttaggtgctgatatcgagtacatgggcgaagacggttatcctcctctttgcattcatggaaaacagttggttggtggtgatatagagatgcctggcaatgtgagttcgcaatatgtatccgccttgctcatgttaggtcctgtccttccgaaaggcttaaacatcaagttaaccaatggcatgatttcgcgcccttatatagatctcacactttgggtgatgcaacagtttggggctgaagttgagtggaccgacatagataccattgctgtacgtcccaatccttatgctccctgcacctattacatagagagcgattggagtgcagcatcgtattggtacgagatattggcactgtccacgcatcgtgacaatacctttttcctgccaggcttattggatggttccaaacaaggcgattcggtgttgcgctatctcttttcattgctaagcgtcaagacagaagttgaagagggtggtgatactcactcggcaggaatgcggattacacgacatgtacgaaatctgccaagattggaatatgactttgtgaattgtcctgatttggcacagacttttgtggtctgttgtgccgttttggacattccttttctatttactggactgtcaacactgctcatcaaagaaaccaatcgattggaggcattgaaggtagaaatgcgcaagttggggtatgtcatcaaagaacagaataagagtgaacttgtatggaatggggaaaggtgtgaaccttccttcgaacccatagacacctatgaggatcatcgaatggcgatggcttttgcaccagcggcaattaagttccccggattgcgcatcaatcatccagaagtggtctccaaatcttacccacagttttggaatgatttgcgaagtgttgggtttgaaattgaagaaagcaagtaattctaaaaagtaaccacatgatttttctcgttcttttgttaataggaataggcgttgttgctgctttgttcggcttttttgcttcaaaatcgggcgaccatcacgaagaggtcgcattgcctgcacattcgtgtgctacctgtgatggcattgacaaccgttgcgagcaagtctgcatgatggaggcagcaactaaagaaatagaatattttaatgacgaagagttggactgttatcagggaagggcagcggatgcttatacggatgaagaggtgaaggagtttgcagaagtactggaaacgatgcgacaggaggaggtaaaagattggaatagaagtcttatcctgcgtggtatcaatcttcctaatcaactcaaagatgaggtaataatgttgatgagcaatagttaagaatggaaatactgagctatactttctttcaaaatgcactgataggtgctatattggcaagtgtcttatgtggttttatcggaacttacattgtggcacgtcgattagtcctcattagtggtggcatcactcatgcctcgttcggaggcgtaggaatgggagttctcttgggagtcaaccctattttgtctgctttgtcatttgctatttttagcgcatgtggcattcaatggatgtccaaccagtacaatgtgcgcattgactctgccattgctatgttttggacgcttgggatgagtgtaggaatcatttgttgttaccttacgccagggttccttcctgaccttccttcttttctgtttggaagcattttgtcgataggttctgccgatattttgtttctgttggtactcacggtctttgtgatagttgtgtttaccttactatttagagccattcttagcgttgctttcgacagccgttttgcacaatcgcaacaattgccagtaacagctattgaatatctcatgatgattttaattgccatgaccattgttgccaccctccgaatggtgggcattgtgctggctattagcttgctcaccattccacagatgactgctaatctgtttacatatcgtttcaaacgaatgattttgtggagtatcttctttggttggatagattgtttgataggtctaagcattagttacatgctgaatattccgtcaggtgccgccattatctttgtgagtattttgatttatggtttgctcaaagcaataaaagtgttaaggaataagtttattaataatgaggttatggcagcttagatatgtcgctttcctgattcagataatcatacttttattcttagcatcaggttgttccacgcagaaaaacactgcgcggagcaggtggtggcatgcttttaatgcgcgctataatacgtattacaatggaactgtggcttatattgatgcctctttagagaaagagaacggtcatcaggacaattttacagaacttcttccgctttatcctgttggaagtaaaagcagtcgagagctgggaaaggcgaactttgaacgtgcagtggagaaaagtaagaaggctatcaaactgcatagcatcaagaaaagacccgaatggcggtcaggaaagcgtaagactgcaaaggacagagaatggctcaatcggaaagagtataatccgtttttgtggaaagcatggatgttgatggggcgtgcccaatttcattctggggcttttgatgaagctgtatctaccttttcttacatgagtagactttatcaaacgcaaccttctatttatggaagggcacgtgcatggttggcaaaaagctatatcgaacaaggatggttatacgatgcagaggatgttattcgcaatatggagcgagactcagtgcattggcaagcccaaaaggaatgggattatacttataccgattattatatccatacgaaagagtatgcaaaagccattccctatcttcgtaaagttatcaaacatgagatgcgtcgtcgacagaaagcacgacagtatttcttgttgggacagttgtacgaggccatcaatcaaaaagaacttgcctatcaggcttatcgacgagtcatcaggttgcatccaccttatcagattgagtttaatgcacggatagccatgaccaaagtgatggctggaacacaggggcatcagatgattcgtaagctgcatcgcatggctgccaatgacaataacaaagattatttagatcaggtgtattatgccataggtaacatctatttgggacaaaaagatacgttaagagccattgatgcgttcgaagaaggcaacaagcgtgctacacgttctggcatcgagaagggcgtgttactgttgaaattgggtgatttgtattggaatcgtgagaagtatgacgatgccaaacggtgttatggagaggcaataggtcttttagataaggatcgtgaagactatggacaaatggctcgacgctccgaaatactggatgagttggtgccatatacgaatgcagttcagctgcaagattcattgcaagtcttggctcaaatgcccgaagcgcagcgtaatgcggcaatagacagggtaatcaaggcattgaaaaagaaagaaaaagaagaagcagacttgttggcgatgcaatcaacaagacaggaatcacaagacgatttcaatactccctttgatccacaagaaaggatgacgaagcgtaacacattgcccaatgtcaacggacaacggtctggagagtggtatttttataatcccatggcagttaaccaaggcaagacggcatttcaacgtttgtggggaaagcgagaaaatgtagataattggcagcgcatcaacaagactgttgtctctttagggcagcaacaagaactatcagaattgcaacttgactccattcggcagcaagagagtatggaagactctttgcaacaggttcccgatagtgcgcaaaacgaccctcatcagcgtgctttttatttggctcagataccctttaccccagaccaagtggctgccagcaatcaactgattatggatggtttgtatcatgcaggagtgatattcaaggataaattagataacttacgtcttggagagaaagccttgcgacggttggtagagcaatatccaacgtacgagcacatggatttggctttctatcatttattcttgctctattcgaggctacaccaaccgacactggcaaacggttatgtgcagcgcttaaagacgcaatttccgaagagtgagtggactgttttgctcactgatccctattttcaggagaatgcaaagttgggtgtacacattgaagattcgatttatgctgccacatacaacgctttcaaagccgaccgatacgatgaggtgctggcgaatacgcatatttccgaaacacgtttcccactgggtgcaaaccgtgataaattcctttttattggtggattgggtaagttgaaccgtggtgatgctactcaatgcttggcagatcttcataggttggtggaaaaatatccagagagtaaactcagtcctttggcgggtatgattatcaacggagtgcaggcgggtcggaagttgcgtggaggtaagttcgatataggagacgtgtggtcgcgtcgggctgctgtgttaagtgatagcgactcgattgccaagcgaacatttagcaacgagcgcaacaccaattttacgtttatgatcgcttatcatcctgactctgtgaatgaaaatcagttgctgtaccgtgtcgccaaatacaactttacccagtatgtggttcgtaatttcgatgtcgtcataacgcaagacgattttggtttgcatctcatgaagatagcaggatttctcaatttcgatgaagccttgcagtatgcacgtgcttttcacaagcagagagagttggcgtccctattgaagcacgcccgtacttttgtcatcagtgatgtgaatcttgaactgttgggaacgaatttcagttacgatgattacgataaatattataccaagcactttgctccattaaagattagtactttccagttattgaccgagcccacagaggtaaagacacaggcacaacctaagcccactcttgaagaggtagataggttgctcgatgatgctacctttattgataacggtttggaaaataagcctttagataatggaacttatatgattccagtggaagatgcgaagtcatcgactactcaaggcggtacaatcgtcacagtagagcagcctaagaaggaaagcaacagtggagaaacggtgattccattggctcctcgtacaacttcaaagacgccgctgcctgccgattcttccaaaacaaagtcgacaaagccattgccagcgaatgcaaaaaagtcgccccaaaaggtgccaacccagcctgttcagcctgctaaagcaaagtctaagcaagagccgagtaaacaacaaccgcaacgagtgggtgagacgattatctattttgaggatggcaagaccgctaaagacaagaccgtcaagccaaagaccgtagataaaactacggataagaataaaaagaagaagaaaaaagcagagcctaaagtgatagattttggtgatgaatattatgatttagaaggattttagagatgagtaacggattattattgtgggtagatgatgaaattgacttgcttcgtgcgcatatcctcttcttggaaaagaaaggttacgaagtggtcacagtgagcaatggtgcggatgccatcgaggcttgtcaggaacaaaccttcgacttggtgttgctcgatgagatgatgcccggtcttacagggcttgaaaccttacaacaaatcaaggagattcaccctgcaacacccgtggtaatggtgacgaagagcgaagaggagaatatcatggagcaagccattgggtcgaaaattgctgattatctgattaaacctgttaatccaaaccaaattcttctaacgcttaaaaagaacatccatcggcgagaaattgtaaccgaggtcacacaatcagggtatcaacagagttttcaagctattgccatgcagatgatggactgccaaacgctggaagactggaaaggcatttataagcgtttggtacattgggaactggaattgagtgccgcaaatagtaacatgacagaaatgttgcaaatgcaaaaggaggatgccaaccaaggttttgccaaatatataagcaaacattatctggattgggtggctcctcatcaaacaaatcgtccactgctcagcccagatatctttaagacaaagatattccccctgctcgatcaaggtgaaaaagtgttccttatagtcatagacaactttagatatgaccaatggcgagctattgccaacgatttgagtgatatgttcgagatagacgatgacctctactgtagcatcctacccacggctacacagtatgcgcgcaatgccattttcagcggattgatgccacaacaaattgtcgaaatgtttcccaatttatgggttgatgaagatgaagaggaaggtaaaaacttgaatgaagcaccgttgataaagacacagatagagcgttatcggcgtcatgatagttttagttatcataaggtgaatgattcgggcggtgcagataagttttttgaccaactgcacgaactgtccaaaaacgatttgaatgtcttggtagtcaacttcatcgacatgctctctcatgcacgtacggagtctaagatggtgcgagaattggcaaacaacgaatctgcttatcggagtatcacgaagagttggtttcgacactccatgatgtcagagctgatgaagctcttggcacaggcaaattataaagtcattttaacgaccgaccacggcagtatcagggcttcaaagcctgttaaaattattggagaccgtaatacgaatacgaatttgcgctataaattaggaaaaaatctcagttattcagccaaagaagtgtttacgattaaaaaaccagctttagcgcaattgccgtctccaaatattagcacaacttatgtatttgctacgggtgacaccttcttggcttatcccaataactataattattatgtagcttattacaaagatacttttcagcatgggggcattagtatggaagaaatgttggtgccactcattacgctgacaccgaagaaacgagttaagaccaaagaacagataggaaaaaattaaaacaataatgatatggatattaaaattgaatcattagatcatattcatgaggctgcacagcagtttattgataacatgggtaaaggcaatgtatttgctttttacggaaaaatgggcgcagggaagaccacctttatcaaggctatttgtgagtgtttgcaggtggacgatgtcattacgtcgcccactttctccattgtgaatgagtactattcaaacaagttagacgactcgatttaccatttcgatttttatcggataaaaaaggtagaagaagtgtttgatatgggttatgaagattacttctacagtggacgactttgctttttagagtggcccgaactgatagaaggcttactgccaaaagacgccgtaaaggtgcacatcatggagcaagaggacggctctcgattcatcaccttttagtatttaacgaagagttagcattcctaacgttgtgttctcgtagggcttaggcggattgtttctcctattttgagcctacggaacaagcacaacgttaggattttctttatagttttggacgcatgctttttgtagatacgtcctccgtacatcgttgcatccttgttgttcgaagcatcgacaggcacgaaagaaacacatgaagcatccaaaacagactgttttgtggtgtaaaatagactgttttgctcaccaaaacagtctattttccctcaagtctgtgtgctttcagctgcaccaactgtttgcctataaggaagaaaaagtatgcagtaatgttccgtaagcgtaaaaatctttgtatttttgtcgtagacatgactcatactttgttcgtatcggacaaatgtgacaactttgttttcgtttatatcatcaatatttacatatctcagatttgtgatgcaattaagaaacataaaaagacagatatttgtaggagtacttttattcacatcctctgttatcagggcgcagggtccaaatggtactggaacttattatcaacgtacagatgggttgaaaggtgcagcattgaaaaccgcatttcatcaggtaattatggctccaaaggtcaagtcgtataaagaattgtggacggtttatcgtacaacggacaggcgtccagacggaaaactgtacgacatctattcgaacaccactaattatgtgattggtagcaaagcgcaaggtgacaattacagtggtgagggtgatgcgtacaatcgtgagcataccatgccaaaaagctggtttagtaaagcctcacctatggtttccgatgctttccatgtgatgccatcggatggttatgtaaacaatcgacggagcaattatccctatggagagacgaaaggtgagaaatatcagtctaacaatgggtatagcaagttaggaaagtgtacactaccgggatattcgggaactgtcttcgagccgaatgatgaatacaaaggagatttggcacgcgtgtatttttatatggcgacctgttatgaaagtcagattgccaattggaacagcgacgtgatgtcacataataaataccgcccgtatgtaaagtggcagatggatatgctcatgaaatgggctaaacaagaccctgtgagtgagaaagaaaaggcaagaaacgaagccgtttacaaagtgcaaggcaatagaaatccctttgtagattatcccgaattggaggattatctgtggggagattctgtgtctgtagcttttagttatgatcattaccagggcggtcatgcacccgttgttccttcacctgaccctcaaccgggtgtggatccacagccttcggtaactgaagagactctattgcaagagtcgtttgcaaatgggcgtggagaatttatggtggatgataaaagtttgtctgctcacatgcgctacgtgtggtcaccctataaaaacaattatgtgtcgtgcatgaaagcttcagcctatgtacagagtcagaatcaggcagcagaaagttggttggtatcacctgtcatcgacttaacttcgtacacccaagctgttttaacctttgaacaagcatgtaatttcttaaaaatatataagaatagagcaaaggaatttttgtccgtttgtgtgagtgatgatggcggaacgcattggaaaaattgttcggtggatattcctcaccaagataattggacctttgtgtcgacagaagttgatttgaccgagtttgctggaaagcaagtacagatagcctttgtttataagagtacaacggcttgtgcacctacttgggagattatgaatttgaaattgacgtgtaagaaaacgccaacatacatctatcgagtaacaacggatataacttcgttggatgttttgaagccgatgtacgacctgtcaggaaagcgagtgaatcgtcatcatcatggcgtagtgattcaaaatgggcataaatatctcaaaagataagggatgaaaacctgcaaaaaatagcagctgtaatcgtggtagactcataagaagatgttttttcttgtgggtctatctcttttcaactgaatgaaacacgaacgcacagcagtctaaatattgttcagcgatgttttcaaagtcttagattttttgtatcttagccgaaaattggaggcaactatgataaaacaatgttggatatatctactcttattgatagtctgtggatgcggtgtgacgcaacagagtagtcgtcaaaaggcagcacaacgtttggatacggcatcaacagttgctcatgtcttggagagtagaacatgggaggcagaaatgacctatgtgatgccgctccgcatgcgtatgaggtatttacaagatcgctatgggttgaagctttcgggtgacactttatattctaatcttccttactatgggcgtgcgtacagcattccttatggtggtgggaaaggtttagtttttcaagcacccatacaggattatcagttaaactattccaaaaaaggatttgccagactaagcattgatgtacgaaatgatgaagatcggtttacgtatcagcttgatgtttttatgaacggtcatgtagatttggttgtaaggtcgcaacaacgcgacccaatctcctttagtgggaagctggttcatacaaataaaactcatcaataaatgtctccatgctatgaatcatgtacggcattgcgaatcattgtgagtgtaatcgttaggtaatcatgcccatttcaccgtcaaataagcatcatcatcatgagtcatccaaaaggaaaaggtggctaagggtagggggaatcactgtttccgccctgtttattctattctgtttcttgattatcttatttccagaacaatatagaaacttgttgtataggtggaatttaggaagtgatgatggagtagtggcagcccatgtgcgcagtcgttatcattatgacggaatagacgtttcgcattatcaaggagaaattgactgggctttggtggcaagtgacacctgtattcagtttgtttatgtcaaagcaacagaagggagtacccacgtagatacgttttatcatcgcaatatgagtgatgccaaggaagtgggactccatgttggttcttatcatttccttacttctaccagttctgtgcatcgtcagttcaaccattttaaggctcatatgagtcaacatcaacaagatttactgccgatggttgatgtagaatgggctggagtaaagggttggagcaagcaacagctgcaagacagcttggcggtttttctatggttggtgaagcaacattatggtcgttatccattgctgtatgcagactctcgtttctataatgcgcatctatcgccacgttttgacaaacttcctctctttatagcacgatacagtgaggaagctccgatagtaaaaggcgcacatcggcacttcatttggcaacgtgatcagtacggttgggtggatggtatcaatcatcatgtggatctgaatgcctttgcggtggggacaaccttagccgacattctgcttccacctacgacagtaggggagtaaatgaagtggagtaatcgtactggagactgctgtggctccttcttttagcttttatttcagctccaattatcttttatttcagcaccaattccacggggcaatggtcgctacccattatctcggtgtgaatctttgcatcgtgtaagcgttctttcaagcgttctgaaataaggaaatagtcgatacgccagcctgcattcttttctcttgccctgaatctatacgaccaccatgagtatgtaatctgctctggataaaggtaacggaatgtgtctatgaagccgttgtccagcaatttagtcatcttattgcgttcttcgtctgtaaagccagcattgcgtttgtttgtctttgggttcttcaagtcaatctcttcatgcgcaacattcaggtcaccacaaatgattactggcttgatttggtcaagttgggtaatataagcacgaaaatcatcctcccatttcatgcggtaatcaagtcttttaagttcatcttgtgagttgggaacatacacggtgatcaagaaaaaatcttccatttcaagcgtaatcacacgtccttcttggtcgtgttcctctattcccaagccatagctcacatgaataggtttgtgttttgtgtagatagccgttcccgaataacctttcttttcggcatagttccagtatgaagtatagcccggaaattgcaaatccaactgtccttcctgcattttagtttcttgaaggcagaagaaatctgcatcaagttgttggaaagattcttgaaagttcttttttacgcaggctctaagaccatttacattccaggatatgaatttcataaagttacgtttttatagtttgttggtaggatgaatcttgtattgaatagcttgaggtgttccactcatcctcttcatctgatgtcttgattaaattttccttgactctccacgaagaagattcataaactcttcacgtgtttttgcttggttaaaagcacccgaaaaggcactcgttgtggtgatagaattttgtttttcgactcctcgcatctgcatacacatgtgttttgcttcgatgacaaccatcacgcccaaaggttgcaatgcctcttgtatgcaatctttcacttgttgagtgagtcgttcttgaacctgaagtctgtgactgtatatgtctaccacgcgtgctaccttgctcagtcctgtgatatgtccatgaggaatgtaagctacgtgtgcctttccataaaagggcagcatgtgatgttcgcataaagaaaagaagtctatatcttttacaatgaccatttggtcatacttttcttcaaatagtgcatccaatagcactcgtttaggatcttgtgtatatccccgagtgagtacctgcattgcctttgccacacgcatcggtgtcttttctaatccttctctatctggattctcgcctaataattgtaatatttcttgataatgtgatgcgaggtcatccaaaccttcgcgaaattcatttgtttgattcatgcgtattgtgtgcttctatgattaatattgtacggtaatttttcctcgaacaatgcaagcttgtttgtacccaagccctttgacttgttttagtattcttgcagcttcttcgtagctacgatagtttccaacacggcaaatccatcttggcgagtagaaatgtacatagatcggttcgtttggaagtacttgtttgatgttgtctctgatgctttcagctcgaagtctgtctgctcgcgagttacctccagcaaatgcttgtacccgatagccattgattttgtagcttttgcgcattacttttttgcgcatatctatggtaggaatatccaactcaaaggtagacgtatcctcttttgtagctcgtctttcggtggctttggcagaactttcctgcttattattcctgtcttctttcgtcttatccgtaatcttatcctgcttttgtggtgttagaggatggattgaaggcttgtcatcttgtttcgatttgctcgtagttggtgcttgaggtagcgtagtgatggtgattttgacttttccgttaaccaattcgtctatatctttactctggctaactttcacagacgcttttcctggctctttcttctgtaagtgatccaagaatgactgtgcttcgctatgaatagtagcacatgtcaaaataaacaataaagtgacgaattttttcatgtgagttttctttcaaataaaaatgatgaagcgagacatagcaatgaatttgctcacctatgtctcacttcatgctaagcgtttttacttcttccatgcatcgatgatgcccttaaagtcagcgcacttcaatgatgcaccaccaattaagccaccatctatattctctttagcaaagagttcgggtgcattacttgccttgcagctgccaccgtataagatagttgtgtcttgtgctacttcgtttccgtatttctctgctacgatagaacgaatgaaagcgtgtatctcttcagcttgttctgctgtagctgtctttcctgttccaatcgcccagataggctcatacgcaataacgatgttcttaaactcatctgcggagagattgaatacagaaccttcaagttctgctttcactacttcgttctgcttgttgctttcacgctcctctaaagtctcaccgatacagaatataactttcagtccattcttcaaagccaacaatactttttctttcaaaatctctggagtttccttataatactgacgtctttcagaatgcccaagaattacatattgtgcaccagtgcttttcaccatctctgctgaaacctcacctgtgtaggctcccttctctttgtcagcacaattttctgcacccaatgcaaccacattttggtctaacacttcggctacacttgccaagtggataaagggagtgcaaacaattacaccgcaattaggcttttctgcctttaacacttcattaatttcctttgccaaggccacaccttcttgcaggttcaaattcattttccagtttcctgctacaattttttttctcatatactaatcattgtttaaagttgaaatactatcttctgttttctcttgtgtaagttcttttttcttttgcttaaatcttaaccatctgctccatgcccataaacggtcggcaactgtaagtaataataagggaagtacgaaccacaaaaagataatcatcattcttttggggatgctattctcttctatcgtaccgatttttgacagatgcaacggcttttgaagttctgcttcctgaggcaaattatgatgactccactttctgataatgataccattcttcagtaatatcaatccagggttactgcgaataatagttttcagtgttgtttcatccgttctgcaaaacggatattcagcccctgttaagtcttgccaatgttggatgttctctttcgtacttgctgttaaacagtagaatggatagtcataggtttgtgcatattcgtaaattcggtcgatattgccaaaattcaagtcgcttgcattctccagatgtggcgaaatgagcaagaaagtgtagctcgtatctgcaagaatttcctctgttaaatcctctccttccaaggtctgaatgctgaagtcatgaatgggaggcacgtatccttctgttaattgtgttgttttgctgtccacaaattcccatgtggagtcagggtaattgtcaagtgtaaactcttttgtttctccattcttcttcagcaaaaacgttgtttcaaacttgggttgttcagcattttctggtatttccataccctttgggatgttcgctcctatatgataaggacggaaatcgaaaaaaggtaatttatataaacaatacaagctggaggcgatgatgaagagaatggtgtagttgaagacaatccattggtttgttttggagataaatctccacatgcgcaacggccataatgcaatgataatagcgcaccccagcagcacaatgttcttgactaaagtctccatgttgctcagatgaatggcgtcgccaaagcatccgcaatcgctaatagggttggcaatgacaagccaaagcgtgacgatggtcatagcaaccatgaacgtcagtgttatcttggacaccagtcgtctgcgaatagccaacagaataaacactccaagactgaactctatggcagataatcccacggaagaagccaatgttatccagtctggaaccattccttggcatgacaatgcttccaaatagtcttgtatcttgtattgagttcctaatgggtcaatggccttcacataacccgaaaagatgaaggttatggctaataccagtcggcacacattggtcaagatagtcttcactttattcactaagcctgataacgccaaagacagcgtagttgataatatccattaaatttgagtctatgccttcagaaacgattgcttgtccgtgaatatcctccaattctttcatcctttggatttttgtaagaatgaaatcggtgtagctactcacacgcatcattcgccaagcctcatcataatcatgatttttcttgagcatcagttctaaaacttcctgtacatgtcggtcgtatagcgtcatggcttccgtggtattgatatcaacttcgtcgacaaagcctttctctaattgtatcaatccgataattccataattaatcaatgccatgaattcaggtcgtatgccttcttctatcatggctttctttttcatttcgatagaccgaatgcgcttggctttgataaacaactggtctgtcaatgaagacggacgcaggattcgccacgatgcactgtagtcgtggagcttattctcaaacagtgtccggcattctgccagtacatccttaaactgctcttctgtctttgtatggttcatattatagtgtgcaaatttaatcaattctactggaatagccaaagaatgtgacgagtgaattttgtgtttgttatcgggtagaagttttgaagtgtgtagatacaaaaaatgaagaaagcgttaggatgccctattgattaacaatctttcttcaattcctatgatgtttggcagaaattgttactggttggctgcgtgctgatattcttttgtatcttgtttctgcctcattcgtatcattctcaccacgccacacatggcttcgtatctggctttcagagagtcgcgctctactctcatcatgttggctttgtacaagttgtcttctccaggtatctctctcaggatagcttgtagtgcagagtcggtttgcgcaatgtcgtattgcgctaacttcagtgatgcttgttgccataggcgcaaactttctctcctgctctttatcgctttcgggaactgcattctcaaagcggtaatagagtcgagtgtttgcatatattcgcctcgctcatagagagccttgatttgagcgagcaagtgggctgcctgttcgtcttctgatggagcgcacgagacgatggtcaaggcgcacaatatcaaccatgtaaaaatcttcatgtcgcaaaaatactaattttctgcatgaacgcatccaaaacgttgcttatttttagtaactttgcagccacttaagaagttttatcattcaagacggttgttgtctgtcttcattattaaaattaaaataaccttgagagcttcatcccgaaagagatagggatagtctctcgtttgacttatgcgaaatctttcgaatgccgatttggcgcatcttttagataatgatatctttcatcaaatatccgctgttgccgaccatttagatgtagaatgttacgtggtgggtggttatgtccgcgatcttttcttggaacgtccatccaatgatattgacgtggttgttgtcggtagtggaattgaggttgcagcagcattgaaacaaaagttaggcaaacgtgcctatctctcggtgtttcgcaattttggtacggctcagattaagttcaaggggctggagatagagtttgtgggtgccagaaaggagagttacagtcacgattcgcgtaagcctgtggtggaaaatggtacattagaagacgatcagaatcgccgagattttaccattaacgccttggctgtctgtctcaatcaggcacgttttggagagttggtagaccctttcgatggattgttagatttggaagacggactgatacgcacacctcttgatcctgatatcaccttctctgacgaccctcttcgtatgcttcgatgtgttcgtttctccacccaactcaagttctttattgaagacgaaacctttgaagctttgaggcgcaatgccgaacgtataaagattgtgagtggtgaacgcattgctgacgagctgaacaaaatcatgatgaccgatcatcccagtagaggatttatagaattgtatcgctgtggcttgttagagttaatcttacccgagctggtggcaatggatcaagtagacactaaaaatggcagagcacacaaaaacaatttttatcacacgttggaggtggtggataatatctgccagcacaccggcaaattgtggttgcgttgggcggctttgtttcatgatataggcaagccacgcagcaagcgttgggactcgttggtggggtggacattccataaccacaattttattggggctaaaatggttcctggcatttttagacgacttaaattcccgttggatgccaaaatgaaatatgtgcaaaagttggtggatatgcacatgcgacctattgcaattgctgatgacgaggtaacggacagtgctgtgcgccggttgatgaatgatgccgcagacgatatagatgatttgatgactttgtgtgaagccgatattaccagtaagaattcacagcgcaaaaaacgctttttggataatttcagaatagtcagagcaaagcttgatgacttgaaggagcgtgactacaaacgcttgctacaaccttgtattgacggaaatgaaatcatggagctgtttcatctcaagccttctaaagaggtgggagcgctgaagcaggcattaaaggatgcggtgttagataacaaagtgcctaacgaacgcgaacccttgatgaaacttcttttagaaaaagccaaaaagatggggcttgagaagtagcgcttttcaagcggttgtgaattgtcagctatgatttttaatgcaggtaggtctttacaaggctctatttcatctgctttttgtgtagatttttgacgagaaggagatttcaattttgtaaatctttttggtagttttcaattctgcaaaatagaatttttgaaggtgtctcaaagcttcaaaaggactgttttttagctcttgtgttgctaactcaatgggttagtctctctaaagacacactctaagggcattatgaacatactttagtgggcttgaagtaatgagttaagagggctaaagcatgtcttcaatgcaagaaaatatggcgttatttttataatctgttgaggtttaaggagttgtaaaattcgcatatttgcgagcaaaggtgcacctgtttccaaatatgcgagtatttggaaagcaaatcaagattttttaccatttttgtgaactataatgaagtccttttgtcctattttttgcaactttaatggataggttggttggcggataaaactcactatttgtcctctcgttcaacgccattagataatcatatagcaaggagcaatcatgtataaaactgttcgcttttttattagaatcaatgcaatatttgttaaaagtacccaaggggtacggcatttctcataaaaaacaagtacttttgcaaagtaaaaacttgaacacatattagagttttctgttgtgttcgattcaggatgacaaagataaaaacgaagaaataataaaaaatgaataagatatgagacgaaaaaacgtgtttttgttggctgcttttgctgtgcttttagccgcctgtggaggtaagccgaacttgaagtttggcgacaacgaatttccagtacaaacggttgagagtacaggttcatccactcagaccacttatcctgcggtcattaagggcattcaggatgtggagattcgccctaaagtttctggtttcatcacgaagttgctcgtacaagagggacaaactgtgaaggctgggcaactattgttcgtcattgataacagcactttccaagcctcagtgcgccaagctcaggcagcggtcaactctgcaaagtcgcaactgcggaccgcaaagctaacgtttgagaatagtgagcaactgtttaagcgtaatgtcatagggcaatacgagttgcaatctgcacagaacacgtacgaaacggcaaagagtgcggtggctcaagcacaagcgagtttagcctctgcaaaggagatgctcaacttctgttatgtgaaaagtcctgcggcaggagtggttggtagccttccttttaagcaaggagccttggtcagtgcgtccagtccacagccgttgacaacggtttctaatattagtactgtggaagtgtacttctccatgaccgaaaaagatgttttagaaatgacaaaaactgctggcaatgtgtcggcggctattgcttccatgccaacggtaaagttacaactggcagatggcacgatttacaatcagctgggtaaggtggtaaagatgagtggtgtcatcgatcaagcgacaggaacactgtctatgatagcacgctttcccaaccctgacaaactattgaagagtggtggggcaggttctattgttgtgccaaaggtgagccaaggtgccattgtcattccacagtcttacaccgcagaggtgcaagacaaggtgtttgtgtacacggtgggcaaggacaacaaagtgaagtatcaggagattaaagtcgctccacagaatgatgggaagaactttattgtcactggaggtttgaaagtgggcgaccgaattgttacgcacggcatcacgaaactaaccgatagcatggagattaagcccattaccgaggcacagtatgcaaagaaaatagctgaagccgagaagttgggggagatacaaggtgactatggtaagatgaaggaggctttcaaataaagatgtttcaagtgccgtgtttcgttgacagggcaaaaatgttggctatcaagccaacgacaacatactataaattatgacattaacaagatttattaagcggccagttctttcaacggttatctcggtggtaatcgttatcttgggatttattggattggcaacgcttcctatagaacaatatccagacattgctcctcctaccatttcggtatggaccacttatattggcgcagatgccgaaacagtgaaaaactctgtcttggctcctcttgaggagagtatcaacggagtggagaacatggagtacatgacttcatcggctaccaatgcaggaagtgcacaaattaccatttacttccgacagggaactaatcccgacatgtgtgccgtcaatgttcaaaaccgtgtttcgcaagcccaaggactattgcccgcagaagtgaaccgtgtcggtgtaacggtttctaaacgacaaacctcgcaggtgattatgtacacactcacctcagaagacggtaaatatgatgacaggtttttgaccaattataacaatatcaatattgttcctgccattaagcgtatccaaggagtcggcgatgtgcagagcccgggcatgaaaacctattctatgcgtatatggttaaagcctgatgtcatgaagcaatacggcttaattcctaccgatattgcgggtgcattagcagaacagaatatcgaagcggcacctggctcgtttggtgagcaaagcgacatggcgtacgaatatgtgatgcgctataagggtagactgaagacagcagaggagtttggcaatattatcttgcatagtacacagacaggacaaaccttaaagctgaaagatgttgcaaagattgaactcggaggactgacttatgcggtcagtatgcgtaacaataataacccttcatctatgggtatggtgcaacaaattgcggggtcgaatgccaatgtcattgctaaagcggtgaaagaagaattagacaagcaggctaaaaacttccctccgggcatggaatataagataaattatgacgtaaccgagtttttgtacgcctccattgaagaagttgtcaagacacttgtcatcactttgttgctcgttttcttggtggtgtacatcttcctgcaagacttccgctcgaccatcatcccaatgatagcagttccagtgtcattaattggtgctttcttcttcttgaagatgtttggtttttctatcaacctgctcaccttgtcggcactgttactggctatcgccatcgtggttgacgatgcgattgtggtggtagaggcggtccatgccaagttggatttgggttataagagtgccatgaccgccagtattgatgccatgagcgagatagcaggtgctattatatccattacgttggtaatggctgccgtgttcgtccccgtatcttttatgggcggaacgtcaggtacgttctatcgagagtttggagttaccatggcagtatctatcttcatctctgccctcaatgctctgacgctctcgccagctctatgtgccatttttctcaaacccaagaatgaagacgggtcggaacgtgagatgagcaggatagaacgttttcatgcgtcgtttaatacgagttatgacaaggtcttgggcaagtacaaaaatagggtagaaaagctggtcagaaaacctatccttacaggtgtgtttgttttggtgggtgccattgccctgttcttaacgatgaaaaccactaaaacaggattagttcctaatgaagatacgggtacattgttctgtacagtgtcaatgcctcctgccacaagtgcagtgcgaacgcaagaggtaatagaccaaattgatgcgatgctggcaagtaatccagctattctgagtcgtgaacaattgcaaggattcaacttcattgcagggcaaggctctgaccaagccacgtttatcattaagttgaaaccttttaaggatcgcaacatggggcagagtgccatggctgttttgggtatgatatataagcaaacggctcaaataaaagatgcacaaatattggcatttgcgcctccaatgataccgggtttctcggttagcaatggcgtgtcattggtgttgcaagacaagacgggtggagatttgagcaagttctttgacattacgaagcaatacttggcagaattgaacaaacgcccagagatacaaatggcgatgacctcatacaatcctaattatcctcaatatatgattgatgttgatgtggctaaatgcaaacaggtaggcatatcgccagccacggtgttaagcacgcttcaggggtattatggaggtatgtacgtctctaacttcaatgcttacggcaagttatatcgtgtgatgatacaaggagatgtggatagtcgtgcacgaccagagggcatgaatgacatctttgtgcgtactccagctggcatggctccaatcaatggattctgttctatcaggcgagtgtatggtccgtccaatgtgaatcgcttcaatatgtttaccagtatcaacgcaaccgtaaccgtcaatgacggttattcatcgggtgaagccatcgaagccattaaagaggtggcggctactaccttgccacagggatatggttgcgatttttctggcttgtcaaggtctgaaaacagctccagtaactcaacggtgatgatctttggattgtgtctgttgtttgtttatctcattctggcggcacagtacgagagttatcttttgcccttcgctgttatcctttccattccttttggtttagcaggagcgttcctgtttacccaactgtttgggcataacaatgatatctatatgcagatttccttgattatgttgataggattgttagcaaagaatgccattctgattgtgcagtttgcactggaaagacgacaaactggtatggctatcacatgggcttctattcttggtgcaggtgcacgtttgcgcccaatcttgatgacatccctggcaatggtgataggtttgctccctatgatgtttgccatgggcgttggtaagaatggtaatcaaaccttaggagcggcagctgtgggcggtatgttgataggaacgttctgccagttgtttgtagttcccgtcctgtttgtcatcttccaagctcttcaagagaagataaagccattaaaatttgatgatgaagaaaatttggaagcggcagctgagttgcgtcaatatgcacggaaacctttgccagaacaagttgaagcgtaaaaaatagatagatatgaaaatacaaaatatcctcttgattgctatttctgcaatgagtttgacaggctgtaaaagtctctatggggtgtacgagcgaccagctgtgaagatggaaggactggtgcgtgatgttcaatcttcaacagatacattggtagtgaccgatactttgagtttcggctacatgccatggcgccaagtgtttacagatgttcagctgcaaaaacatatagagcaagcacttgccaataacttggatttgctcaatgcagcacagaatgtgaaaatggcagaagcccagctcaaggctgcgaaattgtctattctgccctcgttcaccttcgcaccccaaggaactattgcttcatgggatggcggaagtgctacaacaacctatcaactgcccattgcagcgagttggaatgtcgaccttttcggaaatcttttaagtcagaagcgttcctctcaagttgccttgttagcgtcacaagattatcagaagttggttaggattaacatcatcagtggtgttgccaatctctattataccttattgatgctggataggcagcttgctattgtggatgacatgcacggattgacgaaagaaacgtgggaaaagatgaaggtgttgatggatttagggcgtggaatccgctctactggcgtgcagagtgccgaggcaaattattatgctgttgaggcaaagcgtgcggatttgttgcgacaaatacgagagacagaaaatgcactgtcactcctcatgggacaacctgcacagagtattgtgcgaggaaagctcgaaaatcaaaccttaccgcagcgtttttccacagggataggtctccagttgctcaataatcgtcctgatgttcatgcggcggagatgcaattggctcaatgtttctataacgtgcagacggctcgtagcagattttatcccagtctaaccatctcacctacaggtgtttttaccaatagtatgggcggcatggtggtgaacccaggcaaatggttgctatcagctgtgggtagtttggtacagcctatcttccaacaagggaagatagtagcaggcttgcgagttgccaatgcgcaatacgaaaaagcctataacacgtggcaaaacagtattctaaaggctgggaatgaggtaagcaatgcccttgtactctatcattcttccgatgaaaagagcaggatagaggcaaaacaaatagaggtgttgcaaaaaaatgtagaagataccaaacttctgttgcatcagtcaaacagcacttaccttgaggtgataacagcgcagcaagcactcttgaatgctcaaactgcgaagattagagacgacttcaataagatgcaagccattgtaaatctctatcaggctctcggaggtggtgtacaatagtggtttacgatgacaaaaggcaaaaagtgaatgtttcatgagccttatcaatttatttattcattcaattatcattaacagatatggcaagcgacatcagtgaaaaagcgcaaatagcatcaagtgcaaagatagggaacaattgtaagatatatccatttgcatatatcgaggatgacgtggtgataggtgacaactgcgtggtgtatccctttgtgagtattatgcatggaactcgtatgggtaatgataatcaggtttatcaaggttctgtgttaggagcggttccacaagactttgaattcaaaggcgatgatactgaattgcgcattggcgaccataatattattcgagaaaatgtagtgataaaccgagccactcatcacggcggacaaactattatcggtcatgagaacttcctcatggaaggctcgcatatctctcatgacaccaaaatgggaaaccagtgtgtgttgggatatggaacaaagatatcaggtaactgcgaaatagggaatggggtgatctttagttcaagtgtcatcgaaagcgaaaatacacgcattggcgattatgcaatgatacaagcaggcactactctctatcaagatgttccaccatatattattgctggtggcatacctgctaaatatgctggactgaacagtatgatgttacaaagctatggcatctcagaaagggtgcaaaagcatatagccaatgcttatagattggtgttccatggtcagacaagcgtgttcgatgccgttctacaagtacaagaacaggtgccaaatggtgaggaaattgatgagatagtgcgctttatacaagcgacaaaggcagggattattggaaaattgtaacagccctaagcgagctgttacaattttatggggtggatcagcgagttgctgacctactttttcagaatgctattcaaaaaataagcgtgaactctggtgtcattgtccagttctggatgaaaggctgttaccatttggtggtgctgccttgctgcgacaatattcccatcaacggttgccaatatttcggcatctccaaatacttcattgatataaggtgcgcggataaaggtcataggtatcgttccttcgattcccttgaaagcctcttccgtatgaaaactccccaattgtctgccataagcatttctacaaacgtcgatatccatggtagaaagtcggtttgatagctttccgttctctttgcgagccagcataatcaatcctgcacaagtaccaaatacgggcaatccttggttgatttctttctgaataggtaacagtaaatccaactcattcaagagttttatcatggttgtactctctcctccggggagaataagtccatctttgggcttttcccaatcgcacttgtttcgcacttggaatgtttctacccctaaagaatgaagcatttgctggtgttcagcaaatgctccttgtaaagctaatacggctattctcattactctatttacccctttctgccatcaacacttctatttcgtgctcgttgatgccaaccatggcttcacctaagttctcggatagctcagctaaccgcttcggatcgttgtagttggttactgcttgaacaatggcagctgctcgtttaacagggtcgccagacttgaatatgcccgatcctacaaagactccttcggcgccaagttgcatcattaaagcggcatcagctggtgtagctacacctcctgcagcaaaattaacaacaggcagcttaccgttttcatgaacatactttattagttcgtaaggaacttgcaattgtttggcagcttcaaacaactcgtcttcagccatagcctttattcttctcatctctgattgcatcatgcgcatgtgcgttaccgcctgtacaacgtctccagtacctggttcacccttggttctaatcatggttgcgccttctgcaatgcgtcgcaaagcttctcctaagttcttggcaccgcaaacaaatggtacttcgaattgggttttatcaatgtggtaaacattgtcagcgggtgacaaaacttcgctctcatcaatataatcaatttcaatggcttgtagaatttgtgcctctgcaaagtgtccgatacgacatttcgccattacaggaatgctaaccgcctcttgtatgctcttaatcatgtgtgggtcgctcatgcgcgacacgcctcctgcagcacgaatatcagcgggaatacgctcaagtgccattactgcacaggctcctgcatcttctgcaatgtgagcttgttcgggagttgtaacgtccatgataactcctcctttgagcatctgggctaagtttcgatttaaaatttgtctttctgtcattttgtttattatttattgattcgatatatactcggtgtaattccttcagccttcttaaagaatttgctaaagtgtgattgtgaatgaaaccctaatgcgtatgcaacttcttgaacggtcttactggtggtgtctaagagtagtttactcttggttaatagatgctcatcaataagactcttgggtgtcttctgtccaattcgtttggtgacctgtgccaaatatcggctgcttacgcccaaacgatgggcataaaattgtacatcattattggtggtacaatgaagttctatggcttgtataaattcgttgtacagctcgctgcttcgaccttttaaggctccaaagtgactcaactgttgttggatataactttttccctcgcatactgcttcatgaatatctgttgaaacggatagataataggctattgcggaagatagactgctacccagtccgtgcgaatttgtgagatttaaggttggaaattcatgctggttgatttgttcacctgaacgccatatcagcgtgtcgttcatgtttccactatgtaacatgacccctttgcaacctaaactcagaaattgtgtcattcctgctttcatgctttcttttgttgcttcagtactgttgatgaacacagcagcatcttcttgcttcataattaccaatgaacaaagcggaaagagacgttctttcacggcatgaatcatgtcggatgtcatcaatggctcaccctgactggaggtcacaatggggtcgtaaataatggtggaagcgtgatgctgatgtaacatctcaatgatagcatccagggttttgctattgcgaaccattccaatcttgataactgcgggttcaaggtcgtcaatcaatgccgttaactgtcctgctacaatgtcagcaggaatatcgtaaaagctttgaatgcccaaggtgttttgaatcgtgatagaagtaattaccgacacagcataaccacccaaagccgtaatggtcttgatatcggcttggactcctgcacctcctgttccatccgaacctgtaatcgttagtatggtatgtcgatttttcattgctaattattctcaatgggcagatttgacagtttgataagctgtcattctctgctcgtacaaaggaaatgaaaaaatatgaatgccacaaatatagttcgcaaatttacaatgaataggtacttttatataagctgcgacatggaacacgaggcttgaatgcaggatgtttgttggtctatctaactcatgaagaaaggtggatgaatagggaaaggtctaataggttgataacttgcagaaattggcgcattgctttagtctccttaagcagtgtgggtcatacggttgaactaatgatttcttattagatctaacgacgaacttgtttcaaatgtttggcataaaagaattcatgtggtggtcatcgctgagattgggtgttacaaccttcactcttatattggataaaatcaatctgaaatgaaggcgttatttttattgagcaatcacgttaatagtagttaaagcatcgttttatccctaatttttttgttactttgcgagaaatttggtgcattatatccataaaagaatgggaaagaaacaaaataagaccagtaatcatcatggattacaggctattactctttgtataagcacagctttggtactcatcttgttggggttagttgtattctcaaccttaacaggaaggaacctttcctcttatgtaaaagagaatttagttgtgcagttgatattagaaaatgagatgacaaattctgaagcacagcgaatgtgtgcggtgattcagaagcgtccatatatcaaacaactcgaatatatcagtaaggaacaagctctgaaggagattacatccgctatggggagcgacccgtcggagtttacagatggtgaaaatccttgtcctgcatctatcgaagtaaccttaaaatcggtttatgcgaacaccgattctctgaaatggatagtgagtgagtttgaaaaatatccacaaatcaaccaaattaattaccagaaagaactagtagacagcgtgaaccgcaaccttgccaaaataggtttggtaatgttagtgttggcactgttgcttacttttgtatctttctccctcatcaacaacactgtacgattggatatttatgcccgaagattctccatacacacgatgaagttggttggtgcttcatggggatttatccgcagaccctttgtaagcagagccgtttggacaggtttgatagctggtttgatagccaatttagtgttggcgggctgtatttatgcgttgtatctatccgagcctggtatcttgaccgttgtgacttggcgcgacatggtaattactggtgcagccgtattcttgttcggactcgtgataacggctatttgcgcccacatttcggtaaacaaattcttgcgaatgaaggcaggagatttatataagatttaagaaaataacgttgaaaatcaattcagaactccaccttattatatataggtaagttcgaataaacaaatctatcagatggataaaagaaattttgcgttcgataaagtcaactttatgttattggcgattggtgttgttgtcgtgattatcggatttctgttgatgagtggaagtggctctacggagacagcatacaatccagacatctttagtgtacgacgtatcaaagtggctccagtagtatgtttcttgggctttgtatctattatttttgcaattatcagaaagccaaaagactaatacgttgtgtgatttatgagcttacttgagaccattattctggcaatcgttgagggtttgaccgagtttctgcccgtttcttcgacaggacacatgattattactcgcgacttgttgggcatgcaggcagacgatccgtttatcaatgcctttattgtcattatccagtttggtgccatcctttcggtggtgacactttattggaaacgtttttttcgcttagataacactcctgtgcctgaaggaacgtcagctgtgaaagcatttattcatcgttggaatttctattggaagctattggtggcttttattcctgctgctgttatcggattgttagccaatcatttgattgaaaaaatgctggggagtgtcattgtcgtggctgtgatgttggtagttggtggcatctttatgcttttttgcgatagaatctttaatcatggtcaagagtcaacctcgttgacagataagaaagcctttatgataggtgtattccaatgcattgccatgataccgggagtgtcgcggtcaatggcaactatcgtaggaggtatggcacaaggattaaccagaaagcgtgcagcggagttctcattcttcttagctgtacccaccatgtttgcagctacttgtcttgatgtattcaaactcatcaaaaacggaggtgtagatgccttgtcgtctcatgtccccaccttgctgttgggtagtgctgttgcctttgtggttgcgctattggcaatgaagtggtttgttaatttcttgacgaaatatggctttaaggtctttggagtttatcgaatcgtcgtcggaggcttcatcttggtttggctcatgatgggacatagtttggcaatggtcgattaagttcttaagttgaggggctttttagtaaaattattttgtacacatgaatgaatggagttgcttactttggagaacgcttatatgccgatgagttgaaaaactcaatcacttgacaactcaaaaacgcacaacatgaacttttataaaggagagatatttgctatagataagccgtacggtatgacaagctttggagcattggcacacgttcgctatgtcatatctcgaaagttgggcatcaaacgcattaagataggacatgcaggaacactcgatccattagcaacaggcgttttagtgttgtgtacggggaaggctaccaaacaaatagagcagttacaagcgcatacgaaagagtacgtatgtacgatacaattgggagctactaccgccagttacgattgcgaacatcctgtaaatgctacctatcctacggagcatattacgcttgagcgcatagagcaggtattaaaactctttgttggagagatacagcaaacacctccaacctatagcgcatgtaaggttgctggtgagagagcatacaatttaaggcgagcaggcgaagaggtagcactacaagcgaaaacggtgcgtattgatgaaatagagcttatccacttcgaccccaataccatgcagctacaactgcgcatcgtttgcggaaaaggaacatatattagagcacttgcgcgtgatcttgggcgcactttggacagtggcgcatatctgatacaactacgaagaacccgtgttggtgcattgacaatagagaatagtattaacttcgaccacttcaaagagtggctgaatgaacaagaaatagatgaaggacattaatcaatgaagctatcacaattcaaatttaatttgccagaagagctcattgctctttaccctcatagtgtttatcatgagataaaaaatgctcaaggcaagaaagaaatctcacgaatgacacgtcgtgacgaatctcgattgatggtgttacaccgaaaatcacagaccattgatatgtttcaaaaggacaaaaaagggaaagatatcaaggggcaatatcttgagtttagacatgtacttgattattttgatgaaggtgatacttttatctttaatgacacaaaagtatttcctgctcgattatatggtacaaaggaaaagacagatgccaagattgaagtcttcttgctccgtgaactcaatcaggaaatgcgcctttgggatgtgttagtagagcctgcccgtaagattcgtattgggaataagctcttctttgatgagagcggcacgatggtggcggaggtaatcgataacacaacgagtcgtggtcgtacactccgatttctttacgattgcccgcatgaggagtttaagcgtgaactttttgcgctcggcgaaacacctttacctcgttacatcatcaatcgacgtgaagtacctcatgcagatgcgcatgatcaggaagactatcaaaccatttttgcaaagcatgaaggagctgtcagagcaccttctacagggcttcatttcagtagagaaatgctcaagcgtatggagattaaagggatacatgacacttatatcacgcttcactgcagcttgagtgcgtttaatagcattgaggtggaagacttgaccaaacataaaatggattcggaacaaatgaagattgatgccaaagcctgtgaaatcgtcaatcgaaccaaacaggaggggcatcatgtctgtgccgttgggacaagtgttgtcaaggctacagagacggcagttggcaccgatggactgctgaaagaatatgacggctggactagtaaatttattttcccgccttatgattttggtttggcagacacgatgatagccaatttctatcacagcatgtcacctttgctcatggaaacggcagctttcggtggatacgaattagtgatggaggcttatgacctggcagttaagaacggttataagttcggttgttatggcgattcgatgctgatactgaacgattagtcatcgaaaatctgcgctctatgtccacagaacacattgtatatttagggcttgggtctaatttggggcgtcgagaagaagccatccaacaagcgatagagcagataaagctattgataggcactgttgaccgttgctcttcgttatacgaaacaaagccttggggcttttcgtccgaccatctctttatgaatgcttgcattcgttgtcgtactttcttgagtcctgaagaggtgttagaagcaacccagaaaatagagaaggttatggggcgaactgaaaaatcgcacaatggagtctacgaagatcgtgtaattgatattgatatcttgttgtatgacaacctgcatattcacacaccagcgctaacaattccacacccttacatgcatgaacgagactttgtgatgaagcctctactggaaattttagacgaaagtgatgtaacttgaatgtttgatacataaaaaaaactcctctgtaatccattgttacagaggagtttttaattttccttaagcttaaatgcacttggtaattatcgacgtaagccaagagctttgatgatagaacggtaacgctcaatgtcattatcatagagataatcgagcaaagcgcgacgcttacctaccaacatcgtcaatgaacgtgcagtgttatgatctttacggttcttcttaaggtgttccgtcaagtgggaaatacggtatgagaacaatgctatctggctctctggtgaaccagtatcagagttagactttccgtatttgccaaagatctcttctttttttgctttgtctaaatacatagaacttgttgttaaaaattaatgataatgcaataatgcggtgcaaaggtaatactttttattcattatccaactgttgtcaatcataatttctccgaaagcagtcgctttttaacatttagttactcttattccatgcctccttcatggaatgaacttctacaacgaaaaataacaataatatagcagatgtaaaattgccggcacgctacacggactaaaaattaatgctgaattttctttacaaagtgcctctcataactcgcgtgtaaatcaccaacagtgaagttggtcgcaaatacgcgaaaaatgaacgaggtttgtaattcgttgctatcgagagctttacgttcggtttgcgtcttttcgttcccttttttatcctttcttgactgctaacccattgagttaagctaacaatttgtatgctttaatgctgctgaagcatgcgaataacacctctattgtatgtttccaagaccattaaatgaatgttttaacttgaaaagacatcttttttggtaaaatcagcccatttttgtagagcgtttgcctattaaatttttctattttgaagattttagatggtcgatttttggtaaaataataggacaaaagcaacagatgtctttgttgcagatggccatgtgatcagagacgtcgctctttctttgaaaggtcattgttgttaccacaaataaagcaaatgaagtaagcaatgattgcaagtcatgtgaatcgatttctgctttacaattttttgttgaaacaaaagagtcaaggttctttttcatctctaatccactatcttaaatgcaagagccgtgtcctcatgcaattcctatatggcactttctgaacattaaaaaaatagaaaaaatatgttgcagcagttataaatatgaatgatgaaataagaattatgaattaaaagcattacctttgcacggaataacgttttaaggattaaaacatgcaagacattagaaatattgctatcattgctcatgtcgaccacggtaaaactacgttggtagataagatgatgttagcaggcaaattgttccgtgatggacaggataacagtggacaggtattagactcaaacgatttggaacgtgaacgaggtatcacgattctctccaagaacgtttctatcaattggaaaggtgtaaaaatcaatattatagatactcccggtcactccgattttggcggtgaagtggagcgtgtactcaacatggcagacggctgtattttgttagtggatgcttttgaaggaccgatgccacagactcggtttgtgctgcaaaaggcattagagattggcctaaaacccattgtggtagtgaacaaggtggacaaaccgaattgtcgtcccgatgaagtatatgagatggtattcgatttgatgttctctttgaatgcgacagaagatcaattagatttccctgttgtttacggttctgccaaaaatggatggatgtctgaagattggaagcagcccacagacaacatcgaatatctgttagataagattgtggaagttattccagcaccgaagcaacttgagggaacaccgcaaatgctgattaccagcttagattattccaactatactgggcgtattgctgtaggaagagtgcatagaggtgtactcactggtgggatgaacgttaccatttgtcaccgtgacgggacgcaagaacgcacaaaaattaaagaacttcacacctttgagggtatgtctcacgtgaagaccgaccatgtggatagcggtgatatttgtgcagttataggtcttgaaaagttcgaaattggcgacacgatttgcgactttgaaaatccagaaccattacctccaattgctattgatgaaccaacgatgagcatgttattcacaataaatgattcgccattctttgggaaggaaggaaaatacgttacttcacgccacatcaacgaccgcctaaacaaggaattggaaaagaatttggcacttcgggtacgtcctttcgaggatgcaaccgataagtggattgtgagcggacgtggagttttgcatcttagtgtgctggtagaaaccatgcgacgcgaagggtatgaactgcaagtgggacaacctcaggttatttacaaggagatagaggggaagtgttacgaacctattgaagagctaaccattaatgttccagaagagttctccagcaaaatgattgacatggtgacgcgtcgaaaaggagaaatgacatctatggaaagccaaggaggacgtacaaatatagaatttgacataccctcaagaggcatcatgggacttcgcaccaatgtgttgacagcctcacaaggcgaagccattatggcacatcggtttaaggaatatcaacctttcaagggcgagattacacgtcgtgtcaatggaagtatgattgccatggagacaggtacggcatacgcttattctattgataagcttcaagaccgtggtaagttctttatcgatccaggagaagaggtatatgcgggtcaggtggtaggcgaacatgtacatgataacgacttggtgatcaacgtaaccaaagccaaacagcttacaaacgtgcgtgccagcggttctgatgataaggctcgtgtaatacctaaggtggagatgagtttggaagaatgtcttgaatatatcaaggctgacgaacttttggaggtaacccccaagagtatgcgcatgcgaaagacaacgctcgaccatactgagcgtaaacgactcaacaaagattaggaaacaatcaacactcaatttatagaaactcttaccccgaaaaggtaagagttttttgcgttagatgttcttcaaccatctgtcttgattgaaaattacggtttaaccttgctatttgttaatgtcactcccttagaatcaaataaaaaaaagaagatgtatctatcaatacaccttctcatatgaatttgttgtgcgtataaaaagttaagatttagaattcttcatcgtctgctacatcttcagcttctaagtctaagtcttctggctcagaatcaaatgtggtgcgatagctctcttcggtaagcttgtcttcgtcgaacgtgtcgtcatcttcttcctcgttgtcctctatgtcttttccttcgtccaatgatttcttttcattgaagtcgaattcatcgtccgaatcagattttgcagaagataatttagaagatttcttttccatctctggtttcgctttagcgaagatagcttctacccatgctccctttgcaatctctaagacttcaaagccgtcatttacttttttctcatacattcctcctgcgttatgcagtctattctgcggcaatgtggttgtactgatgtcgaatccgctttcgataatgtccttaatgctttgcgataacgagtcccatccaccgccaaaattacggtcaagtacctctaaaagtttgctggctgtgatatgtctaatgttttcgtaactcaaatctgttacgcgcaaaatagctttcttcttgattgcgtatttttgcttattagctccatcaatgcgaagagctttaaccttaaagcctctctcttcatattttttgatgattacgggcttatcaatctttacctcttcgatttcaaatgcacttcgaatcacatctaagtaatgacgcatgttatccttgaggtccgcatccttttctgctgcctcccacaatctgaaaacatcattttcttgaatatcccacacactgctcttagtcagtgtcttaagtgataatgcatctttttgtttcataaatctttaagtcgtcgttcaattgttatttacaatgttctaaaatacgaaagctattgattactaatcaatctataggtttgaaggtggtgatagtcttttggattacgttattttactcatcctattgcgctatcaatcctcctcatttctcacgctgcaaaaatatatacttaatttatatttgacaaacttttcctatgattttttgaatgaagccaaaaaaacatagtttatgcttttcgttcatgaaagttttcgtatctttgcgataatggagatgtgcttaaagtagccaatgacagccattgataaagacccttttaagaggactaatgaagaaggaaagacgatatgagtgaacccttagcagaacgaatgcggccccgtacgcttgatgaatatgttggacaacaacacttggtggggaaggatgccgttctacgcaagatgatagaatccggccacgtctcttcttttattttgtggggaccacccggtgttggcaaaactacacttgcacagattgtcgcaaacaagttagaaacgcctttttatacccttagtgcagtgaccagtggagtgaaggacgtgcgacaggtcattgaacgagcaaagggtaatcatttctttcaaactgcttcacctatcttgtttatcgatgagattcatcgatttagcaagtcacagcaagactctttgttaggagctgtggagagaggaatcgttacgctgataggggcaacgacagaaaatccgtctttcgaagtgattcgacctttgctttcacgttgtcagctgtatcttctcaaacctttaggtaaagatgatctcttgaaactattgcatcgcgcagtgaatgaagatgtcatattgaagaaccgaagcatagaacttcaagagacaggtgcattacttcgctatagtgggggtgatgctcggaagctacttaacattttagaattagtcgttagtgctgccgaaacagaaaaagtagtggtgaccgatcaaattgtggagcaacagttgcagcaaaatcccttggcttatgacaagggaggtgaaatgcattatgatattatttctgcctttatcaaaagcattcgtggtagtgatcccgatgcagcactgtattggatggctcgaatgatagagggaggagaggaccctcagtttattgcacgccgcttagtgattagtgctgcagaagacataggattggctaatcccaatgccttgctgttagcaaatgcggcatttgatgcagtgatgaaaattgggtggcctgaaggtcggattcctttagctgaagcagttgtgtatttggctaccagtcctaaaagtaattcagcttatttgggcattgataaggctttgtcaatcgttcgggaaacggggaatttgcctgttccattgccattgaggaatgcccccacacaactaatgaaagatttgggctatcatgatggttatctgtatagtcatgattatcccggtcatttcgttcaacaacagtatttaccagatgctttgctgcatcatagaatatggcatgggcaacacagtcctgccgaagagaaattatatcagtggatgcttcaatgctggggcgacagatataaagacgcatccacgtcagaaaacaaatgattaaaatatagtaaatgatggattcaaaacaacagcagagaagatataacatcgtaattttagatggtcattgcgccaatcctggggatttatcttgggaagaacttaaggagtttggacaattgaaggtatatgagcgaacttcgcaagagcaagtcgtagaacgttccatagatgctgacattttgttggtaaacaaaacaaaaataacagcgaacgaacttcaacagttaccgcaattaaaatatatcggtgtgttagcaacgggctttaatcatattgacattgaagcagcacacaaacaaaatgttgtggtgagcaacataccctcttatagcacttacagtgtcgcgcagatggtgtttgcaagcatttttgcgatttcaaatcgtgtggaacattatgcacagcagactcgagagggtaggtggacccaaaatcctgatttttgttactgggatactcctttgatagaagtcgcagggaagacattgggaatcgttggtttgggacatattggcaccaaagtcgcacacattgcgcgggaatttggcatggaagtttatgctttcaccagtaagaatgcggtcgatttaccagaaggaatccagaaaacaacgttggatgggctgctttcagtgagtgacatcctaactcttcattgtccgttgacgccagaaactcgtgagttaatcaatgcagagagtttgaaaaagatgaaaaagggagccatcttaatcaacacaggtcgtggacctttggtgaatgaggcggatgttgctgcggcacttcaatcagggaagttggctgcctatggtgctgacgtgatgtgtcaagaacctccagcagctgataatcctctacttcagcaacccaatgcgttcattacgccccatatagcttgggctacacaggaggcaagaaagcgattggtcaacattgccattaacaatgtgagggcttttgtgcatgggaaaccgattaatgtggtgaacaaataacttcatttttagtcttttataattgcaagatttcaagaatattatacctcttttgataatatgtattctcctgaattatttttcagacgtcctgaatttattcattcacttcagcaagtaatagagtttttgggaacttttgcatttgctatttctggtattcgtcacgctgccgccaagaagttcgactggtttggaggctttgtatgtggcattgccgtagcgattggtggtggtacgattcgtgatgtcatgttgggagttactcctttttggatgacttcctctatttatatgatatgtacgatattcgcccaagtatttgtgattgtattttccaagtctttgaagcgattggataatacatggtttgccttcgacacccttggattggcgttgtttaccattgcaggaatgcaaaaaacgttagcttgtggttttcctttttggatagctatcatcatggggtgcatgacaggttgtgccggtggtgttattcgagatgtgttgttgaataatattcccgttattttccacaaagaaatttatgccttggcgagtatcgttggcggtgtgacttattgggtgatgtattctttaggcgtagatgttagtgtcactgtcgttactgtattctcggttgtttgtgtcattcgctatcttgcagttagatttcatatctcactcccacaactgccaacagaagatgaatagagttttagaaaatagcaggatgatttgcagaacaagaatctgaatgctatttttcttgttttagccaagacaatctttagaaaattttgaattggtagcctaaactcaccatgatggagttgttttttgcaggtcctaaaagttgtttcgctttggtggtctcggctattttcttgataggaatgttgtaacgggcatctaaactcaagtttttccacgtcaccgatgcaccaacaggaatagcaaaatcgttggtgttgagttccgacttgatagttttgccattgcatttcatggatattgctttccccgtatgaaagccagaatatatgctaaaatgattaccaatgtactgttttaacagaaagtcaatgtagatgaaattaaactggtaattaaatttttccgttggggcatctttcttgaacggttttgcgctgtttgctccctggtgtacaaacatgaattcgggttgaacagagaagtgcttggtcaggaaagattctgcaaaaagacctccaaaccccgtaatcttcggactatttttaatatttgtcaacttgcaatacatggcgccaccctttgcaccaatgtatgtatcccatggattgcgttctgacttatacttaaatgtagactgtgccaaacaggtattgcagcatgcaacaactcccaatattatgataaaaaactttttcatatacgcattcactttagatgcggtaaaattaatgtttttttatgaatttacaaagcgttttctttgattaaaaaattaaagcgctggtaagcacatgaaatctcctattcactcagaagtttcccatatttacacattcttatatcgttctaattatcagtgagttgtgatttcttaataacatacgaaaactgtttcatggatgtagacctttgatctcattgaaatattaaaacgcatgcagatttatcgaggaacaaggtgagaggatcaacatagtaatatcaggtgagcaaacttaagaggagtttgtacaaagtagctgattggatgtgagatggaagttaatcgggaaaccccgtgccagtgaacatatccaagccgccttcttgtttcgtatcatttttggtcatggtattcgttgtttttgtcctattattttaccaaaaaacggtcatctaaaatcttcaaaatagaaaaaaataataggcaaacgacatgcaaaaatgcgctgatttgaacaaaataatcgtctttttaggctgaaacattgactttacgggcttgaaaacatgtattaaaggtgttattcacatacttcaggagcattaaagcatgcaaatagcaggcttatctcaatgcttcaatcgccaaaaagtgatacaaacacgaaagaaaagaggcgatgtaagcataacgcctttaataacaacaagttatgaaagttgttcaaaacttgcgtatttgcgaccaactttgccgttggttgttttcacgcgagttatgagaggcactttgtaaagaaaattcagcatttattatcattcaattcagcgtacgaaaatccatgttgtcgaggggaaaaaagaaaaggatgtgttgaaaaacacatccttgatagtgactcccgcgggattcaaacccacaaccttctgatccgtagtcagatgctctattcagttgagccagggagccgaagtgcattacttttgtaattgcgtttgcaaaggtatggagtttttgcgataacgccaaacattttcatactttttttcgaaagaaataaaaaaacgccactgcagtgagtggcgttggatacatataaatggtttttcagcgctatgttttaagccttgaaaaacttcttatcgaattaaatcaatactacgctttaagaatttatcgagaccagctcccttcaacatgccattttgtaacaaagccaagtctatgagttggtgtacgattttattgtctttagccgcattggcaatgatgtctgctttcttttgtttctgctcatcgattgctttttgcgtattttcgacatcttgtttttcttcttgcgttatttcttctggcttctttttctgttgattctgatgcagggctgccaaccttgcttcttgtcctttgagttcactctcaatgggcttcaaggcatcggcggtagttttgctgcaattgtcgagtacattttgaatcagtttgtggtcactgttcaatactaatgtaaacatatcgggcatactcccatagaagcccatgccagcttgatacttgctcatctccttcatacgacgcatatattcgctctgggtaatgatgagtggcatggctgattcgcctaaagcttgcacctctacattaaattcagcctgattgattttaggcagttgtgatttgaaaacttgtgacaaattgtcacgatcgttcttgtctaacttcgactccttggtctcttcttttacaatgatacgatcgatgatgtctccgtctacacgactaaatcggctcttttcaaacttttgttcaaacatggataccgttgcaacatccaattgtccgtcaaagagaaggacgctgtagcctttgttctttgctgactctatgtacgtgtattgctcatccttgtcggttgcgtagagatagatgagttgtccgtctttatctgtttgattatccttaatgagagtacggtattcttcgaaggtaaagtatttgccatctacgtccttgaatagggcaaagtctttagcacggtcatagaaatcttcttgagagagcatgccgtagttgataaatatcttgagatcgtcccacttctcttcgtaacttttacggtcttctttgaagatagattgcaagcgatcggctactttcttagtgatataggttgaaatcttttttacgttagcatcactttgaagatagctacggctcacattcaatggaatgtcgggagaatcgataacgccatgcaacagggtaaggaactgtggtacaatgccttctacctgatctgtgacgaagacctgattgctgtacagttgtattttgttgggttgcagctcaatgttcgactttacctttgggaaataaaggataccagtgaggttaaacggataatccacattgaggtgtatccagaacagcggttcgtcctgcatggggtagagggtgcgataaaaattcttatagtcctcatcctttaatgtagaaggagcttttgtccacaatggttcggtatcattaatgacattgtcttctgcggtttcaacctgtttgccgtctttccactctgtttttttgccaaaagctattggaataggcaagaacttacaatacttgttgagtagtgtttggatgcgctgttcttccaaaaaatctttgcagtcgtcatcgatataaagcacgatatcgcttccacggtcagccttttcagtctcttctatggtatattctgggctgccgtcgcaactccatttcacagctttctctttttccctatggcttttggtaataatttctactttcttactaaccataaaggcagagtagaaacctaatccgaagtgtccaataatgccattggcattctctttatacttctccatgaagtcgtttacacccgaaaaagctatttggttgatgtatttgtctatttcctcagcgttcataccaataccacgatcgctgattgttaatgtgcctttttctttgtctaacttaatgtgaatggtcaaatctccttcttcgcctttgaaatctccttgttttgaaagagttttcaacttttgagtagcgtcaacggcattgctcactaactctcgaagaaatatctcgtgatcagaatagagaaactttttaataacggggaagatattctctgttgtaaccccaatattacctttttgcattgtataataatgtttttatgaattcgcataaaaggtaatgcaaataatgtgccaaataaaaaagttggaagaaagtgaattagacgggctatcatcaataggcgatagcccaactatgcggcacaatcttccaactttgtaaagatattcgtgacatggcttttagcctattgcgatatcttgcaagatttcacccaaagtagggtgggtgtgaataatatccttcagctgattgagcttgatattcaagttcatcaacgccgaaacttcttgaacaagttctgctgcatgagcaccatatacatggcatccaataaccttgtcctcctcatctgtgatgagtttcaccattccttcggtttcttcaatagaaagcgcacgaccgtttgcacgatagtaacctttcttagtcttgtatgctatgttctctgccttgcatgcatcttctgtcttgcctacgcaagcggcttcaggataggtgaatacggcagcgggcatgatgtcgaaccgaatatgatcgtctttgccaagtatgtgattgatggctctcattccttggaatgtggcagcatgtgctaacatttgtcgtccattcacatcgccaatggcataaataccactgacggatgtttccatattgtcattgactaaaatgccttttctgtcgtaggcaatccctgcggcatcaaggtttagcccttcgatattggcagcccgtccagttgcaataagaatagtatctgcttctacacattgttcttttcctttttgttcaaagtatattttgccattttctactttcttcactgcggcttgcaaatagaactgaatgcctgtctttgccaaacattttcttaatcgttttgcaatatcgctgtctaatgtcggtaagcattccttcatgaattcgactaccgttacctgactgccgaactgtgcgaaggcagaggcaaactccataccaatgacaccagctcctacgatacacaacttttcagggatgtgatcgatggaaagtaattctgtagaggtaaggacattggaatttccgtggggattgtaaacaataccctcgataggcggtacttttgcttgcgatccagaggctatgatgacgtattttgccgcatattcctctccattggcaacaatggttttagcgtccttaaaagatgccttggcgtgcaccaatgtaatgttaggctgggaaagcaatgtctctactcctgctttcaattgctggatagcttcattttttcttgccatcacctgttcgaaggcaggcttttcttctttagaggcatcgtgtgccaagcatttggttgggatacatccacaattaagacacgtcccgcctgcttctaaggcttcgaagatgatgacctgaaggccattcttcgcagcataatcagctgcgcgatagcctccaggaccacttccaatgatgattaaatcagttgttgtcatcgatcaattgcttaaaggtaagtataggatgcttggctgcttccacatcgttcacacgcttaataggtgtttcttggggtgcacttttcacgatttcagggtcgttctttgcctcgtcggcaatcttgcgcatcacctctatgaatgcatccagcgtttccttgctttcgttttcggtaggttctatcatcattgcctcgtggaaaagcaatgggaaatagatcgtcggagcatggaaaccatggtctaataaacgcttagcaacgtccatcgtggttactcctgtgctcttgtccataaggccatcaaacacaaactcatgcttgcaaatggtgtctatggggagtttgtaaacgtctttcaagcattctttgatgtagttggcgttcaatgtggcataaggtcctaccatcttgatattttccttgcctaaggtgaggatgtaggtgtaggctctcaaataggtgaggaaatgtccgtgataaggatgaaccgtaatggtaaaatgcccttttgcattggttgcgcaattattggtgggtaagaaatctaccaatttctcgcaaacacccacaggaccagagccaggaccgccgcctccgtgtggggtagagaatgtcttatgcaagttgatgtgcatcacatcaaatcccatatcgcctggtctacattcacccaacagcggattaagatttgctccatcgtagtacatcaaaccaccgcagtcatgaatgagtttggtaatctctggaatgtgtgtctcgaagagtcccaaagtgttggggtttgtcatcatcattccagcaatgtcgtctcctaagagcgtcttgagatgctctacatccactaatccatcggcggtactttttacctctaccacttctaatccacataccgcagccgatgcgggatttgttccgtgggcagaatcaggtacgataatcttggtacgcttcgtgtcgttgtttgcttggtgatatgcactgataatcatgagtcccgttaattctccatgagctcctgcacatggattaagcgtaaagcgagacaatcctgttaaagcggataaggcttgttgcaaattctcatacacttcttttgcaccttgcactgtttcagcaggttgaagtggatgcaaattgacaaatgcagggtgtgctgccatctcttcattgatagttggattgtacttcatggtacacgatcccagcggataaaagccgttgtcaacgccaaagttgttctcactatggttggtatagtggcgcactactgtcagttcatcacactctggaagctcggcatcgactgtcctttttaatgtggcaggtatttcatgtcgcccaaattcattcttaggaagcgtatatccacgtcttccagggtgagaaagttcaaatattaagttatgatatagttgatggttcatggcacgagttctattaggtgatcaatttcgtcctttgttctcttttctgttacagccaacatgagcatgtcatcaccaacttgtataccaccaaagatgccattttcaatgaatcgttgttgaagttcttggatgttaccgtcatacttcacgcaaaattcattgaagaaaggctgattgtaagccaatgtgaaatgtcctgttttcaataactgttcacacagataatgtgcaccgtcataagacaattgcgcagcttctttcaatccttctttacccattaaagaaagatatatcgttgcccaaagtgccattagtgactgatttgaacaaatatttgatgttgctttctgtcggcggatgtgctgttcgcgcgcttgtagcgtgaggacaaacacacgttgaccttcttcatcgatggttttcccaacgatacgtcctggcatcttgcgcacaagtttatccgtacagcacatatatcctacatacggaccaccccatcccatgggaatgcccaatgattgagcttcgccaacagcgatgtctgcgcccaattctcctggtgttttgagcaatgccaaatcagaaggattgctgttcatgatgaacaacgccttttgttcatggcacttatcggctacacctgtgtaatcttctacaatgccatagtaattgggatattgtacaaccacaccagcaacgccaccttcagctaatttctgttccagatctttttggtcggtaatgccttcccgtgctgctatcatttcaatatctatctgttgaaaatgtgcataagtcttgataacagaaaggatttttgggtctactgtttcagaaatgagaactttatttgccttcttatggtttgctttcgccatcaatacagcttctgctgtggcagtagaaccgtcgtacatagacgcattggatacatccatacccgtcaactctgccatcatactttgaaattcaaagatataatgaagtgttccttgtgatacttctgcttgataaggggtatagctggttagaaattctgagcgactcaccaaggatggaactgctgatggcgtgtaatgatcgtacacaccagcaccagcaaagcaaatgagttgttggttttttgctcccagttggttaaaaaattggcgaatctctatttcactttttgctccaggaatgtcgtattctccacggaaacgcacttcttctggaatttctttgaataagtcttcaagagattttacaccaattttatccaacatatcagaaacattctcttctgtatgtggaaaaaacttgtaattcataactatattactttttacagaattcttcataagccttggcatccatcaaactctctaattcggatttgtcagacagttccaatttcataatccaagtttcaaaggcgtcttcgttaattttctctggtgtatcttcaagttcttcattcacttcaaccaccgtaccacttactggactttccaaatcgcttgcagctttcacgctctctacagcgccaaagtcgtcgccagcttcaatttcatcatccacttctggaaggtctacataaacaatgttgcccaaagcttgctgtgcatagtcagtgattccaacataaccaatattaccttctactcttacatactcgtgcgactcgctgtaatagagtccttcaattacttttgccatatttttttgatttattttattgatgattttttgttatttattacattcgatgaaacatgctgtgatagtcatcgtcacagattttcattaaacgtattcgcttttctaatgtttgtttaagaatctcttcttgacaactacacaggggaatgttttctttctaatttgaacttccagttctgtaccgagtttagaatgttccaaatctactaaggcaaacgccaaacttttatccaaactgatagagtgatagcctgtagtgatgatacctacctgctgtccgtctttcataacggcataaccatggcgaggaatggctttcccctctaattccagtccaatgactttttgctttggtttttcttctttttgcttggcgatagcttcctttcctatgaattcgggcttatctaacttgcaaaacatgcttagtcctgacattactggtgtgatgtctttagataactccattccgtaaagaggaagacctgcctcaaagcgcaaagtgtcacgacagcccaaaccgcaaggtgtacaacgcttgctctccattaaagcatcccatgcccgaacgatataagcttgtgaaccatatatctcgaagccgtcttctcccgtataaccagtgcgacttacaataatttgctcaccattgacgtctattgtctttgcttcgtaaaatgccaaatctttgcaagataggtgtaatacttcttccacaacgctttctgcctctggtccttgtattgccaactgactgtaatagtctgagcaatggtcaatggttacatcgtaaccttctgcatgctgacgtatccattctacgtctttgtcggtgttggcagcgttgatgactaagaaaaattcgttttcgcccatcttgtaaaccaacaaatcgtctacagttcctccgtcaggatagagcatcattccataaaagatgctgtttaggggagcgttggtgacatcattggtaaagatgtagttcacatatttttctgcatctttccctgtaatatagacttcgcccatgtgggaaacatcgaaaacgccacagtgttggcgcacagcattatgctcttcaataatagatgaatactggataggcatgtcgtagccaccaaatggctgcattaaagcacccaaggctacatgtctgtcatgcagacaagttcgtttattttccatattttataaatttaggtttatacatagatttattattagcggttaaaaagtgccattctattgttattgttttggcggatctacaatcaagttgaccaattgtgccttgttcaagtttctaatgatgtggttcacttgctcgggtaaagccgcttctacggcttgcttggtgtatgggatgttttgtaatggtttcaagatagcattgtcaagatcgcccgtcaggaaataatctcccatgatgttcacgtgcttgataacgttgttcttgagttccataagcacctccaactcgcccacattctcaatgcgttgcttgttggtcatcgtgtagcgtgggttgttgccataagtaaactcatccgacaggtagtcttgctctatctcttcaatgcccttgatgtccttctctgtgagagtgagggaggaggtgcatagaaactccttcgtttgacgcttcacttcttctatggagagtgtggtataatctttgagcaaggcaatgtgttggcgaacgctttgcacgcctttactgtttaacttctgttgacttggcgtgatacttgccaccatattctgaagattggtgtcgtagagcatggtgccatgtacgatgctccactgcggaacatgatagaaagcatttcccgacactttcttcccatcaatcaaaatgtcgtttctgccccctgcttcggcatttattccaagttgtcgaagcatttgcacaatgcggtcgatgtactgggtgaaaacaagatttacttgatcattgtgcgtaatatacgagaacagcaagcaaccctcgtctacataaatacatcctccaccactcttacgccgaagaagatgaatacctttttctcggcaataaggtaaatttatttcgttgtctattaactggttacgtccaaccatcacagtaggggggacttgccaaataaagaaataatcttcgttatcggcaatatgtcgtgctacatattcttcggtggcaaggtaaaaactggttaacctattcttctctggaacatcaatataaatcattgattgcttttcattttagattgtttgactacaaatataatgatttgtcatcgattacaccaaaaaatcaatgttttttttgtaatcttcacatgaatgcgtttcagagttcctgttcggcaatgtttcttcatggttttgttcatcatcctcagcccaccttatatattatatattggctatcgacatgatattggcaaacacgcctgcggcggtgacatcggcacctgcaccatatccctgtatttgcatggggtaggctttgtagcgttcggtggtgagcaacacgatgttgttgctaccttcgaggttatagaagggatgcgactgtgctactgtttgcagtccgactttcatttttccatgctccatagacgctacgaatcgccaccgctcaccttgctgttcgagggtgcgacgacgtttctcaaagtcgtcgtccaattgtggtagacgcttccaaaattcgtccacgctgccttcaaaatattcatcaggcacaaacaggtgtttctccacctcttcttgttctgccttgtagccagcctcgcgtgtgaggatgaccagcttgcggatcacatcctttccgctcaagtcgatgcgtgggtcgggctcactatacccctcttctttggcacggtgtacagtctccgaaaatggcacatcggctgtcagctcgttgaagatgaagttgagcgtaccactaagcacggcttcaatcttcagaatcttgtctcccgagttgcgcaagtcgttgatagtgccgataatgggcagtcctgctcccacgttggtttcgtatctgaactttacccctcgtttcacggcggtttgtttcaatcgcatatattcgtcgtaaggcgatgaggcggctatcttgttggctgccaccacactgatgttatgttctaagagcggctgataaagggcggcaatctcgccacttgccgtacagtctacaaatacagagttaaagatgttcatgccgatgacggcttcacacaatttctgtggtgaactgagttctgaagcttgcagttcttctcggtaggtttgcaaatctaaaccgtcacggttgtatatggcatgtttggatgaggcgatgcctaccacgttgagtttgagtcgggaatgttccttcagttcatcatactgcgaccgtatctgctctatgagtttgcctcctacagtgccaatgccacagataaagaggttgagcaccttgtattcggacaggaagaacgagtcgtgcagcacgttcagggctttgcgcaggtaggcagcttctatgacaacggagatgttggtctcactggaaccctgtgcaaaagcaatgacactgatgcccgaacgccctaatgtttcaaacagtttggcagctattcctggcaggtgacgcatgttctcacccacaatggcaatggtggcaagcccactttgtgcctccatggggaacatagcacctgtttctatctccttggcaaactcgtcgttgagtacagctaccgcagcatctgcatcctgttcgcgcacaccaatgctggttgagttttccgaagacgcctgactgaccatgaataccgatatgccatggttcgccaaggcggtgaagatgcgacggttgacaccgatgacacctaccatggacagtcctgccacgttgataagtgtagttcccttaatgcttgagatgcctttgataggcttgccatcgtttttgatttttgccttaatcatggttccctcaccgtcgggatcgaacgtgtttttcacctgtatagggatatttttcacacatacagggtagatagtgggcggatataccaccttggcaccaaagttgcacaactccattgcctcaatgtaactgagttcatgaatcgtgtaggcagccttaatcaccttggggtcggctgtcataaagccatttacatctgtccatatttccagaatgtcggcatcgagtgcggcggcaatgatagaggcggtgtagtctgagccgcctcttcccaagttggtagtctcgtgtgtgtctttgtcctgactgatgaatcccggtaccaaggtaatggtgtgctgatgcgaaaaggcgtctcttaccaactgctgagtgagcgtgctgtccaatacatgcttgttgtgtttgcgctcggtcttgatgaatgtgcgggcatctatccagcgggcattctctactaaggtggcaacgatttgcgaacttagtcgctcaccgtagctcacgatggtatcttctgtcttatgactcaggtcatggatgagaaatacaccgaagtagatggaacggagttgttcgaacagcgtgtctaccttatgatatagttcgctgtgcttgatgttgtcagtgataacggaatcgatgagttggtggtgtctctccaccatattgtcgaaggagtctttccaagtttcattgcccgacagtgccaattgcgctgtgttcagcagttggtcggtgatgcctcccaatgcgcttactaccacaacaacgggttgtcgttgggcttctctctcgacaatcctcttcagtgagaggatgctttccacggaaccaacggatgttccgccaaacttcaatactttcatgtagtgttctttttatcttgttgtgccgcaatgtagcccaaattggcggcgcgtcacaatagagttattctctcttatagcagggtggaattttcacctcactttttatccgtcgttgggattttttctcaaaggcggttcttctattgcgtccatatagacttagataagggcaaatgtacaaaatttcttgaaatcagcccttattttcatccatattatttgcaaagcaatgcttgtatttccctgctcttttattgaagggggatattttatactgcaaaaagatacaaaagaaatagcgtaggtaatatggatgatacgctacatggaagaaaaataaatgctgaattttctttacaaagtgcctctcataactcgcgtgaaaacaaccaacggcaaagttggtcgcaaatacgctaaaaatgagcgatgttcataacttattgttattgagaatgttacgattaattattcgcttttggcaccattttttgccctttcttggcggttaaagcattgttctaagcttgttatttgcatgctttaatgccgctgaagcatgtgaataacacctctaatacatgtttccaagggcgttaagtcaatgttctaacttgaaaagtcgtctattttgagaaaatcagcccatttttgttgggcgtctgcctattgattttttctattttgaagattttcaatggtcgatttttggtaaaattataggacaaaattatacttttggaagtgctttcgttggttctgatatgacctcaatactaaaattgagacaaaaaaatagagcattggatttatgttgcgatccaatgctctaagggttttatttcaatgggttaaaactgttaacccattgagttgtgctttctgggttatctaaccacctttgtcgtctttgttccttgctttataatgaagatgccatgtgtgggcagttggcttattgagaaagcggctgcgggtagttgcaatagcttgtgaccctgcaagtcgtacacgctaatggatgcttcggcatcgcttaccgtaggtgcctcgatggctgttacccaatcgtaattggtgcggttgcccttgacggtgaaggtgccattggcgatgttaatcaccacactgttgggtttgccatactctgatcttaccacttgccagttggcatcgcgatcatccttgaaacgtagatagacttgataatcgccatcgggcaggtcagcaggaatgatgattctttgccatgaaatagagttccagtaactgtcttcggcttgatagtttgttgtcttaaggttgcgttgttgtccattgccttcgataactaaagccagtgtgccgttgacaggagtgctgctcacgttccaaaccttcgcttcgcccatgctgatagctcgcttggagaatttctcaatggtgagatgggtgccgtaatacaggttgaggtgactcatccacgctccttgctgctcgggctgaatgccaacaatcatgtcttggtagtagctatagttactgcgagcaggtgtcaggatgccgatgtcgaagaagccgtcttgatagcctccccagccccagttgacatgtactttgccttctgcgttataaccatcaatcacaaatgcgtgcccattttcccatttcgagtcgttgcccgaatagtaaatagggcgttgctcagacaattctttatacaccatgtccatccattcttgttcagaatagtagttgcgagtgtagcgattcatgttgggattgtagccgaaatagttgatcaatgcgttttgtgctgacatggtgtatgaggaactgaagcctggtttataatccatattgacagaaatgcccacctgtcgcatcagctctgacacagctttggcctcttcgtcagtatattttcctttttcatagataggcaacatcttgtcccactgatagggtgttgcggaaaagtcagcggagagcgtctcaccgttcatcgtataactgtttgagcctttgccctcagcggggtatttgtaatagcgcataatctgcgtcatggtgatggccacgcatcccacaagataaggtttgcccttatcatccttttgtacatcgttgttgaagggtgcttcttgttgccatctggtttttatgagtggttctacatggtcgggtaggggtgctgatggtgcgatggcaccactgtagccatgtccactggctatacgcgaggcaatagctgcgttggcggcccgtaaataccattgaaaggcgggattgatgtttgtgtcgttggtatatggcttgtttgatacaccgacaacggcttcaatggcatcgtcgttggccaataccacaaaacccgcatggcggttgccaatcacggttaagtcagacagttgctgaagcgtagccatactgccggtgtttgtggctctcgtatcttcgatagtcgtagatacagaaagttctcgagcggcaatggccttgagttgtgccatggtgcgaggctttgccgatgccgaaagactaagcagcaagctaaggaaaaaagtagtaaataatctgaatctcattatatacatatttgttacagttgatagaaaaacccaatgggcattggcaagagttctcccaccgcccattgggttgcaattgatgacaacacagtgtgtgttatctttttattgttcgttcattttttagtccaaaagcgcaatccattctggattcccattgttggtccaccatccccaatcaggcgagtaccagtgtagccacaactcaaaggtgtcatcatctggataatatttgccacattcgtctttggtcaaagcgtcaatatcggccttcttccaaagtttctcgctatcactatataaaccaacaatccaaaaatctttcatgccatcgttgttccatttctgcgtatggatgtactggggtttcatgtgaagtatgttttcactatctttccagaaagtaatggttcccatgtcgctgtcaatccattcagcctttgcatgtagacctttgatggtgtaagttcccttaggaaattccatgacatcaatattcttaaacatccatccataataccagctgtcccaattggcgtggtgcaggatgtatctgttcacggtgatatcaagctcggtgttaccataatcgtaagcttgcgcatcatccaccttgatgtttactttctcagtgcttgcgggttgcatgtcaaagttgacgttgatcttctttgttttttccccagctttaaactccacactttgtggcactttgaacttgctgttgttggttattaaatgaatggtcgcagctgcagaaccgtcaggacgtcccaccgtcagctcaagtttttgtggctcgctgttttccaagtctaagactgtttttgcagtgaggatatatgctttttgtgtggcaacgctactatcagctgtggcaggctcatactcgtactcctctacgcaagaagcgagaagtgctacgctcacaaacagtagaatagccttcatggtttgatatgtctttttcataatttctaatgatatgatgttacaatattaattacttcacccatggcgtgtatttgttggatgggtcagggttgttccatcctacaagcgctttattgttaatttgctcttggtctacaaacacgatgttcatccaggctggacgaccgtcggtgttaaacctgcatctctcatagaagtttgtgccaggatagccacgtttaacagagtagttcaaacgctttacatcgaagaatgtttgtccctcgccccaaagttccacacgtttttggaaaacaatttcctctaccaaagcgtctttcgtggatgctgtggccgaatattgcttatcacgatagttgcgcatgaagtcttctacgagcttctttccacgtgccatatcctgatgcgcggctgcctcggcttcgataaaatacatttcctcaacacgcatgagtgggtaagcggtagactcgccagtaatcatgtcatcaaatcggccttctcccggtctccattttaaggaagcgtatgtgggaagaatagatttaaacttattgtcaacatagacatttttagcggccaaaggtgagtcgtctggagctttccacatcagttttctgaagtcggtatcaccgattctatcataaacgctcttaccaatcatttgcttacatggattttggagatatccgtatgtaatttcgttgctcttccatgacgtccaattcagccatccgtctttaaccgcttcatcatccttggtgtattgaacggcccacatccatttgtcagcttggttgaaaccctttgctgggtctagacaatctttttcagtcataggttgcacgcttgctttgttgatagcgtttcgagccgccttttcagcattggcatagtcgcccatccaaagatagaggcgtgcctccaaaccatagacaacagccagatcaggaagtgtttgtccgcgggtgctcttcaaatgaatgatgttttgctctgcatttttcaggtcttcaagaataaatgcagtcatcttttcctttgtagcacgaggattcacacgtgcggaatcattgctcatgttaggtttgatgataggaacggttagcccagtaacgtcgttcccgtctgcattgatgttgcttgtcaccttgtttggcaagaactcgaacatacgagcgatatccaaatacatcatggcccggttggcttgcgccacgcctaaatatcctttttgctcatcagtagcgtttttggggtcgatggttccgatgatattgttcgtgttcaatatatacttgtagggatattgcaacaggaattgcgtgctaagtctgtcttgaccgaggagggtacagtttgtccacatccaaaaccaatcgaactcattgtccacggtggccaaatcttcggtcatgacatcgcggatgtgcatcatggctcccaacccccaactgtatgaaatgttccatgaccaccaaacagctttagcataagcagggatggcgttaaccatcgcctcggttgccgtgggtgatttgccaacttggtcttttgtagcttgagacgttgggaaggtctcatctatacagcttgtgagcagcgaagaacagattaacgagcccacaaatgcttttgtgattatatttgttagtttcatcttcttatttatttaagttagaatgtgatcgatataccacctgtaatggtacgaatgggtgaatagttcacattgttaccagttccgtcaatgctttgtcttgggtccatgccttggcgctttgaccacagccatacattgtcggcaacaccataaatgcgtatcttttccaaaccccatgaagtggttaacttggacggaagtgtatatcccaaggtgatgttttgcagtgacaggcttgatgcgttaatcaaaaagcgatcgctgtaagctgtcgagaactcgtcattgctctggatacgtggaatattcgattctgtgttttctggcgaccaagcatttaacatgtctacgtggaaagcgtatccacggctgagcgacatggcgctggcataggtgccatcgtaatactgaccgccaatttgataagcaaagtcaatggagaaatcaaagcctttgaagttaaaggatgttccaaacccaccataaccatctggcagtgaggtgccacagagataataatctgcctcacctgttgtctttacggtggttaactctttcacaatgggttgccccttgctgtccaacacacgcttgccattggcatcggtctcgtaaacgttcttgtaatacaaggcttcacccgttttatggtcaacaccagcatagcgatacatacggaatacgttgaggggttgatcctcgccatagaagtaaccatcagacatataaccttcaacaccgtctactacagcattcttgctttcttgagccagcttggtgatacggtttttgtaagttgtaaagttcaggtgtgccgaccatgtgaaatctttggttcggatgaggtctccgttgagttctatctcaactccgctgttggccatgttaccaatgtttttgtaatagccagtgtaacctgtcgttccaggcagtgtgtaccatgccaacatatctgttgtggtacggtagaagtattccaaagaaccacttaatctgctgccgaagagcgtgaaatcaataccggtgttgaagtttccacctttctcccaagtgatatcctcgtttcctaccgttgctggtgtaatggcaacttcaccgttagaattcacaatgttgtacatataagtatatcggaagttaccgattcggtcgtttccttgctctccgtacgatgccttcagttttaattcgttaatccaattagtcttcatccaagactctttgcttaccaaccaggcaccacccaaagaccagaagttaccccaacgatggtcgggatggaagcgagaggaggcgtcgcgacgataggacatcgaaccaaaataacgttggtcatagttgtactgaacacgaccgaaccatccttcagtgttgtagtcgcccatagaagagcctgtgtcgataactaagatagcttggttcatctcgctactttcgtttgagaaggttttttggcgttcgccaaatatgttgtaaccacgtgaacggtaatattcatgtcccaacatggcctcaacctcatgtgcgccatactcgtgatgccagttgagcaattgttggtagttgtaactccaggttctattgtgtgaacgttgcacggcacccttttgagcagcatagtgacccaaccaggggttgtgcgtggtgattcctctgtattcatctacaaacacactgttggttgtggtgaacttgaaatctttgaggaagcgtatttcagcagtaccaatcgcgctgaacgagttgccctcttcgccgttttgattcagcaagttgtctgaaagaccgtttgcgttgggcaagaaagctcttggtatgcctaatgtttggccatcaccatagtcgtatgcggggattcctccattagcgaaggtcatgatattgccattctcatcacgaagatagagcgggtagataggagcgatggtagccatggcgaatacgttatcaggcgcaccgcccttacctccgtctctcaacgagttgctctcgtagtgcgagtagctgaagtttccaccgagtttcaaccaaggtttcatttgataatcagctttcatacgtccagagaaacgggtgtaatcagagttgggagagataccatcatatttcagatagtttgccgaaccaaaaaaggttgatttctccgtactgccgtttgcagacaagttgtattcctgacgcatactgttcttgtagatagcgtcaatccagttgtctgggtagagcatgtatttggtaccgttaggagccgtgattacattgcctaaagtagcgttagggttcaattttccgttcttaccaatcaaatactcattggttggaacattataaacattatatcctaaaccaaagctggtgttcgaggttaagttctcattggcaaatctgtaggcttccaaaggtgaggatttgcgtttgtcaatggcgtagttgtacaagcctttgtaccacatttcgtaatatgcggcagggtggttgatatactcatagtcgggcagcattcggctgtttgaaccccatttggcatcaaatgtgatggaagcatggtctttgcgtccgttcttggtggtgataataatcacaccgttggcaccacgcgcaccgtacaaagcagctgaggcagcgtctttcagcaccgtttcactttcgatatcggcggggttgagagagttcatgtcgccgtcaaatggcacaccgtcgagaataattaatggtgcgttgcccgagttgatagagctgatacccctgatgcggatagcaggagaagatccaccaggctgtcctgactgtctggtcatctgtacaccagatacttttccgcgcaatgcgtctacagggttggttacttgtaccttagaaatttcatcttctttcagtacgcctgccgaaccggtaaaggctgatttcttggcagtaccataggctacaacaatcacttcgtcaatgcttttttgaacaggaatcatgacaatgcgcatgttacttttcgcagttacatcttgtgattccattccaacgtacgagatacgtagcgtctttttgccttgtggcagggttagcttaaacttaccgtcaatgtccgagatagctcctgtgccagaaccaacaacttgaatggtagctcccacaacgggttgtccatcctcttttgaaataatggttccagacacatcagtttgtgcaaatgcagttcctatcatgaagagaaggaacgacatcatcaagaataatcgtcttttcatatttatagaattaggttaaaacattaatttgtttcagttttgcctgcatcgttatagcagggtgtgcgtagttcacgatggtctatttgttttcgtcaaccaatagcaccgatgtcttcttcatagtttgtttgaaaaaatcgctgcaaatatatcaattctattttaagaaaccaaataaataaaggaaaaatgtttatgttattttcatcaaaatcatgtattccattgaacttcacgagcttcttgcgtcttcttatcacatcaattataaagaaatctacgtcaactctgcccaaaaagctaaaaaaaggttacttttgtcaatgaactttcgtcattaaactttttatatcagccattatgattcaagaatatcaaataagaatattgccacaccttgccgcttcccaagagtctatcgttggatttttggctaaagacaaaggtatagacgcccgaacaatcaaacatgtacgtgtgctgaaacgctctattgatgctcgccaacgtacagtttttgtcaatctgaaagtgcgtgtctttatcaatgaagagcctgaagaggaggattttgttcgaaccaactatcctgatgtttcgcaacgtccacgggttgtcgtggtgggagcaggacctggaggactattcgctgctttaagactcatagaagaaggattgtgtccaatcgtcttggagcgtggaaaagatgttcgtgaacgtaaaaaagacttggcgcagattaccaaaacacaacaggtagatgcagaaagtaattattgttttggagaaggaggagcgggagcctattcggacggtaagctatatacacggtcaaagaagcgcggaagcgttgataaaattttgaatgtgttttgtcagcatggtgcttctactgccatattggctgatgctcatccacatattggcacggacaagctgcccaaggtgattgaaaacatgcgccataccattttgaaaagtgggggagaagtgcattttcaaacgaaaatgacatcgttacaagtctcttcaaacgatagccaagttgttggtgttgaagccatcgacctgcaaactggtcgggaactcacttttcaaggacctgtaattttggcgactggacatagcgcacgtgatgtgtatcgctatttagacaagcagcacatcgagatagaacctaaggctttggctgtgggtgtgcggttggaacatccgtcaatgctcatcgatcagatacaatatcaccaaaaacaaggcaggggaaaatatctaccagctgccgaatattcatttgtgtgccaagcacaagagcgcggtgtatattcattttgtatgtgtcccggcggctttgtgatacccgcagcgacggggccacaacaaatagtggtgaatgggatgagtcccagcaatcgaggtactaaatggtctaactcggggatggtggtagaattacatccagaagatgtgaagagtcatgatatgcttacgcctatggacgacgaacccatctctgataagctcatcatgatgcagtttcaggagcaattggaacgacattgttggcagcaaggcaatatgaaacaaaccgctcctgcacagcgaatggcagattttgtcaacaacaggctgtcttttgatttgccttcatcgagctatgcgccgggactcatcagtagtccgttgcacttttggatgccacctttcatcgtgaagcgtttgcaagaagctttccgagtgtttggcaagcgtagtcatggattcttaacaaatgaggctgtgttgatagctacggaaactcgaacctcatcgcctgtccgcattctgcgtcatcccgatagtttgcagcatgtgcgcatgcaatgcttgttcccttgtggtgagggagctggatatgcaggtggcattgtttcggctgccattgatggcgagcgatgtgcggagcaatgtgcagaaatgctgcgtaacgcataggttatagtgttccgacagttcatcattcacgagacatagatgctggcaagctctctcctgagccactcatggagagttgaagaaaatataaagcaacagccctgtcacgatttgttggcagggctgtctatcatatatataaggtgtaaaggttatcgattgataaacttttttccgttttgtatcacaacacccttatattccttgccaacacgctgtccagccaagttgtacataggcgcgtggtcattgatagcactgtcgatttggttaacggtgtcaatgcccgtagttttttcaattttgatgatattgatttgtggttgacctccatacaagcttacaataccctttactgtttgattctgcacgccatcaaacgaagaaagatcactgtaggcatccaagtgaaaaccgttatacaattgaatcttttgatctcctacgtgggcgtaatagttggtgtactttccagatttttcactctgtatggtcactccttctacttgtaccaaatcagagaggttctcgcctgccttgtcgagggtgatgacctttggttttgcgggtgtaccatctgtgatggtcagcccgtcagcgttggttttatcggttttcacaccttcgggcagtcctttaaagaccgtcagtttcaaggttacctcaccgttcaatatcttgttttcttcgagggttaatccgctattgtacaacaacagggcacctgtagcgtcatggatgtaagtgctgatattaccatttttgctggtccatgtgtagagtacctgtgcattgttcaattttaattgagcggtagtaccgtcagataatgccttaaacgcagctatgttatctactgtttgtacttcaggggtaggagtaacggctccaccttctaaggtaacgactactttaaaggcacgtacttgttgcgtagtcttaaaagtaatagaagtagctttacctgtccatgtggctgtttctttggcaattaccaatccttcttgtgctgcaaagttggatgccgcatatttttttacgcctgagcaggtcatctctacttttacaatgtttttgccagtagtagaaagggttacgcttgaacctttatagaaacggtattctcctttctttgtcttgtaatgaacggcagcaagtgcagcatctgtacccgaaagagtgactccgtctttgcttacttggtcagggcttccatttattgtttgtttccctttgtctacatttgcgtcaaatgtcacttgtgcaaaggtgatgctgcttatcaaagcgagcaaactcattactgaaatgcgtaaaattttgttcatactattatgttttaagtgaataataaaaagttcttatcgcaaagatactaaatattgtcctacgttttaagattgcaatgttaaatctttgtgacaattctgtatgttttttaagtaaaaacacgagtatgttaaattttgtagttttttcgttcaaaaatttgtttttatcaattataaaaggtatatttgtctcatatttttagatttcgaattttacgaaatcatccctcgaggttggtagcatcctgcaccaacctctttttgaatggttaaaaatgatccgctgccgtacaaaatacgctcaaatgtttcctgttttgtaaacaaaatgctatctttgcatttgcaaataaccaacatgtatggtaacattccaactcgtattattagaagaagcaaagaaatttctccaaaatctaccaaaaccagcgtatagaaagttactctataacgtggatagagtattaggaggagaaaggaacagcgaacttttcaaaaagttagataactctgatatttgggaatttcgcactctttataacgggatagcttaccgcctgtttgccttttgggacacagatacacagacgttagtaatagttacacacggaataataaagaaaacacaaaagactccaaaaaaggagattgcgaaggcggaagccataatgaaacaatactttgtacttaaaaacaaatagacggtatggaacagataggtatcatgaaactttattccttcgaggaagtgaaagacgaacttttaggtaagaaaggaactcctgaaagagacgaacacgaacgcaaggtagagaatgccttacatgcttacagaattggggaagcgataaagaaagcaagggttgaacagaatctcacccaagaagaattgggagagcgaataggtgtgaagcgtgctcaaatttcaagattggagaaaggctacagtatcagtataccaaccatgagcaaggtgttcaaggctcttggagtctcaacagcctcacttgatttagggaaaatcggcaagattgctctttggtaaatatggtatgaaaataattcgctccacctttcgtgatataaagcctgtttgacggcttttcctcatctctttcctgacataacagcatcttgaaatgctgatgtggaatacactactgttgcatttttcgcattatcggaagttatagaatattcattgttttcacaaagttagatgctaatgtctaattgatgtttgatgcagtctttgtgtttgttgaattgtttccacatggaaataatgtaagaaatagtacagatagtagatactctattttttattgttttgttagtcgttaactgcgttgtggtaggaaatgatatttttttaagaaagaatcgcaagatggcttacaatgtattgattcgtgtgcttcataggacacttctttttccttttggctcttccattgaagagtgatattttgacaactaaaaacgctaatcaagtagcgtatgtagcatcggtggtacgctacaagtaagacatataaatgctgaattttctttacaaagaccctctcaaaactcgcgtgtaaacaaccaacggcaaagttggtcgcaaatatgcgaaatatgagcgatgttcataatctattgttattgaaaatgttacgcctattccgcatcttttcattctcttttttgcctattcttggcggctaacccattgagataagcttactatttgcatgctttaatgctgctatagcatgttcacaacacctctattgtatgttttcaagaccgttcagtcaatgtttcaacttgaaaagacatctttttttgtaaaatcagcccatttttgtccatcgtctgcctattgattttttctattttgaagattttagatggccgatttttggtaaattaataggacaaaaatataacagttgctttaatccaagaagataaagtacactgaatggtagccaatgatacctattgcagaaatactctcgacactttcgttgttaataaatattaattaaaatagaaatacgaaagagtatgaagctctttaaataaaaagtattacctttgcatccgcaaaacagaattgacttccggttcattggtgcgttagttcagttggttagaatgcctgcctgtcacgcaggaggtcacgagttcgagtctcgtacgcaccgccaacaaaccgttcaattcgttcatcgctttggtgcgttagttcagttggttagaatgcctgcctgtcacgcaggaggtcacgagttcgagtctcgtacgcaccgcttcaacactctaattcaatacagagttgttgtctaaagaataaaaaaagatgtgccttacttttgggtacatcttttttttaatcctacattccatacctccttgctaaacagaaaaagaccatatccaaccgagtaactgatttggatatggcctttgattatagtgatgatgtcattcaacaccctttgtaagagatgtttcttttattacatcatcctacctaaaaacatttacattctacttgataaaaacttttttagttgttccgtctgcaaacttgatgatattaaaacctttggttggtacttgaagcttcataccataaagattgtagataccgacaatatgagttgacgttgtattcttgatttctttcaaacctgttggaacaggaagaccaaatttagatatggcaagtatcgtaccacattgtccattggagaattcacggaaagtcagacctttgacttttttgttcttgtctattccatcatattcgtattcaaatactcggaaatcatttctgaaatcaaactcatcaagctctgcttctccgtactcataatcctttgccataatacgtcctaaaccaccaacagcagtcatattgtcatcatatccataccaatctacggcattcatattatattcatcaccagtagttccatcttcataaatcggtgcaaccatgatgtcgttattccctccaccagtactggtatacagcacatagatacgttctgcctcctcaggctgattgaataagatggtcttcttcttatataactcatcgataaccaatgcattattctgatcaaaaggagcgagtttgaaaacattaccgttctttgttgtaatcatgcgattggcaccaaccaaatgcccaccctcatcacgttctatatcagtggtatagaaggtccagccgttagcatctactgttttggtgacgtgcttatcagcgggtagcgcttctacaatgacgtctccattccagccttcttttacttctacagggatgcaagtagccacagcttctttgttttgctcgaaggctcccacttcagacaaagaagggtagaacaaaggattgagcgtacaaacaatagccagttctctggctgttacatattcaggtaacatatattctaattcagatacctttccgatattctcgaaagtgtggatagttgtccatcctctgctgccatcgtcacttacacgtatttctatcttgttgtttacacaaccttctacatcattatcatctttcccctgattgttgttcggtatgtgtattttaatcttagatatattccatgccatgtcattagagaacacagcccagaagtcacgttcatgtttggaaggattctcaaccatgccgcaagcctcgttcaagaggtcaccatccgtcaaggcggtagttgtatatttcttaacaggagcattgtacacatagccatcaggatattgcaacaagttagcagacaatccagctaaagcgttgacagccttaggatcatctatgataaccttcacagtcttttccttatatgaagaaccattgtgtatcataaacttcaaggatgacacacccatatttttaccggtagtgacaggcactgtaaaagtatgcgcattcttgtcctctacaggttcacctaacaccaagtctgtgcttgaagattctactttacaatagaattggtcttggcgctcctctccattcatgtcataagttaatactacctgatgagtaccagaaacgttcattctcacctcgtcatctgcactaagcttaaggttagagttgcttacaccatacacctcgaactcccatatacgcaatgtcataccgtagtccgaatatggattcaattttacataccttgcagtggtaggcataatataatctttcttgatattgtcacgctcgcgtccttgttcgtctacaagcagtttccagttgatgccatcttcactcaaataaattcgataattgccaaagttctcattgctttctggccctgacttacagtcaaatatcttgaagccatatatacggtaatctccttgcaagtcaatgacacattcgtgcgtagagtttatgttacaccatttgttgtgaatgtcacgaggattggtatcaccatcaataatattgcgaggcgactcggcttcacccgttgctccactatacgacttgatagttttgtgaagagccacattatttacttcctgtatttcatgctcctccaatacatcgaatgcacacacctcagtacttgatgtacctgcgtcattggtagcctccaacttcacattctgtttacccacagccttggctataacagtaatagtgttgtcggtcagtttgctacccgctttcagctcaagcgtctcaggcaacgtccatttccaaccagtaggtttacctgttccctttgctctcaaagtcacttcttcacctaccttcacaaaactcttacttggagagatggtgactactgacaattgcgcagcgggatagtcaacttccagctttgcaggggtttgttcagaaccatctttcatcacgggtactacctctacctcaactttcttatccttgccattgcgatcaaaagtaggaacatagaatccctcaccacgtgtctgtcccacgagtttgttttcaccagtttctgattttacatagatatcaaaatgatctaaatcggtattttccacccaatcccatgtcagacgaaggtctcctttatactcttcaaacttagttccattacttaaattcgtaatagacatttgctttggaacatagttggctggtaacatggcaatctgtccaatggacagcacataattgggttgctcaacatttgttttaagattgagtgcaatcatatagacagtccgaccgtttaatggcgacaaatcatactctgccacagtccaaccattctcgttggtcttaacaggattgttcaaggtcaccatttgtccgtctactttactctcaactcccagctttacttctatcgtgttgtcatcagaacacttatataccaatttgaatttaccacctttcgtaacatcaatcttggttttataaagacgcatgaggtggtcaccctgcgttaacttaccgctgacagtcattgaattgcttacattgtatgcatctgcccaattagttgccactttgaggtcaccacggttttctatccaccaacgccatgtaggcaaaacgctttgcataccagagtgataccaatcttgcgtagcgcgtttctcacctttcacaaatcgatattttccaatacccacactcatgtctgatacaaagggcatctgttgtatagctgagcgctcaatgatacatcccgacattcctggccatgatgtatgcgtaccgttatcggttatctttgacggatcacccaatcggtttatccaagttgcttcttcgttcatgaaagtatactgcatagctgtatatgccttctgaccttgattgttggaagtgttcaataaatccttgacattatctttccagatacgctcttctggacaaaacaaatcaaccgaaccagaatgtccgctcacatcaaagactttccgcaactcatcgccaaagccacacaaacctgcatctacacactgaatacctccgtagatttttgagaaaatgtcttcctgcttacagccaatcctatcagcatagctacgatagtcgcctacagaaccatattccaagaactgagacgtattcttgtgactcgccaagatgccaacgttaggttgatgagaagcattataccattgaatctccatctgggtatcgccagcctcatcagccacacggttaaactccttgataaattctggccaagctgtggggaaatatacggcggtttcctgattgataaaccaaccatcaaacccaaaatacttcgctatttcgtaaagtttaattgcataaatatatttgccattctcctgttttaatagctcatacacccactctggatttccgccataggtgttaggcggaaagaatatttgtcccaacacttttacgccactggcatgagctgcatcaatagaaccagcaggtggcggtatgataattccttcagatgctgaacctgcccaatataccagtttgtccatatactgccagtaggtgggctgatatccaacaaagttattagctccctgtgaaggacacaaactacaggttggaaaaagtatggaggcgttacaaacctgcccctcgtaatactgattacgattagctttcatgggcatcggttctctgaagcgtgaagccaatggtaccctacttctattgaacttcgcattagggtcagtcttaggagaccaatccttaatgtctttaggatgccagcatccaccgtatggttgctgcgccttgaccgttcctaagcataacaaggtaaggaacgtcattccaaaaagtcgttttacattcatgatttttttgttaattgttgtttatcaatagttatatataaagagttataggtctaaaattccataaataagaaatatctatttatagaacaaacaacaagtaaataatacttaagaatttctatgaaatttcttgcacaaacttttttaacgaaaaatttggaaaaatgaacaaaactctctacctttgctactgttattcattatttacgttaaaaaataattatccatcgcctatagaaacacatttacttagaatcaaatttttaagaaatgagaaatttaaccgagctgtctgatgaagaattagcgatggcttatatcaatgggcagtatgctgctttcgatttgttattgtcgcgcaatcagtccaaaatattttcctacatcctttttgtggttcgtgatcgcagcatggcagatgatgtttttcaagatacttttgtcaaggtcattaccaagttgcagcaaggaaagtacacaacgagtgggaagttcagtgcatgggtgatgcgtatcgctcacaatgtgataatggacatttatcgtgaccaaaagtctgaaaagattgttgaggcaaccgaagacaacgatttgtctaactttggcgatcaagcactgcttgagcaggccatagaggctaagtttgtgaacgatcaggtgttgctggatgtaaagaagatgatgaacctgcttcctaccacacagcgggaagtggtatatatgcgtttttatcaacagctttcattcaaggagatagccgagacgacaaatgtaagtatcaacactgccttggggcgtatgcgttacgcactgattaacttgcgtaaaatggctcaagagcatgacctgatgctccagttgttataatcggacaaaagataaagagtgtcgcggtcactgcttgccgctttgatcaaaatgccttgcttgcatcttgcgcttagcagtgctttagccagtgaatagtagcgatagggtctttcgctttgaatacataactaccactcaccaaaacatcagcacccgcttgaactaatcgtggagcggtatcttcttgcacaccaccgtccacttcgatgagggcttgagcgcccgactcatcgataagctttcggagacgctttacttttgcaatggtgttctcaataaaggcttgtccgccaaagcctgggttcacactcatgagcaacactaaatcaacatcgttgatgatatcttctaatagatgtacgggtgtggcaggatttaagaccactcctgctttcatgccagcatcatgaatttgctgtatggttcgatgaagatgcgtacacgcttcgtattgcaccgacatcaatgtagctcccgcttcggcagcttgttgaatgtatcgctctggttgaacaatcataaaatgtacgtcgagtggcttttgacagatttttgatacagcgcgaatcactgggaagccaaacgaaatattgggaacaaacacgccatccatgacatccaagtgcagccagtctgcatcactttggttaatcatgttaatatcggcttgaaggttcgtaaagtcagctgatagtagagagggagaaacgagtgtgagttttttcatttgacagataaggattagttaagacaataagcaatgtggtgatgctgtgtctttgcgacacggtacgtgcgtgccaactgtttgaggagtcgaagtgtggcttcggaggggttgagttcttcaggagtaaaatacggcataggcttcatttgctaaattaatgttttgtataaatacataacgtgcgagacatcgctttattatacagtcaggaaaaaatgtttccaaatcctctcaccttattatatataacaatctttggtcttcgatagatgcagaaagtctcatttttttgccctcttttatcaaaaatatgatttgaaaatctccattatttcaaattttatgcttaatattgcagtgatagtctctctgaagacgcaaggatgatgttcacaccaaccgtgacaaggaatgttttgggacggtgggtgtgttctattcatggaagtattttacaagaaaaataatttactgacgcaaccaatggcaatgaaaattaaagtttgtggcatgcgtgataccgataacatttgcgcagtagccaagttagatataaatatgatggggtttgtttttattcccgactcacctcgttacgttcagatgattagcagtcatgcagggattattcctgattatagtgagcaaaagctcgcagaagggatgcagacgaaacgttcggatgaggtctgctacagaataaaacgagtgggagtctttgcagatgacatgcctcaaaatattgtgacacgtgtttacaactatgatttggatgatgttcagttgaatggaagtgaaagtcctatcatgatagacaacctacttcgaaccatctgcccagacattcgtcccacattgaagattatcaaaaagatagaaatcaatgaacccgaagatttagcagtgtgcgaagcttacaaagaagtcgttgatttgttcttgtttgatatcaagcgtgaggcgtcagaacaggctactttggaaaaaatcaatgccattttgagtacatacaacggctctattccattcttgttgagtggtggaatgggcttcttcagtgcctctttgttgcaaaccttgcatcacccccagctgcagggcattcaggttaacgaagaatttgagacccagcctggtgtgaaagacgttgaaaaactaaggcattttgtggaacaagttaagaagaatagctaacgacagcatcaccgttagaaccatctaacaggaaaaatgtttgcctcctctatcaaaaattattatctttgtgtttcgaagaaccctaccaagcatgaacaacctccaacaacatcatgacccacatttgttaccttcctcaacgaatgatgaagatatcatccaaaaaccgctcgatgatgacttgccttggtatgctttgcgactttttacactgaaaacacagcaagtgattgactatcttgaagagcaccatctggtttatttcattcctatggagtacgtcgatgtggaggataggaagcatcgtgtgcaacagaagttgcgccccgttgtgcgaaatttaatcttcatcaaacgaaccatgtccgaactatcaattcggaaaatattgacagaagcgccattcaagggttctgttatccgtaaaagtaaagaggatagccagtattatgagattccatcacgacaaatgtttgaatttcaagcaatgtgtaacccagagatagtgatgcgtcaatacctttccgaagcacaagccaagctaaaggtgggtacgcccgtatatgttaaatatggtcccttaaaaggattgagtgggcgactggtgcggagcaataaaaaatattttttgttgaaagagatacctgggttgggtgtgatgctcaaagtgtctcggtggtgttgccgacccatggtagaggaatgaacagccacgtaaggacaataggaatagcttcctgttgcaaagagtagacagatgaagaacaaatgaattaaccaatataaaatcatgaccgactttttattgctttgtaaagaccgttatgccgtgagaaaattcacggataaaatggtaagtgaggaagatattgcttatctcaaggaagccattcgcttggcaccgtcggcagcaaaccgacagccatggacatttatctttgttgtttcgcaagaagcaaaagagaaactccgccagtgttatcatagagagtggtttaagtcagcacccatgtatgtcattgccatgaagaatgaacaagcttgttgggttcgagaagaggatggtaagcagcatgcggatattgatgtggcgatagctaccgaacatctttgcttggcagcagccgaccgaggattaggaacttgctgggtgtgtcattacgacatcgaactcgtcaagaagtatttccccgtcaaagattttaggctgttgctcttatccctgtcggttacatagacacctcggtgaaacagcctgaaaaagtaaggaagtcagccgaagaaatatttcaagaaatataataaagaagcattgttttggttttatggctgtgtgtgaaaggtaacaaaaagatgcggacagtccttaaaaagttcttcttcacacaagaaaacacatcaagataaaaaacttaataagagcacatttatatgaaatctttatttgaaaacaaaaaaagtagcaagaacaatcaggttaaaaatcaaatcattgagtattttatcgtcaatggtaatgcgaccaatgccgacttggcgaaggagtttaatttgagcgttccaacgatagtgaagattattaatgaaatgtgtgatgagggtttcgtgattgaatatggaaagttagagacagaagaaggcaggcatcccaatctttatggactgaacccagagtctggatatttcataggagtggacatcaatgctacttgtgtgcacatcggattgatgaatttcaggggagatttgattgatttgttgaccgataacagttataaacacgagaacacaccagcagcgttggagcagctttgtagcattatttctaattatactgccaaactcagtgtacccaaagaaaagatatttgatatcaatgtcaatatttcaggtcgtgttaatcctgatactggttacagttattctatttttaatttttccgaagcaccattagcagactttttgagtcatcgcttaggctttaaggtaaccatagagaacgatacaagagccatgacgtatggcgaatatctcaaaggttgtgcccatggagagaagaacgttttgttcatcaatgtgagttggggcttagcgttgggaatgattatcgatggaaatttgtataagggtaagtctggttatgctggagaatttggacacaatttctttgtgaacaacgagattatctgccactgtggaaagaaaggttgtttggaaacagaagtttcagggagtgcctttgtgcgaatagtgaaagagcgtgtgagtaatggagaatcgtctaacattcaacaagacgacacaggaaacttttgtatggaagcacttatcgaggcaacatgcaatgatgacaccctatgtatagaggtcgtagaaagtatggggcgcaagttgggacagtccatagcaggtcttatcaatatctttaatccagagttagtggtgataggtggcactttatctgtcacaggggattatttaatgcacgctatcaagtcgtctgtattaaaatattcgctcaatttgatgaatcgtgacaccaagttagtactttctaaactgaaggatagagcaggtgtgataggtgcttgtctaatagcaaggaaaagaattcttgaactataacattgctgttgataaatctgttcatgctttttattgaagaagtagggaagttgaaggggtagatgatttgcctaatggctgcatcaaatcttgggatcaatgagcgattatttgccaacgcttacctttatccttcaacttcccacctctttctatcgtgatttgctttcgttctctttttccataatgtccttgcacaataagtaactcttcatcatcatgcgtggaatgtggaacggtcctttgaagatattgcccttggcaggttgagccacggtgccgtctcggtgcagatagccgtaccattcgccatattctttgtcagggaagtggcgatatgtccactcactaatcatcttgtgcttcccgatgtacttctcatcgcctgtggctaagtaggcatacagcgttgcaatgatggtttcggtctgtggccaccagaacttcatatcctgcgaatagtcttgtggtgggaagtttttacagtcgcggaaattgatgatgccaccgtatttctcgtcccatccccaatcccacgaccagtcaagaatctttgttcccaagtcaaccaagtgtgagtcccagttgcgatagcgtgcttcttccaagataaaccacgatgtctcgatgcagtggcccgggttgatgacacgcccgttgagtgtgtcaatcaactcaccattcagtcctacggtttccaaaatggctttgtattcgggatgtacgaaatacttttccagcttttcgagcgataagtctatttgctttgtcaattcaggcgcatcaatagcttctcgcaatcgtgaggctgtattgatgagaatcatcgtcagcgaatgtccttggcatttcatggcgggcaggtatttgggttcaagtagcccgggcgtgttggcataatgttgaatggtgtggaacacgtctaatgctttttctgcatattcttgtttgccagaagctatcgaatattcggacattgcaatggcggcaaaacactctgaaaacaaatagcgacgcatacgtaggggtgtaccgtcagctgtcacctcaaaatacattcgcccatcctcgttggtgcaatggtgaatgatgaagtcaatgcagctctttgatgcttcgagccatgcaggattcttctcaatatggttataagcataggctgttataaagccaaaccgaccttgaaaccacactgatttggtggtatccatcagctttccgtctctgtccaaacacgtgtacacgcctccatgctctttgtcaagaccatttgtcagccaaaagggaaggatattattcgtcagatcactgtgatagcgttcttcccattgggatatatagtttttgatttccatttctgtgaatattttctttcaatattaaaactggttgcaacgagcgaagaagttgatagcttccaattcttttttcatttgttgctcttcttcgttggtcatattctggaatggaacacgattaggacccaaatcaaaccctaaaagtttcatgatacgtttgcctccaacaatgttgccacggtatcgacaaatcacgttgattacttcttgtgagaagttttgtttttcacgagctgtctcaatatccccattcttccatgcctcgataatgcccaccaattcgtgcccattgtagttggtagttccaccaatgccaccctgtgcaccgccttgtgctaagctgggcagtatagtttcgtcttgtccatgcagcatatcgtatttgccatttttgtacagtcggcattgattgtattcgtataaactctcgaacgtgtacttgataccagcaaaattggagattcttccgtccactgctttcagcaattccagcatgggaaggaaagcaccattaaaggctggtatgtgataataataaaaaggaaggtcgggagcactgtttgcaatcgcttcgcagtatttcaccaattcttctattctgcctatttttggaaatggaggtgccatggagccaatcccccatgcccctattttttgagcatgtgctgccaatttctgactctcgcgcagacaacaactgccaacatgcacgatgactttgaagccttgtggagctactttgagccagcgttcagccaattgcatgcgttcttcggtggtgagcatatagccttctccagacgatccgttgataaatacgccttgcaatccatttttttgcagcatggctgcatacttttcaataggttctaacttcaagtcgccattctcatgaaacggtgtgaatggtgcatcaattaatcctataatcttttccattttttatatgttgatgatttttattttgaatattgaggagataagccctgaagagcgctccccgttattgctttcaagtttagccaacaattatgatgcgttatctgtcgttggttttagacacgccagttgcaatattaatgcaatcaccacgatacctcctaaaatggcaaaccctaatcctaagttgcctccatcgctccatttgcccaacacttgcgtcaccaaggcgccagcaaacacgcctaccatgttcatgataccgtaggcagtgccacgatgtttggtcgaaataaactgacaaagaatgggcatattgttggcatcgaagataccgtagcccacaccaaagcacagacctgcgccaacaatggctacaatatggtgaccgaacccaagcaatatcaaggctggtatcgtcatgcccagtccgatggcactggtgtagatacgtcctcggatgtttctctgtacccaccggtcggacataatacctcccacgatgacacccacaaatgaagaaacagcaatggtaatggtactcaagggtcctgcactcgacatatcaatgcctaaattggtagcaaagagcgttggtagccagttttttgttgcccatcctggtaagctcggaaccgcaaaatagaacaagataatccagaaagcccaattggatagcacaatacttaaccccttgaaaggattgatactggctttattatgtgtcgtggaagaggtcgactgtgcgtgtgaggggttttcgtaaaggaataagagcagcacgattgagtacacaactccaatgatgccaaaccaatggaatgccgaatgccatgtaaacatggctgcaatggtagcaccaaatccaccaatggcttgccccgtgtacaagcccgtcatgtggatgccaattgccaaagagcgtgattttccctcatgccagtcggctatcagtgatagtgcggaagggatatagagtgcttcactaacgcccataaaggcgcgcaaccaatatagttgtgtgaaattttcggcatatcccataagataggtcacgcccgaccaaacaaacagactgcctaccactaaccacttacggctcacacggtcggctatcatgcctgcaaacggacttaccaatccgtaaatccacagaaatactgccatcagtgcaccgaatgcttctgccttgttcaattctacaatatctactttcatcgactcttgcatggtagagagcatctgcctatccatgtagttgagcaatgctaccacccataacagtgcaactacgagccacggataatattttttttctttcaggttcatttcttttctcttcttttaggttttagttcaaatatagcagttataagggtaaacggaagcggtatatctccgcagttctgattcccggtttcagttctccacctattatatatacgtaggtgccatcaaacaccaaagatgctccagccctcgctgcaacttcatggcttcccaaaagtgtccacttgccattcttgtacaagttaatgtagggattgaatcgataccatgctataggatgtttcatatatccaggcatggggcggtttacggcagcctcaaacacatctttgttcacaccgcccagaacaacaatgcctgcatcaccacagttcacggcagtcgctcccccaagatatatctcttcttgctggcatgttcgtggtccttctactggctttgcaccgcttttggtaaactggtatccctgcatttgtaactgggcgtcttgtttgtctgtcttggaggtgcatcctccccacgcataaaacgcaccgtcagtgtagccacagacaggttgtcctaacacctcacttgtcaaaggcgaaagtatttgccagcctttttgcaagtcctcaagctgaagttgtgcaatgtgcaagccgtcgtacaccatcatagtagaacaaccgaggcttcctgcaaaattatccagtttccacgggagggcagggtaggcttctacgacagccttcccctgttcaatggttatcttgaatacttgattaaatgagccttcggcattacatccacccatgcaaagcaaaccattggacaggctgacagatacgccataagcgcaaggctcgggtagcttacctatcaactgccaatcaagtgaatccgcagttgtgcttattttagcagcgtaaatcccctgatagaatttcttcttgccgccatcagcggcaggaacatcaggaaaattacacccacctgccatgatgagatagtcgtcaacaataccagcaaagcatgccgaaacccctttctctatccctttctcgcttactggaaaccctttgattcgttccatttgaagatgcccaatgccctttgcactggcatcatgatgatatatacatgccatgaagataaaaattagtaattgatgaacaggtcttgttatagtcattgcttttattctacgcacattcttttttcttgccaaacatgctgtccagacttaggcaggacaacaaatggagtgaatcgtctgtaaatatacaaaatattttttaaatccacctgaacgattgttcacctcgtcatgatgtcgaggttctttatgattgtgttcgtcctcatgatgaaaatggacgttgcgtgttgaaaagggcacgggaagcgtgcaaacacccgtgcccagctgaaatcaatatgacaatttggcatgaatgccgccaatcacttatacccttccgtctgcaagacagcagggtcgtttgtcattgtccttacggaaacaggccacaaaaccttgtagctctccgtctcgcgaagcaatgccccttcgtctttcccaggtatgaacggatagttcaccgtgccgtcgaacaccaatgccctgccatttgcgtcgtgcatgcgcagcaggttgaaccatcgctttccctcgaacacaaattccttgtcagcctcggcaaggatggccttcgtgtttttgtacttgtcttgacgggtgtatgtaggatagccgctgccataggcccgttcgcgtatctggttgatgtaggggctggggtcgttgccaaggtcgttctctatctctgccatcagcagtagtgcctcggcataccggaagatagggccgtcgcaatcaaagtaatgagttccttctgccacgtcataatggccggcgaacttcttgagaaggcttccgaagttagcacccgtcatggggtcttttttggagcccatcacagcaaaaaatgtagcgtcgcgcctgctgtcgcccttgtcaaacgaccgccagaagctttccttgtattgatagcgtacgatgccgttgatcagcgtgcttgtgccaaaggggtcgttgtttgacaatgtcagcgcattgccctcgctgtcgaatgcagccgtgaagaagttggcttgtgcacacaggtaactggcatttggcatatatgacttgtccgttgtgttgaacgacacggcaaggatgttctccttgttcttctgcttgaagtctgttctgaatgcctggtagaacgccggcatcaacttgaacttcccgctgtcgattaccttgccaagcgcagcctttgccgtttgcaggtcagcgttgccggtagccttgcaattgcctgtcgatacttttgccgcccacgcatagatgttggctttcagcatgcaggtggcatatgcgctccactcgtacgggctggtgaaggcgtcatttcccaaggcgttgaacttctcttcagaggccttgatgtcgtctttgatgagtttcatcacctctgccgcgctggcacgaggcctggacaaggcggccgcagatatttttcctttggtgatggccacgtctgtaaccagcggcacgcctccccatgtgcggtagaggaagaaatagtagtaagcccgcatgccataggcctgtgccaggtaaaggtttttttgggcatcggtcaggaatgtgcattcgggaatctgctgcagtgccaggttgacgcgcacgatttcaccgtagagtccatcccagttgttgaagagcgcgttgtcagctcttaggtcttgcttgatgatggtttggttgtacatcgactccccaaacaccgacacgcccgagccatcgtcgccatcgcccagcaggccaccgcgcagctcgcccatggtgaaatgaatgccatagctgctgcgcaagtatctgtgcagccctgtcatgtatccggaaacctgtggctggtccttccagaagttgccgctggcaaagaagtcttccggggcttggtccagtgactcgcagctggtaaacatggtcaggagccccatgaggagaagccctgatattttatgtaggtttttcatcgctttgtatttttagagttgttttttcttgttttgtcatcacgggagttaaaaggtgaggttcagtccgagcaccagcatccttggcagtggatagcctccccagttagaggccacttcgggggagaacacatagggtgccgcgcataggtagcccaggttttgtcctgtcaccgatacggtgaggctctctatggacaccttgctcagccactgcctgggcagtgagtacgagagggtcagctcgcggaacgacaggtagtcgccgttgtacacgaacatggagttgtagcggtcgtagttgcgtgcgttcagctggtcggcccagatgtagatggggtattttgcattggggttgtcttcggaccatgtgtccttcacgttggtcagggtgttgtatgtaccctgcatgttgcccatgatccatggcgtgcggtagtcgtaagtcttgaatcccagtgcgaagtcgaggcgggcagtcagggccagtcctttccacgaggccgtgagggtggtgccgcctgtccacttgggtgtcatgttccctaccttcaccaggtcgtagttgtctatcactccgtcaccgttgacgtctttccacttgatgtcgccaggcatgatggcaagacctccggccgccttgcctgtcgactggtatgcggctgggccgtagaggtatttgttgttgcctccgttgttcgatgtcgacttgtctatcaggttgccaggtatctcgtcgtaggtcttgtagatgccttcggcctggaacacccacaggtcgcccggcgtctcgttctcggcatagccgccaacccacatcttcttgtctccgttgccggtatacacctcgtatccgccctgccggttcttgtcacggccgttgtcgggcaactgcagtatcttgttggtgtttcgtgctatgttgaacgcccagtccaccttccagtcggcggtgttgaggatgtggcagttggtctcgagctcgacaccccggttgcgaagttttccgttgttggacgtgatgctcgtgaagcccgacgatgcggggattacgatgttggcatatttgtcggaggtcacgcggtcataccaggtgatgtttgcctgtatcttgttgttgaggaatcccaggtcgagtcccagctccagcgtcctcgacgtttcccatgtcaggtaggccgtggggatgttgttcaggtagtagcttgtcgtgccgtggtaggtgtccatggcgtaggctccctgcacggtatagtcgcccacccacgaggagtttacgttgccattctttccccagctggcgcggacctttccgaagctcagccatccggcggtcttttccatgaatttctcgtgcgagaatacccagcccagggagagtcccgggaatgttccccacctgttgtccttgctcagcttggagatgccgtcacgcctcaccgtgattcctgccaggtacttggcatcatagtcgtagttgacgcgtgcgaagtacgactgtgtgatgaacttggagtgccctgtgtcgaccatgcgcttaccctcgtcggtcacggtgtattccaggtcgcggaaatagttgttggctgggttgctgccgcttgcctgcaggtcgaagagtttttggtggaagtactcccatcccaggagcccgctgacggtgtgcttgccaagtgtcttgttgtagttgagcagcacgttgtaggtctgtgtgaggtgtttctccgattcagcgaacgatttgtgccccgtggagtagcgtcctggcgagctcaggtaggtgtggtagaagctctgcccagtatagtattgatagtaccagtcgcccttcaggtcgagggtgagcccgtccacgatgctgaacctgaagtcttgtgagaaggtgaacttctgccttgagtagtcttggtcgatggcgttctccaggaacttttggttgccgtcgcccgagttcttgcccagcagcaactcgcccttgttgttgtatgcgcggaatgtcggaggataggagaagttccgggagaagtagttcgcctcgccagcaaacggggatatgccctgatacttggccgtggagaagttgaagctcgaatagcttgtcagccacttctttatcttgtagtcggtgttcagcaagagcgagagcctgcggttgtagttgttgatggcgttgccctcgctgttgttgtatcccaggctggtgtagtagtgtccacggtcgttgcccccgctgaagttgatgttgtagtcctgcgagaagctgggggtgttgatgttgaagtcctccatgtggttgttcacgtagatcagggtcttctttgtcacggggtccgtcatggtcctccagcccttgccgatgagctccttctgtacgtcgggcgcaagagcaccgtactcgtagacgccccagatgcctgccgagcttttgttgccgtcggcctcgtatttgttgcctgtcccgtagggctggttgccactgagcgagctcagcgtgaccgttcccttttgcttggcgtagaggtaggagcgccgctggtagtacaggtagtcgccagcgtcgaggaacttgtatgggttgttgaagtagttccatgacagctttgagctgaagcctatcttaccctcaccgtccttgcctttcttggtggtgatgaggatgacgccattgttggccctggagccgtagatggctgtcgcgccagcgtctttcatcacctccatggactgtatgtcgttggggttgacgtcggccatcgagctgcggatcatgccgtcgaccacgaccagcggggccccgctgccgtcgtagtcggtgccgccgcgcagtacgatggtgggcgaggcgttggggttgcccgacccttgcaccaccttcaggccggcaacggcacccgagagtgcctgcgaggggttggagaacatgcccgtggtgagactctcgttcttcaccttggcgatggagttcgtcatctttgagcggatgatggagccgctgtagccgatgacgacggtctcggaaagctcgttgctgatgtcctgcatccggatggtcagcggttgggccgaggtcaccgtgacgaccttttcggaatagccgatatacgacaccttgatgctcacgggcagctttgccacggtgagcctaaatgcgccatccacatcggtaacggtaccgttcgaggtgttttgctcaaccaccgttgctcctatgagcggttcgtttgtcccttcatcgagcactctgccatggatggctgtctgggccatcgcagtggtgcagctcatgaagcaaaccatgagaaacaataactttttcatatttttcgtattagttcattgatattataaaaggattttaagaattcccattggctttctgttgcaaatatatgaaaagttacgataagttgcaatagttttcgtaaaaattttattaaatcaaacaaagtactgcatacaaatttaagaacgggtgacggtcactgcctgctgtcgctggtaaaacacgaaagagctatgcccttttggggaactcgagaacatgacatttttattctgaactcaggtattttaacatcgaaatccttgcaaaagtcatctgcaatacaagaattctctgtaattttatctttgataatcatcgctattaaaatttacaactatttgataatcagatataatggtacaaaaatatagcgagattactaactttttcatcacattcttattccgaactcaggttttttgagtatttttgtaccaattaacaagtatttgtgggattgtagaatgcaacgaaacatcagcacagtttatgatgctttattcagacaaatgtatgccaagctgttcttttacgcaaaagggctggttggcagtgaggatgatgcaaaagatattgtagaggatgtgttcgctgacctctggcaacggcgtgacgacattgaatttggcgaccaaatctcttcgttcctttatcgtgctgtctatacccgttcaatcaatttgcttaaacgtagaaagatttcttcaggctacattcaacagttggatgatatcagcagtaaactgttagagactcttcaaagtaatttgaaaaatcctgttcatacgcttgaaaacaatgaattaggcagtatgctgaatgatgccattgatgagttgcctattcgatgccgcgaggtctttcggatgagttatttacagggacttcacaacaatgatattgctgaattaacgggcacttcagttcgtacagtggaagctcatatgtatcgtgcattaaaatacttgcgtcaaaagttatcaaatatcagtaatttttattctgattaagtatattttattgtgagattgttataaagtaaaagacaattttgctaatgagtgaactgaatgaaaatattatcatccattttattaccagacgatgttctgaggatgaactaaagcagattaatgagtggatggctgaagacaagcgtcatgcgcaatatctgttgcagatggagcaaatctatcaacatttgcaaagtcgttctatgcctcagtggaaagtagaggaagccttgaaacgagtgcataacaatacagatgctaccatgttacatcaagaatatcatcctttttgggagaaatggcgtcgatatgcagcagcgatagtccttgccatattggtaggaacggcattgctgtggtatagccatgcacaatggtcaggggatgaagaagcatacataatggctcaaaccaatggctctaccaccaagcaggtgttgctgccagacgggagtaaagtatggttgaatcatcattcctcactcagatacccagagcattttgaaggagatgtgcgtaaagtgttgctgacgggtgaaggttattttgaggtttcgaaagatagtaccagaccttttattgttgaaaacgatgctatggctgtgaaagtcttgggtacagtgtttgattttaagaacgatgccacgaatatgcgttctgaagtaagtcttctggaaggttcggtagaggtgaagagcaatctttctgcaggacagatggtgctgattcctggtcagaaagctctacttgactatcagactgggcacatgaccgtttcaaatatagatgatggtgttgacgctgtatggcacaccaatcttatacctttttctaatgctacaatcatagagattgtcaacaagcttgagaaaatctatggagtacgtatggagattggtgcaaatgtagatttacgaagcacatattctggcaaaatcaagcataaacaagatattgactcggtgctacatttgttgcaaaatactttgcctattactttcaaaaagacaagtgacggttcttattctgtaaatacagtgaattagtctttttactatttttgtcaataaacggcaagaatttaacgctacacttttatgtaatttagctcgaattacagacccattcaagccacaataagcgtgtgtacaacacttgtacatgcgttttttattctaaatgcctgggttagtggcagaatctcattgagcttggcgagcaaaacagtctgttttggacaacaaaatagactattttctgctacaaaaaagtctatcttgcagcattatagtattctttttgtatccttaaataacctctacaataacgaaaaattatagaatttcctgttgttatagaaatatgttttttgtaagtaactaagagttagcattttcgagagttcctatttttgcgatattttcagtcattaatcgattttgtaacaaatatgccaattatataatgtccattgtcaataaaaatgacggtatcaaatttaggtttgtattgaatcaacaaaaacaatattttaataaattatttgtaagtgtttttatggtcaacgttgttatataattataacctatgtgatgaaatcacaaatcaactaaaaacaacaaccaaacaaatgatgaaaaataagaagccctttagaggtaggatatggtcagggatggcagtaggtctgctactctctgcacttcccttttacggcagctttgcacaagtcaccatcaagatgcctaacaccactttaggcactgccattaagaaaatccaggcacaaaagaagtatcagttcttttatgatgacaacttgtccagattgccagttaatgcgttgaatgtgaaagacgcatctatagaaacggtgctgcatcaactcttaaatggaaaaaatgtagcatataccattgtagacaatgtggtatatcttaagaaacagagtccgcagcagcccaagaaaagcagtaataaagaaaaaaacaaaatatctggtagggttctggatgagaacaacgaaccgctaattggagtgaccattactcaaaaaggtactaacaaccgtgcggtgaccgactttgatggcaattatactattgttaccgatgacaacgatgccgttctgcagtttagttatttgggttataaaactaaagaactgaccccaggaacaagtcattcggtaaatacagtaatgtctgtggatgctaaagccattgatgaggttgtggtaacagccttaggtattaagcgcgagaagaaaatgctgggttatgccgtgcaagatattaaaagcgacgttctcaatacgactggcgacccttcggttacgggagcactcgagggaaaggtagctggtctacagatgaacacctcaagtacgggattggctggctcaaccaagataaccattcgtggcaactcctcgttgacagacaacaaccaaccactgtggattgttgatggcgtaccctttactgacgaccaaacttctgaggcttccgcttatggaggttatgataggggtggaacgtcacttgacatcaatcccgaagacatcgagtctatctccgtattgaaaggacctaatgccgcagctttgtatggctcgcgtgctggaaacggtgttatactcgtcacaactaagaaaggttcacgcaaggatggatttggaatcgtttataatggcagtttcacttggagccaagtatcacagactattgatatgcaaaaactatacggacaaggcagtcaggggaaacctgtgtacgtgacccatgagcaagagcaacgtatgttggctggagagttggctttcggttcagccttggatggacataacgaaccctcgtggttgggaacccctattccttatagatacgatggtgataagctgaaagattatttcagaacaggtttttcgcattttcacacagttgctttagggaatgccacggagaaatcacattatagactctccattggttttaatggcaacaatggattgtttcaggatgaaacactgcaaaagctgaatgtggatctcaatacgggtacagtggtgaataagtatttatcgttggacggcaaaatatccttgtcgcgcatgaaagctgagaaccgcccaatgactggactcggtggtgaagtggcacagttgttgctcattcctggaaacgtcagactttcagacttgcaacattatacaactgaaactcgtttgcatcaaaactggtttggtcccaatcaacagtactccaacccatattatgtgcgtcatcaatatcagaattctgacgagcgatggcgtgcttttggttactatgctgctaatctgaatctggctgattggctcaagttcagtgcaaaatatgcttttgattattatcgaacccgtctgcagagttcgaacttgagtcttggcgaccaagctatctcgtccaagattcaacattggtcagagaaggtgacgacagatgacatgcagcgaggtgaggagaatcattttgaacataatatctctttcatgttgttgggtgatcggcagttggcagagactttccgtctgggttacaaccttggctcaaacatcatgtacctggaacatgaggtgctaaatgctggcgtggaaaacatgctttcgaaagacaactggatatttaacacaggagcacggcttaattcggcgaataataatggatatcagcgtgccatgtattctgcttttggttctttgcagttgtcttacaacgaatatctctccttggatttgacagcacgcaatgactggtcgtctactttgcccgtgaagcacaactcgtttttctatccttcggcaagccttagttatgttttctctgacttcatgcggagcatcaagcagccattgcctacatggattacctttgccaagatgcgtctctctgcggcacaagtaggaaaagatcctttaccttacagtttatataatgtacgcaagtttgcttttcgcaatggtgtacgtgagccaattgctcagactatcaaaatgaacagtaatctgaagccagagataaaaagctcgatagaggcaggtctggatatgaaattcttccaaaaccgtttaggatttgactttacttattattggtcttccacgaagaaccaagccatgcttgtcgatgcttcttctccttggagtcagcaatgggtcaatgcaggcaagattgtgaataagggagtggaactaatggtatatgccactcctgtcaagacatccgacttcgtgtttgacttaaatgtaaatctggctcacaataagtcaacggtagaaagcttggcaaatggtgtaaaacgaatttattttgctggagatccaaacatgcccgtgaaagtaggtgcggtagtgggcggacgcttgggtgatatctatgccaacaatatgataaagcgagatggacaagggcgtgtggtcgtagataaaaatggtcttccgcaacccgagactggtaacggtaacatggaagagtatttacttcagcatcctattggcaacatccaacccgatttgttgatgtcggtaacaccttcgttcaactttaaaggcatcttgttatcggcaatgtttgacatgaaatttggtggcagcatcgtatctgtctcagagggtatggcgacttcagtaggaacatcggcacgtacggaatatcgtggtgagtataaggaattgaatggtaagagcgactattatatggtggttcctggtgtgaaagaagacggtagcgagaatgacatccccgtgagtgcccaaagctattattctacggtaggtttatttaaatcgcaaaagggatatgccgaggaatttgtacacgatgcatcgtacatcaagctcaaggaacttgctattggctaccaattacctaagacattgctcaaacatacaccactaacccagtgtaagttgtcattcgtagcgcgtaatctttgcttcctcatgaagcatacaccggggaatcccgatggaggttatgataccactatgttctcacaagcattggacttcatggcagtaccttacacgcgtacatttggcttctctgtaaatttaggattctaaaatgaaaggacttaattatatgaacaataagttttctaacatacatttgctattgttggcactcacgttgggcgtaaccacttcttgttatgacttggaggatatgggacacaacccatacgagatagaagacaaaacttctgaagctggaactgatacggtaacagaagagacaacaggtaaatatgctgacctcaacctcaactttaaaattagtaaagacgactcagctacttgtaagaccgacttggctggtgccgcctctacttttcgtaacttcttgtatgaaggatattacaacgactatcagataacgaccaatcttagtcatgatatctatgcaggctatgtggctaacaaccaacccaaacatgcgaagaaatcgcccgactttggttatgctgatggttggagtggtagacggtgggctcatttttacaatgaccgcagttcggaatatcgcacacttttgagagcattcaaattcaacgatactcccgaccgctataaaaacatgttctacatcacgcgcatctactatgcttttttggcgttggcgaataccgatacttatggggacatgccgttcaagacatatgtgcaggctcgtattcccgagaccaataacgtgccatataacacacaggcggaagtgtacgatgcgatgtttagaatgctggaacaagcagttgacagtatcaagcctgatgacaattcacagtacaaggtggataaagacgatatttgctattttggcgatgtgaacaagtggttgcgctttgccaatacgttgcgtctacgcatggctttacgtatttcgaacattgatcctgaccgtgcaaagaaagaaggcgaagccgccctgaacaacaagtatggtttgatgaaagacaacgctgacaatatgcaaactgttccgaagtatgcgcctatcgaaatgggaggcatggatgaaggtggatccgagaatggactcaccatgtgcagtattcgttataatggcgagagtgtaatgtcgtgggatttggaacagtattaccgcaacctgagtacaggtggaggaacgtacaagatacgcaagtcgagaaaagaatttgtcgagaaaaccattgatccacgttgtctggtaagctggtacaggggaaacatgacacaaagcatgatatccgagggaaaagaaagtgttcgtgaggatttcaagggatgcaagcgaggtacccaggcaccagacatttcaatgtccacgttaagttatagcttggtacgatgtcaacccaaaccgttatcaaagaaactcgatcctaagtactggttcaacgacgctcgtccaaccgtatggctgggctattccgagtctttgttccttaaggcagaggctgctctgcggggatggattggtgccgacctaacacagaatgcagaaaattatttcaaggcgggtgtacaggcatccatggattattaccagattgacaaggccgaagcgcagtcgtatatcagcggactgaaggtttggaaagacggagtctttagcagtggcgacaaggaacgcattcttgaagctattatcacacagaaatggttggctgtgttccctaatggcaatgaaggatgggctgagtttaggcgtaccgactatcctgtgttggctaatcaactgacgaacatgtcaggtggtgacgttcccgatggaaagaatattaaacgtattttctatcccaatagtgagaactctaacaaagcttttacttcaaatccaaacttgttgaaggtcaattcgcaggggaaacgattgtggtgggatgtagaggatactaatgacaacagtggtaagcgtatcaagccgaataacttccgcatggcagtagtgaaatagacaagccgcttttggtaacatacaacttttgaaatgaagtataatttttggtgaggtgatatatttatcagaaggtgttcagcgggaagtgctttatatgcacttgtttttggacacctactcataaattcaatgggaattgcgtaatttatgccaaagcctacaatgaaaatatcatatagaacaattattattatttactaactaaaacaatgcttatgaaactacacagacttttgtttgtaacgctgttcatgatactttattcaggaatagcaaaggcgcagcagccatacggtggatgctggcatccagattatgttaggaactggtcgcccgacacagaccctaacgctaagttcaaccgttccaaggtacctttggccaaaagatttaaggagcctaccttgatgaaagctaacaaaaaccaatactatgagggacaggtgtgcaatgccacaattttgtttccaacatgtagtagtagtccctcacagggagccaacaacttcttgggctatcagcctacctactggcagtatatggacaaactggtatattgggcaggttcggcttccgaaggtatcatcatccctccacctgctggctcaattgatgccgcacaccagagtggtgtaaaggtgttaggacagatattcttccctcctgcttattatggtggaaaacaagaatgggttcgccaagtgctggaacaagaaggtggcaaatatgtatttgctcgcaagttgtatgagatagctaaatactttggtttcgagggctggtttatcaatgaagaaactggcggaggttccattagtgaatgggagggcttgattaaggagtttaatgagattgctgatgctgctggtgatacggatatggagatacagtggtataatgccagtggttatcccaattcaacgattctgaagactcataagaacacatcacagttcttggagtatgggtctgtgggtgattatcgtaatcaagcagctaccttaggtatatcagaggcagagactttcagtaaaatctatgctggcattcaatgtgtgaacagtggactcacaggttatggtgcaacgttgagaagggctttccctactacgggacatgttggatcggtagatttattctgtcctgaggaacgcacatggaaggataatgtgaaaaactatttaggtggaaattctacgaatcaaggacctactgcttatgccgctaccaaaaaagttttcgagtttgaggagaatatgtgggtgaactattctggtgacccttctgttgatacagaccaatatggttggcctggtttttctggatgtatacttgaacgttcagtcattgacaagatgcctttcgccagctctatgagtgtgggcgacggcaagcaccgttttgtggaaggcgagaaacaaggaacgcaagactggtaccatagtggattgcaaagcattctgccaacctggcgctggtggatagagaataagggagatttacaagttagtattgactgggatgatgcttggaacataggttcaagtttcaaaatatctggtacgttgacttcgggcgaccacttgatgcgattgtacaaaacgcaaataaaagtggagactggtggtgttcttcgtgttgtttacaagaatccagctaacgcaacaatcgaagcaaaactatccacagaaagttctactacacctaatgagacgctgtctactccaaaactgacagagaagaatggatggactatcgctgactttgacttgtcttcacttaatgggaaaacagtctatatgattgcactcaacttgaaggctgatgccgacattgcagattttaccatgaatcttggagaattggcagtattgccagctggatatgctccaaagaagattcaggtttccaatttcaagaccaccagttcgcttggtgatgagggtggagacgtacgcctgacgtgggactatacctatactgatgattttgatcacttcgacatctatactgttaaccaagacggttctcgcaacttggtaggacagacacgtggtgaaggattttacattcccgaagtaaagcgttctggacttgacaaacatatagacgtggaattggtgccagtgatgaaagacatggtacagcaacaagccgagaagatacaggtgaactatcctgagccaaaggctcctgtcgttacgcttgctctctcaaagagttatgttaaggtgggtgacaaagtaacccttactgtaaagggtactggtaatcccacttcttttgagtggattttgccagaaggtcttgaactggctgaaggatcatcgcttagcgaatcttctatcgttgtagtagccaagagcgaaggaaaaaagaaggtgacggtcaaagctactaatgcggttggtacatccgagatagccattgatgctcttgacgtattcgcaaccgaggaagaccttaatttggtgaccaatgtgattgtgaacaagcgagtggttagctttagtggatcaaccaatggacaagaggtaccagctaagattatagacggtgtgaccaatcctggcagtgtaagtgacaaatggtgcaatgtcagtcctgacaactgggccatctttgatctgcagggagtcttccgcgtttatggcttcaaaatatacgatggaaatgctggtccagagagtggcgttgaccagattgacagatatcagatacaggtaagcgatgatatgaatacctggacaactgttgtcgatgaaagcggaaaagaaggagtgacgataaagaaagattatattgctcctatcagagcacgctacatcaaactaattcctcatgtaaatggtacgctacgtatttgggaatttgaagtatttggtgtgtcagacaacaacatgaagatgactgttgataaagagttgactatcaatgctggcacaacacaggatattgtggtaaagtataatctcaatggagatactcgtgagaatcctttcacttgtagtgcagaacctgataacaataatgttacagtaggagagattacggagaacgttgatgaaggtacatttacaattcctgttacagccaagaagattattggcaagacctctctgaagatcaagattgataatggtggcgcttatacggaaggaattgtaaaacttaccattgatgataagacacgccccaacatattaaagggtggtaaggctactttacgtttatacgatgctgattattcatttgaagctccttataaagagcaggagttatctactcttaccgacggtgatctaagagagaatgcttgtgaagatgtagaacacgtgtcaacgcataaggatgatgtgtgggctatctttactgcaccagatgagaagggatggaatctatcgaaggtggtagtaactattccatacgataacatgggaacagatgataatggtgatgatagccaaactaacaaggaaatcaagattgctatgggtgatgatttgacgagattgccaatcgtaaagacgtttgataatcttgataagttacctatcaatgctgatggcacaattcggttggagtgtatcttacctgaattcaagaatgttaaatatcttgctgttatctgtaacttgaatgccctccattatcctttgctttctgaggttgaggcctatgagcagttagctgaagctgttccagttgtagagcctgtagagattagtaactggaatgcggatgtcattgtagaacaaaaagatgcaacaactcattcttcacgttctcttgacacacaaggctggtgcttgtttactactggcgtgcaggagaaaggagcaatttctgatgacagccgtatggtagtgagtaagagaggcattaaataccagcttgctgactacacccaaaacaatgcctacattttgaagaatgcatggagctggacaccactgacatttgctaagcccgtagaatgtgaagaggtgtatatcttgatgatatgtgcaaatggagatgcccgtttgtcaacacagatacaatatgaagataattccgtattatatacaagttgtcaaccatctgattggtttgagaacttcaatgacggtaatgctgctgttagggagttaggacgtatcaagcgaggagcagctgatgaatttaaggaaaatgacattgatgatcgttatcagttccgtctatatgaatttgagatagctactgatgcaagtaaaaagattaaagctattaaatttttagatcaaagctgggggaatcctattcctaccgttttagctattagccgaaaaggtattccattgccaaccagcatacagtctgtcgcttcagagcagggagaagtaaaaatcattggtatttataacctccaaggtatgaagctcaacgcacctgttaagggattgaacatcatcaaattctccaatggaacaacaaagaaggtgatgatacagtaagtgtacgtggcacttcaacaagtggtgcctaaatataactaaaaaggcgtgcttctcaaactaatgggaggcatgctttttatgtaattactattgagagtacttatgcgcttttgggctttagcggacaacaatattcaagacactttcattgaagggtaaggctgttcaaaaatatgaaagtaaatgaacaaatgaagtaaacaagacaatgaacgtaaagcgttctacaaatataacaaagctaccgacactatttagagatatgtaggacaaaggactgttgttctgatgaaacggaaataagttttttcatcattgcaatggaatagtacggacgtgtcgtgaaatctcatgaaatgctgttgcgacagccatctcatacaataaacaaagagagaaagctatccttcactgataagcacatttgtaccttaacttaaatgttgcccttgctgaattcgcttagtgttttgtaaatataaatgacgaaaaaacggggtttgaaaagttgcgaaatagaaaaagaataaggagaaaagacggggactatggcacttttcgggttgaaatgtatatcgtttttacattgaagcattgagttaaggcgacaactacatgcaaataacagctctataaagccacaattgcagccttaaagcattactttaacacggttttttgcttgtttttaaggcatgaatggaggtaaaaatgggacttgtcacacgcttgtttgcgcaatacagtgattaacaggaacttataaaactcgctcaaaactcgcgtattttcgaccgaagggaaaactttttcaaatattcaaattatacgagggtgtttgtcaagtattttgatattatttttttaggttttgaatcccatgacatctcactgtcgcaccaagttctcaactcactttctttttcccctttacgaactcaatgcttccaaacaatgtagataacaacaggtgcccctatcaatggtgtaacggcattgaggggcaagacgccctgcgaacccggcaaggtgcatatacattggcacaacaaagcaatcactgctcccatgagcatggtgaggggaagcagggtgcggtggttctctgtgccaaccagtaagcgagccatgtgtggcacagcaagtccaataaatgccacaggaccgcaataagccgtggtaactgccgtcaatacccccgttaccaccaagagccaaccgcgcacagcacgcacattgacgcccaagttttgcgcataccgttcgcccaacaacaaggcgttcagcggcttcatcagtagcatggagcctatcaagcctacaatgatagcgatggtaaaaatgggtagttggggtaaagagacattgttaaaattgcccatgccccatatcatatatgatttaacaccctcttgtgtggcaaagaagttgagcaaagcaataacagacgaggataaataacctatcatgatgccaatgatgagcaacatgacattgtttttaacccactgtgaaaagactaaaataatgcttgttaccaccatagcacccacaaaggcagccagcaaaatcgccatagcaccgcccacactgaacaaagccgtagacatgcttcctcccatggctaacatcaccagtgctactcccagtcccgccccgctgttgataccaaagattgacggtccagctaaaggattttgaaaagcagtttgtagcagcaagccactcacagcgagtgctgcaccacaaaacaaagctgcaactgtttgtggtaaacgagattctaaaatgatgtaagtccaactgtcattactcacatcctgtccacacaatatggaaaacacgtctgctgctggaatgtaaaccgaccccaacaaaagattgaacattaccaatagaagcatggcaacacccaacattgcaaagacaaacttgttacttgtatggctcatcctcatgattcaagtaggaaagaaaagaagtttctactcatatcatagcaactatatacggtgctattgatgcaaagttagccaaaaagtgcgatattttcattaactttgcgcactgattgcaaaaaaacacgtgatggaaaatgaatttacccgtacggaaatgctgtttggaagctctgccatagaaacgctgaagcactcacacgttgcggtctttggcgtaggaggagtgggtagttatgttgttgaagtactggcaaggagcggtgtgggcgaactgacattagtagacaacgatgaagtgagcatctctaatctcaacagacagttggtggcattgcactccaccttaggaaagaagaaggtagcggtggctcgccaacgcattttagacatcaatcccagctgtaaagtgcatacctatagccttttttatctgccagagacggcagaacaggtagacctgtccgcctgtgattatgtcgtagattgcattgacaccatggcggctaagatagaattggtgaagcaatgtcatcaactacagctgcccatcatagccagtatgggagctgccaacaaaatagatcccacccagttcaaggtggcagacatcagcaaaacggcaatggatccactggcgaaggtactaagaaagaaactccgaaaaatgggcattacacaccttaaagtggtttacagcgaggagccacctcgcaagccctttgaaatagagtcgacaacagcacttacctcacctctcgaagaaacggtaaaagcacctaccaccaaccaaaaacgaacgacacctgccagcaatgcctttgtacctgcaacggcaggactgattttagggggcgaggtggtaaaggatttgatacgaatgaagagcgcaacttctgattaacaatcctgtaaatgagcaaggatgtggtcgcgacatttctccatgagccactttggcgtactggtggcaccacatatcccaatggtctgcacaccctgaagccagttgaaatctatctcatctacatcctctatttgataactattgggatttacacgcttacactccatgtacaacactcgtccattggaactcttgcgtccacttacaaacagaattaaatcgtgctttgatgcaaagtttgcaatgttgggcattcgattggctacctgtcggcaaatggtgtcaaagcttcgaaaagaagcagtagccgctatatgattttggatataactaattattctatgaaactcatcgagacttttcgttgtttgcgaatacagataaatatcccgtgtaaagtccagctgcttgacatcttcaaaattctcaatgatgatagccttgttctgcgtttgccctacaagtcccaacacttccgcatgcccattttttccaaagataacaatctgtgcattctgatgcgtatcaaactgtttcttgatgcgacgctgcaacgctaacaccacaggacaggtagcatcaataatctctatgttgtttttcttcgccaatgcgtacgtctcgggaggctctccatgggcgcgcaacaacacttttgcattgtgaagattttgcaactcttgatgcgtaatggtctctaagccctgctcatgcagccgtttcacctccatgccattgtgcactatgtcgcccaaacaatataaggtttcgcctttttccaattcttcctgtgctttctgtatcgctgttgtcaccccaaaacagaagccactcccattgtctatctctatctgaatcatcacactacttctccacttcaatgtcaataatcacctttggctggtcggggtcattggtaatcatgaggatacgaggcttgctacgcacctttttcaattcctcttctaccactgttaccttgagtttagcgaccttacctggttctatgcgtgatttgttcatagcaacttttataccgccagtaaacatctgaagccgctcaatctctaaggttgctcgccccatattttgaatcaagattcttccagactgctttctcttattaccaaagttccctaaatggagggttgttgccgaaagttgcatttttggcatagctattcgagcctgttcgccagcgtccttgaagtcgggcaagagtactgcagagaccgtcagttctttggttggagccactttatcaccaggaacaaagcctaaataaatgcttgtttgcgtaagtccataatcacgtatcttcctcgaatcgagtgtaacggtggcgacaccagcatgtcccggagccaatcgcgacggtgacatttctgcttgcaaataagaaggaaggtgcattagtacaggttctgccatctcgtttgtggagtttttaatatgaattttgatttgaggacggtcaccacggttcacatcatcaaactcaatgttattaacatcggtttggagttcaccgagatgaaaaggataatctcctgtaaaatcaacaatttcttccacaaccttgcccctcaatctcaagaggtagggttgggtggaggcattactaaggagtgctatttgcttttggaatgttcccaacaacttgctatcatagaccactttaatggtagctgacgtctgcggagctatcggcttgcgtggatagtccacagtagtacacccacaatcggtcatcactttgttaatcaacaaatcctgatgcccagtattcttaatctcatattcagcggtcacaggatgcttaaagatgatttgtccacaatctatgacttcatttactgcccttatctgctgtccatgagcgaggacaggcaacgcaaggaatgtcaatgcaataattattctattcatttttcgcttattttcaatgtctgacctgcagctcttccattaaaatcaggactgtatgcacattgaatggtacaaattcctgtttggtatgtgccggctctatctataaaatattctgtttctatcacatgcttacctttgctaagctgatcaaaataatacgaggtcacattatctttgggcgcatagtaatacccccaagcatacccgcttctttgatgtagaggttcaaggcaggcagcacgcttatcttgtagttgtacaaaatcgtaatcacgattggcttccacaaccagtctcacagtcactctatcgccgactttgaaagtctgtacgggtttaccatcacgcaacagcgtgcgtgtcaccttgagtccagaggattggtcaaccacttcggtcgacttttgcataaactgtgcatagacagctccccaagatgtaccagctgatgttttgtctatagtgagttgtcgcatatcttttcctgtcttagctgtcttcacatagcccaatcctgctgtggcattcggcacttcaagcggttgcccattgagctgaaagcgatcggattgagagccagttgttagtttttgtgcctgtccatgcaagaaagcataaacagcattgacactgtttatcggcgtatcccatgcttgcgtacgcttggactgtagtaaccagcgttgcatctcctcaatgctggggtcgttaggctttaagagtttcattgcttcgatagcagctacttgcgtaggaatgcgatagctgaaccaagaatagttggcacgtggcgcatcaaaatatcgtcccatctcctcggtgtacaccgaatattcctgtatactctgcaaatattcattggcttttgcctgttttccgtaaagcgaaagtatcactgccgttctggctttaccatagatagacaagactgtgggctgttgggcgagcaaattcaccatgtagtttatatttccattgctacgtttatccaacaacgcatatgtgtagagacagttacaagcaaactctgaagggaataaatctttctctcccttcgcctgtcttgctttcaattcagcgacctcttcgctcaattttctatctaaaaagcgcaacgaggaggctatcatggactgcgtagaggtctgatgaccgatgagtgtattcaaccgagcgagcgtcattacaacagcaactgtcatgtagcgactgcccgacatgcctttccaccagctgaaagagccatccgtattttgcaatttggatagtttttgaagcaacgaagttaaacgataagacatcatattgctatcgaaaaactcaaccagttgctgttgttggtaggtctcattctgtgcattcatcacccaaggagtttcgttcaagagcaccgtcttgagttccttgttcttttctaaagcactggccaacgacgtttccttacccttttcctgcttccataatttaacaacagattgtagttgtggcacttcgttaaacaaatgtcgcccaatgctgttggcatagtaagatgccactaaactcatggcattgtcatcgtctatatttcccatgttgggaagtgcctgaaccattaaccatgctggctgttgggtatattctacggtcagtaagttgcggtcatcgtgcgcaggaaagagtttttgcaaatcaatggtcttcacccctttgtcatgcaaggtaaaaggtacggtggtagtaacccattcgtcatcggtcagaataggcaaataatgttgctctccgtcactgtagttcttacccttagccgtaaagcgtacaacgagtagagacaacttcggatgcgctttcaacagttgaaccatatcgattgcgaaggtaactacatcagttgcctcgggctgcaactcatacgacttttgttgggtaaacaccattttctcggtggttgggtcaacaagttcaatacgtgcagttcctgtttcaatgctatgagaagtactcatcacacgtgccgaaagggtaagctggtcacccttgcgtacgaaacgaggcatattaggctgaatcatgacggtcttttgcgcaactgtttcgtccattaacaaaccatggcgcatctcctcatcgtgaactaaccccatgaattgccaagttgttacactctctggcaacgtaaacttcaaacttacttgtcccttgtcatcagcaatcagggcaggaaagaagaaagccgtttcattaaagttctctcgaatagtgggctgagcattctgctttgtcgaagaatccacttgcgatgcgggcattgcctctttctgtttttgttgtaatgacttgtcatcatgagcctcatccacactcattgtctcatcgctgaacgcttctgccttggatatggcatttagtttactaagtgcccgcgtcctgacaccgcctccatagccaattgcaacaacttcatcactctgtccaaaaccagcaaacacatcgtcaaaataagtaaagttgataggcctttcgcgcaatggtgtaaacggtgcatcgccataaagcattgcattttcaatgttaggcttttcccaaaaggtagtagcccatgctggttgatacggaatgtagtatctccatgcgtgttccttgatttcttgaagtgtcttatcgaacagtactgccatgagttgtgctttggcaggcttgccattaggagtctttatttgtaaggtccatgtttctttttgtcccggtgtgagtcggttgcggaaggtcttccacgtcaacatcagccgtttatctggttgaggcttcgcaatgagttgtctatgcgtgtagcattttccattcttcacccaagcgtaattcaatagcagtccgtcggcatattgtggctggtacttcaactttttcttgataatttggttgctcatagccaaacttccactctcaatcacacgatcgccagcaatgaaagaataaaccacatgcacattggtatccgaagaacccaacatcagttgcacagatttaccatcattagggtatgttgtctcggtgagatagaagaagtcagaagtcttaaaagcaggtttcttatcgtccaacgagaatgtatagaaggtatggctcaatgtatcctgtccgcaaacagctattaaatgatgttcaccagaggatagcttttccaatccatggagcgtaggttgattagcttttgcgtgatacgatttaccgtcaatcgtgtaatgaacgtctccatcaatggctactcccatgctgttaagatagctaaaagtcatcggtttgatgctatccgtgcgactttgctttgtcaaatcacacataaacgtcgtaggtttgtcgctcaacatcaaggcgttttcggcatgatgagtttctcctgctccatcggttacatctactttggtcaagaacgaataatgttgagttgcttggttgctcttttcgggcatcatcatggggacattgatgacaaatttgccactgttgtcggttgccaaggtatcaatgtctatcgtaacgttttgtgttctgtccctcatttcgaaatatctccaaagcattggcgagcgtgtaattgtgtatttcacttgcgctcctacaacaggaacaccagcaaaacttttcacatgtcctgccaacctcattgtatcgccctcttgatattttgttgaaatagtatcaaattcaacataaaaagtgggacgcttatattcctctaccgacaacgacgcataggcatctcttccctgattagagcgcaaagaatatgtgccagtgagtcccgttgaaggtaaaacaaagtctgccacagccgtaccgtactcatcggtcgtcactttttgtacccccacctctttataattagcatctctcaaggtcaaagtgagcgtttgatgcgttgcaacggtagtctccttaccattgattaaacgataagcaatagccgaagcgtgcaccgtttgacctggtctatagatgctacgatcagtaaacaggtgcacatatagagcgtctgatttcttctctttagggaaaaatccataaccattgaggtatgtcatcgcacatgccttgtcgctttgggtataaggataagcatagtacattctgttctcttttattgtcactgtcacttcgccttcctgattgcaagtgtagacctgctgcttatacgctcttccgctttgcacatcttttctcagttgtatcttggcacctggcaatggctgcccagtagtagcactcaccgcaaccattcgcaattgatgatgaggcaaagactgagacaagaggtacacatcactgacacgaagcaatgctcgttgtggctttatcgtcttattatcggtcgtcaattcaaccaaataaacgcctacaggtagccccttgatagtcatggtgtcacgcaccatctgataatcgggcatcccaacatattgcttactggttgtgtagactggtgtcttggcatcgatatgcggtcgcaaacgtgcatagtcacgggcatcattggggtctaactgggtgtctccatttacattcactcgccacaccgccatgttcaattgttggatattgcaaagttgcaagacaactacctgtcgttcctgatgaggaattgccaccgcatcaccgagtgaaacatggaaagtgggcaaggtaagccgtgtcttggcattgcgaagaatgttgattcttggccacgcaccccatttcatcaacgcataattgatatattgtatcttttgttctgcgctgatatcctctgcctcttctatacatcgataacgttcaattgccacttcgccagcctctgtcaggtctttatacacagcaattaatgagtctaatttctgaatatatttcgactttttagcttgcaaaacgtccgaacgatatttttctctcaagtcatacaacgccgttatacaggcggctggtcgattgtcatgcgatagataatactgatgaaggaggtcatagcgttgtgcttcaaagcccaatacatgcaataagtcatgattaaaaatcttactgtctacgcccgaaaccgtaaaaggttcgtatgttgccgacttataggaagccaacaacgcaggctctgccaacgactgtttgaagtattgctcactcaacgtggcactgttgtcgcccaaagttagattctctgcatatagcttgcccaacgccgactgatacacagccgccaaaacacggtcattgcgctctgcttggcgtagtcgctccttgagtttagtcaactcgacagttgttgaatcgggcgaaatttgtgtagtcatcaatccgtgtaaaaacgatgccttcaagaggtgaccgtatttttgttccgtttctgccttcttaataatctgctccagcacatggagtgaagttttgggaaggtctttctgttctgcctgctcgtactttttccaaagaacagcgaaattatctgctttcataggagaggatattagtaccaataccataacccataaggtaatcaatctattcataacctgatattttatagatgtacatcgagctggtgaatccaccaattcttcttttctatctcaaaagaagactactctctactatatgcaaatgtacataaaatttgtgatttataagtctgtgggataaagaaaatacttttttattttgcgagcgacacggctctttggttgaaggaaggtggtgaaagctaaattggttgttgcaaccaaatccttttaacgcaaaagctgcgtctcttaatcattatttgtttggataaaagcaacggttgtattttgtcctattattttaccaaaaatcgaccatctaaaatcttcaaaatagaaaaaaataataggcaaacgatagacaaaaatgggctgattttaccaaaaaagaggtcttttcaagctaaaacaatgactttacggtcttggaaacatacaatagaggtgttgttcacatgcttcagcagccttaaagcatgcaaatagtaagcttatctcaatgcttcagtcgccaagaaaaggtaaaaaagagaagaaaaagacaagaagttggtataacgtattcaataataaccgattacaaacttcgctcaaaattcgagtatttgcgaccaactttgtcgttggttgtttacacgcgagttatgagaggcactttgtaaagataattcagcatttattatcttttcattctgcataatatcaatcttacaaatgctgtttttgggaacattttttcgttgcaaaattctattcttcaatgaaagaatagtgaggatggaaagcaaccattaacctgaaaatgtccttaaaatttgcatatatgtaatttataagttacctttgcgatatgaaatacagacaagttgttgcatataaaacatactttgatgaattttttaaggaccaaaatgagaaagttcagaagaaaatcattaaggttcttgatattgtggagcaaatagagcgtattccacaaaactaccttaaatatatcgaaggtacgaatggcttgtttgaaatacgcatacagctgggcaataacatctttcgcatcttttgtatttttgatggaaaccaacttgtagtcttgctaagtggctttcaaaagaaaacacaaaagacgccaaagtacgaaataaaacgtgctgtaaaaataatgaacgactattataacgataaaaaggaggtaacgaaatgatgaataatctaaaatcactcgacaatataaaggatcaatattatggtgctgttggcacgcctaagcgtgatgagttagagcgtgaattagaatctttgcgtataggattgaaaataagggaagctcgcgagcaccttaatatgacgcaagagcaattagccaatcggattaataagaaacgctcctttatatctaaggtggaaagtaatggtgaaaatataacattaaaaacactttttgatgtggtagaacgtgggttaggtggaaagctaaatattgaagtttctttctaatagtggagcaaggaagacaaatagtcatacagaactgtcattatggcatttataattaaaaggcatggcttttgaatccaatctaaggaaaaacgaatttacaaaaagaaaggaacacaagatatgacatttgacaaatttacaattaaagcacaggagacggttcaagaggctttgcgcattgcagaacaagcaggacagcaaagcatagagccagtacacttgttgcaagggttgctaaccaaggggaaagaggtaaccaactttatttttcagaagttaggtatcaatccctcacagatacaacagcttgtgcaaagcgaaatagtccacttacccaaagtgagtggcggacaaccttactttagcaatgatactgataaagtgttacaaacaacggtagacctctcacaaagtatgggtgaccagtttgtagggttagaatctctattgttagcattgctcacagtaactacaacagccagtaggattttgaaagatgctggatgtacagaaaaagagatgcgtaaagccatcgaggaactcagaaagggtgataaaattcaaacgcaaagtggagacgagaactaccaagccttggagaagtatgccaaaaatttggtgaacgacgcacgggcaggaaagttggatcctgtaataggtcgtgatgaagaaattagacgagtgttacagattctaagtcggcgtaccaagaacaaccctatattgataggagagccaggtactggtaaaacagctattgtggaaggtttggctgcccgcattgttcgaggcgatgtacccgagaacttaaagaacaaacaactgtactctttggacatgggagctttggtagcaggtgccaagtacaaaggtgagtttgaggaacgactgaagagcgtcattaaagaagttacccatgccaatggtgacatcattcttttcatagacgagattcataccttggtaggcgcagggggtggagaaggtgcaatggatgcagctaacatcttaaagcctgccttagctcgaggtgagttacgtgccataggagccacgacactgaacgaatatcagaagtatttcgagaaagacaaggcattggaacgtcgtttccaaaccgtattggtagaagagcctgatgagttaagctctatctctatcttacgtggactgaaagaacgttatgagaatcaccacaaagtaagaattcaagacgatgcttgtattgccgcagttcagttgtctgaacgatacatcagcgaccgtttcttaccagacaaagctattgatttgatggacgaagcggcagctaagctgcgcatggagcgcgactcattgcccgaagagctggatgagatgactcgtaagttgaagcagttggagattgaacgtgaagcgatcaaacgcgaaaacgacgaggtgaagattaaacagctggataaggagattgccgaacttaaagagcaagaacaatcgttccgtgcaaaatgggaaagcgaaaagaacttggtcaacaagattcagcaagacaaacaagagattgaacacttgaagtttgaagccgatcgtgccgaacgcgagggaaactacgaacgagtagccgagattaggtatggaaaactacaaagtttgcaagccgatattgagaatatcaagcaacaactcaaggcaactcaaggtggtgaaggcatggtgagagaagaggtaacagccgatgatattgccgaagtagtaagccgatggactggaatacccgttacaaggatgctgcaaagcgagaaagacaagctgttgcacttagagaatgagctgcatcgacgggtgataggacaagatgaagccattgtagctgttagtgatgcggtacgaaggagtagggctggattgcaagatcctaaacgtccgatagcatcgttcatcttcttaggtacaacaggtgtgggtaagaccgagttggcaaaggcgttggcagaatatctattcaacgacgagagcatgatgacacgtattgatatgagtgaatatcaagaaaagtttagtgtgtcaagacttatcggtgcgcctcctggatatgtaggctatgacgaaggtggacaactcactgaagccgtgagacgcaaaccctatagcgttgtgctatttgacgagatagagaaagcgcatccagacgtctttaatatcttattacaagtattggacgatggtagactaacggacaacaaaggacgtacagtgaacttcaagaacactattatcatcatgacttctaacttggggagccagtatatccaacaacaaatgcaggatatgacacccctcaatagagaagagaaacttgagcatacaaagcttgaagtgatgaatatgcttaaaaagacaattcgtccagagttcttgaacagaattgacgaaactattatgttcttgccattgaccaagcatgagattgcggatgtggtagagttacaaatgaatgccgtaaaacatatgttgcaaactcaaggctttagtcttgaatggacgcaaggagctattgattatctctgtgacaaaggctacaatccagagtttggagcgcgtcctgtaaaacgtgccatccaacgatatgtactcaacgacttgtctaaaaagctattagctggtaaggtgatgaacaatcgtcctattaagattgatggaacacctgatggactaacgtttagcaatgcataaactacaacgaagaacaagcacctaaacccctcggtatagaggggtcatggtaaacctatatgtaaaaaagagcggactaaaaaccgctcttttttgcgttttatctctatgggcagacctgctgaaatttcacttgagtatttttcttccattgatgacatatattccttgtggcaatcttgacaaatcatctcccacatattgcccatgaagattgtaaatacgatgggtgtatggtgacggatgaattgcgggaaaagattgaataccactggttgtggagcgtggacccactacttttacatcatcaagaaaaagcctacgatcggggacaaacttaatcaccgtagctccctttccctcaaaaggagcagagatagtagtccatgcatccgtttgaagcgggaaactatcaagcaacttttcgttgatatacacatccacagaatttccgtcattaccaaaaggagctgctacgaaaatcaaagtatcggttccaatagccataaaagagggagaaaaaacaattcctactccgttttttgctaaaccaaatcttgcacatctatcgccaccataagccgcaccagagagtactgtccacccttgtacatctggtaaatactgagatctttgagtagctactcgcccacgaaagcctcctgagttccctcctgtgccatgacattgattaaaagtctcgtgaaatagaacaccatctggcaatggagcggcagtatcatccgcagtacgagttccaacactcaactgaaaggaaactgtcccattggtatgacgctgaatgtttgtgaggtttttattcatcagcatactaccttgcgcattggcatgaaagagattggcagctggttgcgaagttgaagtgagacagttgttacctttataaggataagggtcgcctgccacctctgctgtatgaaacattcccaagctggtaaggtatcggtcagagccgtcggcatgaaagatagtgcatcgttggtggctattatctgtatttacttcgttgtcgctccatgcctgcgcatcatagtcaacatgaagaacaagtagtccctcgccatccaaatacgtatcccatttggtttttgccctgttttccaacagataatattcattgaggtgtccatcattatataagatataactctctcccccttcactcaatggcttgacgttttgtaccagcgtgtcctttgtgagcttgtgaggtgtcatccaaccacaaaacattcgctcatagctcgtataacctgcgggtacaaatgtattaccgttgtatgctccttggtccataatatcccaagtacacatgccataattttcttgatttgctgtatcgtacatgtcgggaagccccaataaatgagagaattcatgacagattgtgccgataccatctatttggtgagcacctatcaactcggcactacaagcataaggacgaatagtaacaccgtccaaagttagaacatcgttggttgaggaaagttcggattgatgtggccaaatggtttgagggtctgttttgtacgttgaattttcgccctgacctgcatataatatgtaaatagcatcgacctctccgtcatgattccaatcatagtcggcaaaatcaacttgcgcatcgacggctctgcacgcttctttcaccatttcctcaggacgaacatcctctccagctttattattttcaccgtaataggcatagggatgggataggttgataggtccctttacgtcaaaagccaaatcaaaaagtccattactttgagccttgaaataatcttttacactgcccttaaaaccaagttcatgctgaaaattggacgtattgcaaatgttttcataaagaagaggcgtatgttcaggaagaaattgcttgtctggaaactgcactaaaagcagcaacgccttttttatttgcgttctgttttcctgtaatatcttagcagtggctaatcttctatgacgtctaacctgatttatttgacttcgagtggcagcagcgatacgctttagattcgctaaatctaatgcttcaaagccgcccaaaacaggattataaatgtattgctgtccatcttctgcctgcatatagtgaagatattcatcgccaacaagcgttgccaaaacctcacgcccattcgttaaacgaatcgtcgtatatccttttcgctttgcagggatagcatttacacaaagcgtcatactaagaatgaggagaaaaacaagagctcgtttcatcgtatttcaaaaatagtaaaaaacttattgaatggacttcatagtaaaagacaaggttggtaaaattcgtattgacatcattcaactacagcctttcttgtcacaaagataaataaaattaaccattgcatgaataaaaatgaacagaaaagctgcattatcgttttgaatcttcattgatttaacgtatctttgcaatcacaaacacaactatttcttatggaaaacaaactaaaagagtcggtagaattacctgacaacgctttcagagaactgaaagaaggagaagagtatcaacctgtgatgaacccaaagcaagtatatcccgaagtaaatgcttggtcagtgacatggggtatcgtaatggcaatgctgttttcagcagcagctgcgtatcttgggttaaaggtaggacaagtttttgaagctgccattcctatcgcaattattgctgtgggcgtgtctaccgcaaccaaacgaaacaaagctctgggtgagaatgtcatcatacagagtatcggtgcttgctctggagcggtggtagcgggagctatctttacactgccagccatttacatcctacaggcaaagtatcctgagatgagtgcttcgttcctcaaaatatttatgagttcggcattgggtggcattattggcatcttattcctcattcctttccgtaagtattttgttagtgatatgcatggaaagtatccctttcctgaagctacggctacaacacaagtgctcgtcagtggagcaaaaggaggcgcacaagccaaacctttgctcgttgcaggattggttggtggtgtgtacgactttattgttgctacgtttggatggtggaatgaaaacttcacctcacgtgtcatgggctggggcgaacaagtagcagaccaggcaaagcttgtcttcaaggtcaatactggtgccgctgtcatgggattaggctacatcattggactgaaatatacctttattatctgtcttggatcatttgccatatggtggcttatcgtgccaggactctccttattcttcggcgacaccattcttaacattggtggaacggttgtttcgatgcctgtaggagagatgtcaccagaaaccatatttgccacttatggtaagagcatcggtatcggtggcattgctatggctggtattattggcattattaagagttggggaatcataaagagtgccgttggattggctgctcaagagatgaaaggtaaggacaatagtaagaaagaagaaatacgtaccagacgtgacatctcgttcaaagtcatcgccatcgggtctattgctgccattgtcattaccttcttgttcttcctcttcggtgtgatgaacaactttacccatgcactcgttgccattctcttggttgctggtattgcctttttgttcactacggtagctgcaaacgccatagctattgttggaagtaaccccgtgtcgggcatgactttgatgactttaatccttgccagtgttgtcatggttgccgtaggacttaatggtcctgaaggtatgttggcagccctcatcatgggaggcgtggtatgtactgcactatccatggctggcgcctttgttaccgacttaaaaattggatattggttgggtacgacacctgccaaacaagaaacatggaaattccttggaacattggtaagtgctgccaccgtgggcggagtaatgatgctgttaaaccaaacttacggctttgaccctgagcaacaaggccacttagttgctccacaagccaacgctatggctgctgtaatagaacccatgatgaatggtgctggtgcaccatggttgctctatggcataggtgcattgattgcagttgtgctaactctcgtgaagattcccgcattaccttttgccttgggcatgtttataccattggaactcaacatacctctactcattggtggtatcattcactggtttgtcacctctcgcagcaaagacaaacaagccaataaggcacgaggtgagaaaggaaccctgcttgccagtggcttcattgcaggtggagcattaatgggagtggtcagtgcattgctccgatttacaggatacaatcctatcaatcccgaatggttggcaaatccattatcgcaactactatcacttgctgcctacttgctcttgattagctactttattatggctacgcgagtaaagaagtaagccacctcttgggcagcagccaaaggataaaaacacaacattgggcacatacaacaaacagctcatggcacactactttcagaatttgaaaaaggtgtgaacatgagctgttttcttgatacgcaatcgctacaagaaacgcaaaagactactgaccgtttcatcacgtcatcacaaaagctgtctgacaatgggttggcgatgctttgagatgtcacacccaaaaataaaaagcccactgtatgtatcatacaatggactctcattgtcggggcgacaggattcgaacctgcgaccgcctgttcccaaaacaggagcgctaccgggctgcgctacaccccgcttgcctttcatttctgaattgcgagtgcaaaggtaatagattatttctgattaccaaaacattttgatgtttattttttaatttattgcaccaatatcaccagcataataatgcacaaccttattaataaacgaccttgagaaaccatacatgcaaggcatggacaaaaacagaaagccctcatccaatcattcttgatgcagatgaggattttctgatataaactgtgttgtgcgtcattcaatcactatttgaattacaacgcactaacgatgagatttagcgatagctacgctaaaatgccctgttgttggaaaacttttttaaggacttgcacaccacgttcaacttgctctatggtgtgtgtcgccatgagcgcaaagcgcactaaagtatcttgcggagcacaagcaggaggaatcactggattgatgaacacgccatggtcgaaagccaactttgtcaccataaacgttttatcgatatcgtgtacatataatggaatgataggactttctgtatcacctatctcaaaaccctcctccttaaatcgacgtaacgcatagcgagttacttcccatagtttctctatacgctcaggttcggcttgcaagatatgcaatgccttttgagcagcagctgttgcggcaggtgtgtcagaagcactaaagatgtaagtgcggcaggtatgccgtaaaaagttaatcgtatctttgtctcctgcgataaagccaccgatagaagcaagactttttgagaatgttcccatgattaaatcaacatcgtcggtcaatccaaaatggtcgcaaacgcctctaccttgcttgccaaacacgcccacaccatgcgcctcatccaccatgacagaacagttatactttttctttaagcgaatgatttcgggcaaattagccaaatctccctccatagagaatactccatctaccactatcaacttcaccgcctcgtgtggaagtttctggagaatgcgttccaaatcttgcatatcgttatgcttgtatcgcaatggcgtagcgaaagacagacgacgcccatctacaatactggcatggtctcggtcatcacaaatcatatagtcgttccttcccactaccacagccaatactccttggttgacagaaaagcccgtagggaaacaaagcgcatcttccttacccacaaacgtagccaactctttttctaattgcacatgcaaatctaaggtaccattgaggaatcgactacctgcacagcccgatccgtatttctccaacgcagccttagcagccgcaataacacggtcgtcgcccgttaatcctgtataggcattcgaaccaaacatcaaaactcgatgtccgcccatttctacttcggttccttgtttactggttatctctctaaaatagggatagactccagctttaatatattttagcggttcacgatagtgttggtaacgttcttgtaattgtcccattttcatcaattctttttcctttattttataatcagaatgcaaagatataaataattaactgattttgtcctttttacaaccatatatgtttgtttttatgttttttatctttcagcatatcgtttattgaacggaaagtagtacatttgcaaccattgtcgatgattttattcaacgattatacgatttctataagtattgaatggactgaagatgaagaaaatatggttcatcatgaatcccatttcgggaacaacgaataaaggtggcatacccaaactaattgataatacgttagataagacgcagtttgagtatgagattttagaaactaaccacccaggacatgcctctgaattggctaccgaagccaaagaaaagggcgtagatattgttgttgcagtaggaggcgatggcactgtcaacgaagtggcacgtgccattgtacactctcataccgccttgggaatcttaccctgtgggtctggcaatggtttagcacgccatatgctcctgccgatgaaccttaaaaaagccattcaggtgattaataaatgcgtcatccaccattttgattatggtattatcaatgacattccgtttttctgcacctgtggcatggggttcgatgcgtttgtaagtcagaaatttgccgaatgtggtaaacgcggtccgataacttatgtacagaaggtgttagaggaaggattgaaataccaacccgaaacatacgaaattattgacgaccatggtgttagcaaatacaaagcctttctcatttcctgtgccaatgcgtcacaatatggcaacaatgcggtgattgccccgcaagcgtccatgagcgacggctatatggatgttatcattatggaaccattcgaccttatcgaagcttcgcaaatcagcattgacatgtttaacaaaaccttggataagaattctaaaattaagacttttagaacaaaaaagttacacatcaaacgaagcaaaccaggggttatccattacgatggtgatcctgtgatgacgggtaaagatattgacatagaactacaagagaaaggtatcaaaatcatcatcaaccccgatgccgatagacgacagcgccaacccaatgcgttacaaagtgcggctgcagaactatttaacgaaattaacgttgttcgagaggatatttcaaagcagacgcgccatattcaggcgttgagtcgagtgctacaaaagaaactgaacatataatctcgttggagtggggagtgcttgaaggcatgaacagcgcaaaaaacggtcactacatttaccgttcatccctgcaagtcgcccttaaatttgtgcatcaatgcaaataaaacgcatgggttaacgccttgtaccactcacttctttgcccttgttcgtccaacaatgtacactcttttatttccaaacaatcggggcgaaactttgtaaaagccatgagactgcgtttgggttcttttcgcaaatgggttttaattttatattgtttgtacaagtaaagtcctgcaaatgctgcctctgccacaaacttttccgtattatccgtgggcaacaccacactaaaaattcccctactcgagagcaacagctggacgcccttgcacaaatccttatacggtaagctacaggcgtgcctcgccaatgccttttgttcgtctggattgcgcaagctatctataaaataaggtggattagtcacaatggcatcaaactcctctgtggcactcaactgttgcaagggcacattttccaccgctattctatcagcaaaaggtgatgcagctacattttccgcagcctgttcacacgcctcgcaatcgatatctatggcgacgatacgagcctgtggatagcgttgtgccatcatcaaagcaatgagtccagtgcctgttccgatatccaaaatgcgctgtccgccttgcgcccacgctcccaacaaaacaccgtcagtacccactttcatggcgcatctgtcttgccgcaccttaaagtctttcagttgaaaccaatcgttactcatactgcaaacttagtcatattttgggaaaaacgttccatcgggtgcttaaaagtagcaaaaaaatcaccaattcttattttactactaacgatgcatccgacagatggaagccgccagtagcgacaagtataaaatctttgatttcaacaaagtacacttacgcttcttaatccatggctccaagcatgtcaaggcatacaccttgtgttcacactccattaatgagactatctcactcggttaatgaaaaaacgttggtatgaaaatattactaataaacctaatatagaagaagaaataagtaatccctaaatacacatctttcaaatctctcaattgctctggttttgccatttttcgaacggtaggccagtaatatacgaggcataaaaaaatccagggctctgaatattgatataatccacgaaacatgaaaaacacattcactataactaaggtaatgagagatttgtcatacccatagtcctcttctaattctttgaaaaactctttcaccttgctcatcactttcaaacgtcaattgaattttactattacaaaaatagaatatttttttgaaacgttaaagaaatatcatgagaaaaacgatctacagcatggtgctttgacatctccacacactcgtacgccagagagcgaataaaaataaaccattctgcctctcggaaaaacacagttctttgtattttagactcatatttttgcaatgaaaagcaccaaacaaacaggaattataaaattagtgatatactgtatgggaggctcataaatgctgaattttctttacaaagtgcctctcataactcgcgtgaaaacaaccaacgtcaaagttggtcgcaaatacgcgaattttgagaaagtttcataacttcttgttgtttaagatgttacgctcaagccatttcgtttcatccctattttcatccttttttggcgattgaagcattgagataagcttactatttgcatgctttaatgctgctatggtatgtagataatggctctaatacatgtttctaagaccgtaaagtcaatgttccggcatgaaaagacgtttattttgttaaaatcagcccatttttgcataccgtttgcctattgattttttctattttgaagattttagatggtcgttttttggtaaaatgataggacaaaaacagcggatgcttttaaccagaaagataaggattaaagcaaaaaagagctatcggcaactaaacgtggcacacattttgtaccataatttaactggtactcaaccacacatattataaatagtagaaacgcaaagtccttatctcaagaaaaagtagtaactttgcaagctgataacgaaaagagaatatatgagcaagaaaaataacgcatctatccaaatgattgctgattacgaaggtgacatctctaacttattcaacgtgaatgttgaaggagaagtgcccgtattggcaacacgcaacatggtgatgtttcctggggtgctttgtcccatactcattggacgcgacaatagcttgaagctaatagaaacagtaaagaaaagtcccaatactacatttgctatcttctgtcaaaaaaactcagagacagaggagccacaacaagaagatttatatgaatatggtgtatatgctcgcttggtacgcgtgctggaaatacccggacatgggcaaaatgtaacagccattgttcaatcgttgggtcgttgcaaactcgacaagataacgaagaagacaccttaccttcagggacttacccatttagagccagaaatactgcctaaggaaggcgactcggagtatcatgcagccgcagaagatttgcgcaaacaaaccattgaatatatcaaagagaatgacgacattgcagatgaagctcaatttgcattaagtaatctgcaaaatgacgtgctgactattaactacatctgcaccaacatgcccttctctattgaagacaagatgaagatgctgatggtcaactctatgattgagcgtatcttggtgtcgctgaaagttctgaacaaagaaatgcaactgcttgaattgcagaaggacattcgcaccaaaacacgtgaagaccttgacgaacaacaacgcgaatacttcctacaacagcaaattaagaatattcgagaggagttaggcaatgctgacggctctccagaacgacgtgaattagaagaaaaagccaagaagaaacattggaatgaggatattgaggcgacgtttgaaaaagagcttgataagctcgacttgctcaatccacaaagtccagaatatagcgtacagctttcttatcttcagactttggttagcttaccttggggagagtttaccaaagacaatcttgatttgcgtcgtgctgctcgcaccttagaccgtgatcactatggcatggagaaagtgaaagagcgcatcttagaatatatggcggtattacagttgcgtggcaatctaaagtcacccatcctttgtctatacggacctcccggtgtgggtaagacaagcttgggcaagagcattgcttctgccatgaaacgcaaatatgttcgcatttcattaggaggtgtacacgacgaatcagagatacgcggacaccgccgaacctatattggtgccatgcctggacgaatcatcaagagcttacagaaagcaggctcttccaatcctgtctttatccttgacgagattgataaagtgactcaaaacaccattaacggtgacccctcgtcggcactccttgaggtattggacccagaacagaacaatgctttccacgacaactatttggatgtggactatgacttgtctcacgtgatgtttattgccacagccaacgacctgaatactattccacgtcccttgctcgaccgtatggagattattcaagttagtggttatatcacggaagaaaagatagaaatagccaagcgacatctcattcctcgtgaattgaaaaatacgggattagacacgcatagcccaaaagtgaagttcaacaaagcttccttagaaaaaataattgagcattatactcgcgaaagcggtgtgcgccagttagagaagcaaattaacaaagcactgcgtaaaatggcttacaacaaagcgatggaggggaacttagactacacggacatcacagctgaaaagatagagggacttttgggcaagcctcctttctaccgtgacatctaccaaggcaacgactatgcgggagtagtgactggactggcgtggaccagtgtgggtggtgagattctctttatagaaacctctatgagcaagggaaaacctggcaagctaacgcttactggtaatttaggcgacgtgatgaaagaatcggcagtgatagctctcgaatacgtcaaagctcatgtagacgccttaggcattgactaccgtgtctttgaccagtggaacatacatatccatgtgcctgaaggcgcaactccaaaagacggtccatcggcaggaatcacgattgctacgtctattgcatcggctctcactcaacgcaaggtgcgcaagaatacagccatgacaggcgaaattacactccgtggtaaggttctccctgtaggaggaatcaaagaaaagatactcgcagcaaaacgagctggtatcacagacattgtgatgtgcaaggaaaacaaaaaggatattgacgagattcctgaaaaatacttgaaaggtgtagatttccattatgtggaaaacgtgcaacaagtgtgggactttgcactgacagacgaacgggttgaccatccaatagatttgacagtcgaagacgagtcaaaacgaccgagcaagcaaatagaagaggtacttgcataaagcgtatcaacatgacatttgaactccaacatacagaccctaattcgtctgctcgcacaggactgattactacggctcatgggcaaatcaaaacaccgatttttatgcccgtgggtacggtgggaaccgtgaaggctgtgcatttcagcgaactaaagcaacaagtcaaggcgcagattatcttgggaaatacgtatcatctgtaccttcgaccaggtttagagattctaaaagcggctggtggactacatcaatttaatggttgggaccgtcctattctgacagactctggcgggtttcaagtgttttcactcacgggtattcgcaaattaaccgaagagggatgcgagtttaggtcacatattgatggctcaaaacattttttcacccccgagaatgtcatggatacagagcgtatcattggcgcagacatcatgatggctctcgatgaatgtcctccaggtgattgcgactaccagtacgcaaagcaaagtctgggtatgacacatcggtggctggatcgttgtatcaaacgctttaaggagaccgaacccttatatggatatgaccaatgcctatttcctatcgtgcaaggagctgcctataaagaccttcgtcaagagtcagcaaaatatattgcagatcaaggtgcagatggaaatgccattggtggattagccgttggtgaacccacagaggtgatgtatgaaatgattgaagtggtgaacgacattcttcctaaagacaagccacgctatcttatgggcgtgggaacaccacaaaacattttagagggcatcgaacgaggcgtggatatgttcgactgtgtgatgccgacgcgcaatggacgcaacgcaatgctctttacttatgagggtacaatgaatatgaagaacaagaaatgggaaaatgatttcactcccattgattcttcaggatgcgacattgacatggtatgtacgaaagcatacctgcatcatttgtttaaagctaaagagtatttggcactacaaatagcctcaatacacaatttggcattttacctcagactggtaaccgatgcacgtcagcacattgagcagggcgactttgtcagttggaaacgaagtatcatcgaacaattgggacgaagaatataaacggatgaaaagtttcaaatcaagaagaaaacaccgcagattattaaaagtcggtagaaaaatgcatcgacttactgctcccatagggtcattgtttcaatggcttgctcacaaactccgtttcttaaagattctgaatccaaagaaatatattaagcggatagactggtatatcataaaaaagttcattggtacttacattttctctatcgctttgattatcgctattgcgatagtctttgactttaatgagaatttgtccaagttcaccgaatacaaagctcccgtgagagcaatcatctttgactattatgccaactttatcccatacttctcaaacctgtttagcccactatttgttttcattgccgttatctttttcacttccaaattggctggcaattcggagattatagccatgctggcaacaggtatctcctttaagcgtctgatgcgaccctacatgatatcatgcatactcatcgcgacagtgtcgtttttcctcagtgcgtatgtcattccacatggtacagtagtgagacaaaattttgataatctatacaagaataacaaaaaacggtcggctgcggataatgtccaactgcaagttgacaaaggaacgatagcctatattcaacattatgacaataaaacgaaacggggatacggcttctcgttagataaatttaaggacaaaaagttgataagtcatctcaccgccatggaaattcaatacgacacgattgccgatgccaagtatcattggaccgtgactggttggaagataagagagctgaagggactacgagagcatattaccagcggagcagaacgagacactgtcatcatgatggagcctatggacttggtatattctaaaggacaacaagagacgtttaccagtccagaacttcgcgagtacattagcaaacaagtaaatcgtggctcaggcaatgtggtgcagtaccaagtagaataccataagcgtattgcctcctcctttgcctctttcattctgacgattattggtttgtcattgtcagctcgcaagcgaaaaggaggcatgggattgtatttgggactgggacttgcattgagcttcttgtatatcctgttacaaaccatctcggctacctttgccataaatgcagatgctccgccaatgttggcagcttgggtacccaacattatctttagcattgtggcttacttctgttatagaaaggcgccgaattaatgccatcaatgattgacgtcattacttttttggcatgcgaagaaaataaaagaaaaatagaaaaataatccatatttcgtcagcactccatagattgcgagatacgaaagatgaatagtaaattaaaatatgaaatttgaagaattaccattaaataataatgtattagatgctttgtacgatatgcactttgatacctgcacaccagtgcaagaaaagtgtattccagaaatcttaaaaggaagagacgtcttaggcgtagcacagacaggaacgggaaagacagccgcctatttattgcccatattgagtaaaatagatagtaacaactatccagacaatgccattaactgtctcattatgtcgcccactcgtgagctggcgcagcaaatagaccaagccatgcaaggctttggctattatcttcagggtgtgagtagcgtagctgtgtacggtggaaatgacggaaaccgatatgaccaagaagtaaaaagcctacgattgggggcggatgtggtgattgctacccctggacgcctgattagtcatatcaacatgggtaacatagacatgaacaaaattagctttttcgtgttggatgaagccgaccgcatgctcgacatgggctttgctgacgacatcatgggcatagcaaaaggattgcccaaaacttgccaaaccataatgttttctgcaacaatgcctgacaagattaacgatttggcacggaccttactgaaaaatccagttgagattaagttggcagtcagcaaacctgcagagaaaattaagcagtgtgcatacatttgttacgaggcgcagaagctgaaaatcattgaagacatctttaagaaaggtgatctgaaacgtgttattgtcttctgcggttcgaaactaaaagtgaaacaggtagcggcagcactacatcgcatgaatgtaaactgcagtgagatgcactctgatttggaacaagcacagcgtgatgaagtgatgcttaactttaagagtgggcaattagacgtactcgtagcaaccgacattgtggcaagagggattgacattgatgatatatctatggttatcaattatgacgtacccaacgatgcagaagactatgttcaccgcataggacgtaccgcacgtgctgatagagacggacaagccattactttggttgcgcaggacgacacttatctctttgaacagattgaaaagttcttaggaacagaggtggaaaagattcaacttccagaaggtgttggcgaggcacccgaatacacttcgggaagaagcccgcaacggcgtggaacaaaggctaaatctatccgacgcaaagatagaaatcagaccgcacataaacataagcctcgccgtcaaaacgaccaacaaaatgagacttcacagacagtagatgcatcaaagaacaataatgtgtcgaaggattctgaacagcttgaaaaacaaacaagacgtaaaggtcgtagaaagaatgtacagccacagcgcaacaatcaggtagcaaagcagaaatcagagaatgaacgcacggacgaaaagagtaccgagcagcagccaaagaaacaaagcaaacgacgcacacaaaacaggaataaaaataggaataataagccacgctcgcaacaagacaataaccagccaaacgtagagggacgcaataagaaagcaacccagcccaataatgaacggcaggctaagaaacagcggaccaacaaaaagcaaaacaaacgacaaaagcaagaggtaacgtatcaaggtacgagaaaatttgaagcaccaaagaatcaacaaaagacagaatcaggcttcacttcaatcattaagaaaccattgcgctggcttaaatccttgagtaagaaataaaaattagagcaccacgagtgctcttttttttatggctttcacaaatcagtgaataatgccagttcagaaaaattatacaacaaggctttttagaaacgacaccatacctcttagaattgatgagttataccaaaaataagcgactctatctccaaaaacatcaaacacaagatatgcaataattgtgttctgtttaatctttatcgtacatatgaggcaaagcacgtaattcttgataagtggttttgatatcttcaggggtgatatcaaatgagcgatctatctcacgtggtgaatctttcagggaatgataaaagagccaatcataagttttctgaagataaaacaaccgcgcaggtgctccatgcccacctccttgcatccagtcgtaccgcaaaaggtggtccatgtccttttcttgcaagtattcaaccaccttttttgattcattaatactcaccgctctatccgctgttccatgcataatccatagtggcacacgtcctaatccgtcctgattcttcagcgaacaaccaccacaaaatgccattgcggcagcgattttgtcgggataagttcccacaaaatccatggttccatatcctcctaagctcatgcccaaaacataaactcgcgtactatccacccgatagtgactcttcatccattctaacaggtcattcaacttactgggactccatgctccaccaggattttgaggcgccaccactaatgtaggaattatttttccatgatcaatcgcatccagcactccatatctacgaaccttgttcaaattacgaccacataaactggcaccatgcaaaaaaataatcaaaggaaaatcatgatcgtcgtctatatagtccgcaggcttataaagccaaaaagaataaccgcctgtaatcacattctgttgcttttcaaagatgccttgaggatttaacgattgagccgaagcactaaaaacacaaaccagtaaatataatgaaaggagagaagatcgtataaacatttgcatgactcaacggataggataatgaaacatatttctaaacgcaacaaatttaataaaaaaataacgaactactcatcacaaatatcaggagattttgcaactcactgaagaatcttcacacagcaacatggttctttcattgaaaaaaagtggctaattgtgaaaaacaaaacttatttctttgattttaacaaccaatcttacggctgaagcgaattgcatagtttgtgttcatggcttgcccgattcgttgcattggttgtaacaaaaatgaccctttgatgaaagtgctatatcatttacagcattatcatttatggtaaagatattcgaaacttttgtcttataattttaccaaaaaacggtcatctaaaatcttcaaaatagaaaaaatcaataggcaaacgaactacaaaaatgggctgattttaacaaataaaacggcgattgaagctaaaacattgagtttacgctcttggaaacatgtattagaggtgttattcacatgcttcaacggcattaaagcatgcaaattccacgcttatctcaatgctttagtcgtccagaaatgataaaaaatcgaatgaaaagaaatgatttacgtgtaacatattcaatagcaatgaattacaaaattctctcaaaattcgcgtatttgcgaacaactttaccgttggttgttttcacgcgagttatgagaggcactttgtaaagaaaattcagcatttattattcttgcatactacgtactaccaatttaacaaacactgtttaattggtgttttttcgttgtatgcttactcatctgtcacacgaaaatagggcagatgtcttatttggttacttctatcactctaaatacaccatcgccattgaggtcgggttgcattacgatagggtagaactgtacgcacgaagctttgtccaccggaatgtcttgatgcgtatcggtgagcaatcctgtggcactgttgatgcgaaatacttgtatgacattgctgtctcggcatgcgcacaacaagaatcgaccgttaggggtgatattgaaatggcgtggatgtatgcctgtgtgctgatagcccactttggtcaacagccctgtgcggttggcaatcttaaatatagtgatgccatcatttttcagtcgattactggtgtaaagaaaacgtccatcgggcgaaacatggatgtctgcacctcctcgtgcgcctacttcgtcagacaatatctcttgaattttcttcatctttccgaagttatactgataaacggtaacagcaccagacagttcgctcatgacataaacaaatctgctgtcagtgctaaaagctatatgacgaggtccagagcctttggtgagttgtgctgtcaccttctgatctcctaatgctttcatgtctgtaagttcatatcttaacaactggtctgcgctaaaatcagtagctaagacgccattgccatcgggtagaaatcgggtacaatgaatatgtggcatattttggcgttgagtatcaggtccattggcatgccccttgaattgttgagacatgggttccaatgacccgtcaatatttaagggaaacacactcatagacccacccgaatagttggcggtgaggagaaggttgccattagtttccacataacaaggatctgcaccatttgttggcatactttggcgtagcttcatacgccctgttgcttggtcaaaggtaatggcatggactgacgctgcgtcctctgaattttcgctcaccgcatagatcattgcgccatctgaagagagagtgaggaaggaagaattgctgacttctaacgtatccaaaggggtagctttgcccgtagattggttgaagtcaaacgaataaatacctttacctgttccattggcataagaaccgacaacgagcttaatgttgttttgtgcatcaagtggtaatcccatacaaaaagtgagaatgatgagaaaaatgtttcttagtttcatagagtatattgttattgataagccacaccgtactaatatatataataaggtgtacatggtgacacgatttgttagaacggttcaaagatattcattttttcaaacaatggcaataaatcaatcaaatttatgcattatcaaggaattatttgtatttttgtatctcagaatgaataacatacaattaactccttttagaaaaggtgttgtgggagtgcaattccttttcgtggcatttggtgcaacggtcttggttcctttattggtaggacttgaccccgctacggctttgtttacagcaggtataggtacttttatctttcatttggtaacgaaaggaaaagtgcctattttcttaggttcaagttttgctttcatcgctcccattatcgaagcttccaagatgtggggcatgccaggaacattggcaggcattgcgggtgtggcgttggtctattttctgatgagtgccttagtgaaatggcaaggaagaaaactgctaaatcgccttttcccacccgtagtgataggtcctgtgattatcttgataggactgtcgttgtctggttcggcagtaaatatggcgaaagaaaactggctattagcatttattgctctggtcactgccattactgtcttgatgttgggtaagggattgctcaaattagtgcctatcgtgtgtggaatcatcgtcggtttcattgtggcagccctactgggtgaagttgatttttcaaaagtacaatcggcagcatggtttgcacttccgggttcgttgtcaaactttcattggcccgaatttgcatggaaaccttttatctatatgatacccgtagccattgcgcctgtcattgagcatattggcgatgtgtatgttgtgggagcagtagcaggaaaagactttgttgaagagccaggtttgcaccgcacaatgttaggtgacgggttggcatgtttggcggcttgcttctttggagggcctcctgtaaccacctattcggaggtgacaggggcgatgcagattacaaaagtgacccatccgcaagtgatacgcatctcagccctcactgctattgtcttttcagtgattggcaaattgagtgctcttttgcagagcataccacaagcagtactggggggaatcatgctattgctttttggtacgattgcgagtgtaggagtacagaatcttattcaacataaggttgacatgaattatcaaaggaatgtcatcattgtttctgttatattgacattgggaatcggtggtgctatactcgatttcactctccgtggcatcttgataggcgtcttaatggtgatttgtctcatgtacgcaaactcgctcaaatcaaaccgttggagagctctttgctgtatcatcggtggcatcttggcaagtttggtggtcttttactatttaccagctggtgaaagtgaacttacaaaaatgagtggcataggactgagtgctatcgtgggtgtaatactcaatttggttttacctaaagataaagaggaggagatgcgtgaaggatgatgcgtttgaactttattggcagtcacataggcgtgaactcttgtctaaaaacaaggaatatagagagatagaagaaagctacaagatgagaacaggctttgattggctactatgggctgtgccattggtctgcggaatcctcgctttcaagttggttgctggagcgaacgaaatattgaattggctgatatcggctgctgttgtcatcgtcacttttttgctatgtgtttggatcaaggcaactctttctgggcatcggtctctgtcagaagtagaggaagatgtcaaaaagcaatcctacgaagaatttaggcataaattaaatcagtcataatggcatcactgatataaattccttctgccgttaaacgaatataatcgttctctatttccatgagatgtcggtcaataaacctttttgcctgttggagtaaaaaacttcgatagtgaggagtaagggctgagaggcgaataccttgggaggttcttagggcagtagtcacgaggtcattgtagcgagtatcggcatccaaccattccttttctgctggaatcttgccttgttgaatggttgtaatgtaggtctttaagtcagaaacattccattgtctcgactcaatgttatatgaatgtgccgctgcaccaatgcccaaataagggatggcatgccagtagctgctattgtggcgactttgttttcctggttttgcaaaattgctaatctcgtaatgttcgtaaccagctgctttgagatgatgaaccaatgcttgatacatctgtagcgaaagttcgtcatcgatttcatgaatcttattgctttttaatagttggttgagtggtgtgccttcttcgtacatcaaactataagcggaaatgtgctcaacgcctaagtccagtgcttgtagaatgtctctttcccaagctgccaacgactggttgggaaacccaaacatcaagtcgatgctgatattatccacacctatttctcttaatcggttgacagccgtcgctacatcctctgatcgatgccttctatgaagaaagttcaactgtgcattggagaacgtttgcacccccatactaattcggtttacaggtgattgttcgataaaatcaacgaacgatggtgatatatcatcgggattacattcgagagttacctcgcattggctacgcatggtcgacagattgccattaaaatagatgctgccaattacctcaaaaatctgttgaagttgtgcaggagtgagttgtgaaggcgtacctccacctatatatattgttcgaatcaaatgggtgtcttcggaaaggtgagtctctatatcagaaaggtaatcccgtctcaaccgtaactcttgacagagggtatctacatatttttgccttaaatgaagatttgtggttgagtaaaaaccgcagtagatgcaacgacttgcacaaaaagggatatgaagatataagccagccatgattaaacaaatacatttgcaaaaatactaattttctgataatacttttggaacttattaaaaaaatgcgtaatttaggcgtcaacaacttttgaacatttagtactaacccttttaaatctataaccgatatgagagtatatcagacaaacgaaatcaaaaacattgcattgcttggcagtgcgggtagcggcaagaccacacttgccgagagtatgttgtatggaagcggtattattaagcgccgtggtacggtagaagcaaaaaatactgtaagcgattacttccccgtagagcaggaatatgggtattctgtatttccaacagttttccatgtggaatggaataacaagaaattaaatatcatagactgtcctggagccgatgactttgtgggtggagctattactgctttaaacgttacggatcaggctgttatcttgattaacggtcagtatggtccagaggttggtacgcaaaataactttagatataccgagaagctcaaaaaacctgttatctttttgatcaatcagcttgattctgacaagtgtgactttgacgttgtcatcaattccatgaaggatatttatggttccaagtgtgttcagattcaatatcctgtacaaaccggctcaaacttcaacgagattatcgacgttttgttgatgaagaagtattcttggaaagaagaaggtggtatgccaattattgaggagatacccgaagaagagaaagagaaagcacttgaattgcacaaagctcttgtcgaggcagcagccgaaaatgatgagagtttgatggagaaattctttgatacagaaagcctaacggaagatgaattgcgtgaaggtattcgcaaaggtttggtgacgagaagcattttccccgtattctgtgtttgtgcagggcaggacaaaggagttcgtcgcttgatggaattcttgggaaatgttgttccttttgtgaatgagatgcctaaaatccataatacacgtggtgaagaaattgacccaaattctgacggtcccacttctttgtatttcttcaaaacgggtcttgaaccgcacattggcgaagtatcttatttcaaagtaatgagcggtagtgtgaaatcgggcgatgatctcatcaatgcagatcgtggatcaagggagagaatcggtcaattgtatgcctgtgcaggttccaatcgtattgcggtagaccaactaaatgctggtgatattggttgtacggtgaagctaaaagatgtgaaaacgggaaatacactcaatgagaaggattgcgaatggcgatttgacttcattaaatatcccaattcaaaatacagtagagcagtgaaagctgtcaatgctggcgatacggagaaagtcatggcagctttgttaaagatgcgtcaagaagaccccacttgggtagtggagcaatctaaggaattgcgacagactattgttcgtggtcagggagagttccatttgcgtactttgaagtggcgtcttgagaataatgacaagctaccaattgtcttcatggaaccaaagattccttatcgcgagacgattaccaagcaagcacgagcagaatatcgtcataagaaacagtcgggaggagctggtcagttcggtgaagttcacttgattgttgagccttatgccgagggaatgccagatcctactcactacaagtttaacggtcaagagttcaagatgaacatcaagagcaaagaagaagttgacctaccatggggaggaaagctggtattcatcaattccgttgtcggtggtgccattgacctgcgtttcattccagccatccaaaaaggagttatggactgcatggagcaaggtcctttgacaggaagttatgcccgagacgttcgagttgttgtctatgatggtaagatgcaccccgttgattccaatgaattatcctttactttggcggcacgacatgcctttgctgatgcgttcaaaaatgcaggaccaaagattttggagcctatttatgatttggaagtgtttgttcctggcgactatatgggtgatgtgatgagtgatttgcaaggtcgtcgtgcactcattatgggcatggatagcgaggctggttaccaaaaactggttgctaagatacctctaaaggaactttccaactattcgatagctttgagttcgattacgggcggtcgtgcttcatttacaaccaagttctcaagttacgaacttgtacctaatgatttgcagtcacagcttattgctgaacacgaagcagagaaagtttcggacgaagattaaaaataaaatacaatgtaaaggagatgtgcgaatgtttaatttgtgcatctcttttttttgaataggtagtaagtggttcccaactactatctttttggtgacaaatgcatcgctttaattgcattaaaacaaccatacacgtatttttagttaatatacaataaactactctttttatttaacatgatattgttaatgaattaagagaattgttatctttgtactatatgaaaaagaggacgatttggattatctcagtcatcatgggagtttctttccttgtgctactatttttacagctgaaatattttcaggaaatggcagatatgaagaaagaacagtttgacgagtctgtcaacagagctttgaaccaagcagcgcgtaatcttgaatataacgaaactttccgatatttacagaaagatgtcaatgaaacagagcgccgtgctttcatccaagactctatcggaacgcgttcgggaaagccagacggaacgttgcagcaatcgcatcaattctctgtaacgggaaaagatgggacgatgtattcggcgtttgagctaaaaaccattacggtaaaaccgtctcaaatgcctaaggggatgatattgcaaagcgataagaactccctctcggaagctacaaaatctttgcaggagatagtgaaaaatcgttatgtatatcagcgtgcgctcttagatgaagtagtgtattcgatattgtactctgcctctgaaaagcctttgaaagaaagaatcaattttaagttgctcgatcaggacttaaaatcagagttgatgaacaatgggatcaacataccttatcatttcagggtgaccacccaagatgggagagaggtttatcgatgctctgattattctgatgatggcgaagaatacacctattcacaggtgttgttccgtaatgaccctgcttcaaagacaggcgtggtgcgattgcatttcccggatatgaacagctatatcttttcctctgttcggttcatcatgcccgccattgtgttcactgtgattttgttgataactttcatttttacaattgtgattgtgtttaggcaaaagcgttacaccgaaataaagaacgactttatcaataatatgacacatgaactgaagacgccaatagccagtatctcgttggcagcgcagatgttgaatgacaagagcctgactaaaagcgaggcaatgctgaaccatctcggttctgtgatacaagatgagaccaaacgtcttcggttcttggttgagaaagttctgcaaatgtcaatgttcgatcgcaagaaagccgttttcaagaaaaaacaattggacttgaacgaactgatagagaacatctcgcactccttcgctttgcgtgttgagcatacaggaggaaagatatataccgatataggcgctgtggattctactatctatgtggacgaagtacatttccaaaatgctattttcaacttgatggacaatgcggtgaaatatgggaaacccaaccagccactcaatatcttcttgaagacatggaatgacaaagaatatttgtatttgtccattcgagatacaggcttgggtattaaaaaggaaaatttaaggaaaatatttgaaaagttctatcgcgtgcatacaggtaatgtacatgatgtgaaaggcttcggcttgggattggcgtatgtgaagaagatagtcaatctacatggaggcgacatctctgtagatagcgaatataaaaatgggaccacgtttacgattaagctcccagtgattaaagattaataattattcattaaaacaaataagactatggaagagaaattgaaaatcctattgtgtgaggacgatgagaatttaggaatgcttcttagagagtatttacaagcgaaaggttatattgccaccttgtgtccagatggcgaagagggatataaagagtttttgaaagatagatatgacatttgtgtattggatgtcatgatgcctaaaaaagacggttttactttggcacaggagataagacaagccaatgcggaaatgcccatcatcttccttactgccaaggtattgaaagaagatatactcgaaggtttcaagattggagcagacgattatattaccaaacctttctccatggaggaattagtattgcgcattgaagccatcttgcgtcgtgttcgtggcaaaaagacgaaggaaaaaacggtttatcaaatcggtcgctttgttttcgatacccaaaaacaattgttgaccataggcgataaacaaacgaagttgacgaccaaagaaaatgaattgttatcattactttgctctcatgccaatgaaatattgcaacgcgactttgctttgaaaaccatttggattgatgacaactactttaacgcacgctccatggatgtttatatcacaaagctgcgcaaacacttgaaagatgatgaccaaatagagattatcaacattcatggtaaagggtacaaattgattactcccgaagaggattgataagctcgtttaaggttgttatgtcaacaacttctgcaacaataaacccaaatcggtcattaggatttctctgtgtcgtacggcaaagagaaatcctttaattttttccatatggacaagaatgattgtcgtgtttttagtgatctggccaaatatagaatatgcttgtcttttgttctccccaagtaggctggcgttgatagcaattcgtaccgaattgtcttcagaaatttcttcttgttggaattaatcagcgcatgtctaaacaacgacataaagttatatgccattacaatgaaactcccgcatgcctctgttgcccagaagttatgtgtgacaaaatcatcaatggagaaatcattcttcagttcctttattctgttctcagaatccgcccttccgcgatatgagtcatatacgatcttggctggcaggtcaaggtctgttacgaagcagctgtatcggtatttcccgaaatcttcctcatcctcgaaaagatccatctgcttgatttgctttcccgcagcttttggacgcttctcaatttcttgcctgaccatcacaatgcgtctgggtttcttccaactgtttgcttgatagatggtttcggatatttccaatccgtctatctgctctatccatttgcgttcatgggtaagactgtactttatacggttattgaaacggcaggctatgatatagtgtaaccctttgttttccagatagtcaagtatttcctttgcaaagaagccactatccatgcggaccagtccgacacgtttgccctcaagtattgagagtgtgtcctcaagaaatgacagatagttggtacttgcagatgtgttgccaggacgtagccagtaatttgctatcatcctcacatcggaaacgaatgcaagaagaggatggtgcgacagtcgtccaggacgtttggggttgtaccctttggctgctccctcctggtttccctcacggaccatcacagtcgaatcgaagtccaaggtgtaattgtcgaacttcaactctgagaaaaaccaacggaacaaatttccgaaaacacgctggttgacagcttgggagaatttgttgagatagcgctggtatgcacgatggtctgctccacatttccacccaagcaggtcacataatgcagtgtcataacgtaccacgtcaagatgaccaaagcaacttgcgccacaccacacacctgcaaacaatcccaatattaactggatcgggtcatagccacgattggatccttgaagcggaacaccactttgcataacatgctcttcaaaatggcatttctcaagcattttgaagaacagggaaagaccaccaaaaggtgttatttccttatttacgaactttatgtcacagtcgcgcataggagtatatacttttttcgtggtaaagttagtaaatatttatggatcaagtatatacaatgctgtttttctaatggcggtcattagaaaatgacaagaagctttttctaatgaccgatttgggataaataggcatgggacaaagtttcatgcctattttgcttcttctttcagcctgaagccataagttctgatgttcttggttttgcaatttgtgtccatgtatgattgactaaaccgtgtaaaatagactattttggacaccaaaacagtttgttttacctgtcaaaacagactgttttctttagctgcatcattatagttttataaggctcgcaataatcttttgttcaagcagaatagtattgacgcttttctatgtcgaagactcttatgggacggtaatcgcgtgttattgtgctattggtgacaagagaagtgaacaattaatatttgttttgtttccttgataagtaagtataggcaatgataccaaacaccacaaaaaatagtcctaagaataagacccagttgtagcgagaccaatctgtgatgtacgagagaagaaaaacaactactccagcataaacacaatataagccgaagcttggcgccatttttattttcttaagaaacctcttcatggcagcaaaagtacaaaaaagatttggtagacttacgaaaaagtggtaactttgcaccgcattttgcaaaaataatatttattaataaatgaagtaatatgaatcattacgaaaccgttttcattttgactcccgttttgtctgatgaacagatgaaggaaacggtcgctaaattcaagactctccttactgataatggtgccgagattctgaatgaagaggcttggggacttaagaaactggcttatcaaattcagaaaaagaactcaggcttctactgtttgtttgagttcaaaggtgagccaacattagtagacacactcgaagtcggcttccgccgcgacgagaaagtaatccgttttatgactgttaaattggacaagtatgctgcacagtatgctgagaagagaaaacagaagtatgctaacaagaaggaggcttaattatggcagagaataaatcagaaattcgttatttgactccaccttcagtggataccaagaagaaaaagtattgccgtttcaaaaagagtggcattaagtacattgattataaggatcctgagttcttgaaaaagttcttgaacgaacagggtaaaattcttcctcgtcgtattactggaacttcattaaagtaccagcgacgtgtagcacaggctgtaaaacgtgcccgccagatagcactgcttccttatgtaactgatttgatgaaataattaagaggaggaaacagaatggaaattatattaaaagaagatatcatcggtcttggttacaagaacgatatcgtagatgttaaacgtggttatggtcgtaactacctgataccaaaaggtaaggctgtcattgcttccgaatcggctaagaaagttcttgctgaagatatgaagcagcaagctcataagttggcagctaagaaagcagaggcagagaagaaagctgctgcgttggaaaatgtagcattggaaatttctgtaaaggtatctgcaacaggtgttacttatggttcggttactgctgcgacagttgctgaagaattagagaagaaaggctttgatgtagaccgaaagattatcacgatgcgtgatatcaagaaggtgggagaatatgaagccactatccacttccataaagaagttgaagtaaaagttcctgttaccgtagtagcagaaaatgctcctaaggcagaagtgaagtcagacaatgttgatacagagaaagagactggtaagacagttgacactgtagagacagcagaacttgagcagaaggaatctgttgaagaagctgacgatactaaaaccgcagaataaaaagctgctgaatgagcggtgaagacgcttaattgcagtgaaccaatattagatattgataccaattgcactgtaaagcaaatctataggtgtcccgatgtgtcattaaaccacatcgggatttttatttttcccgactttaactgtgctttactattattccgcattaagcttcttgtgattgataaacgtttgtaggcttggatgtatgccctttgtgggctggtcttatcaaatcattcattagcattacccacgggagataaaaaaaagataatacacaaacagggtatgttcgtgtattgcctttatgtcttgagatccttgtggaaaagactaacgactccaccagtgcctttttcgttttggtggttctgctgcaagtacctgttggttcacagcttctcgtatcaagtcttttactgttttatgatcatgaatcatatgatatatttgtccccaatcgagtaatccaccaacgtttctatcgtcaataaagaggtctgctttcagttttcgcgagaagtgattgttattcttagtaccatcttcctcggggtaatcacgattgacagcccaaaactcaactcctcgttctttgcaccaatcgatagcctcttgtagaagcttgccctctcgtacactccataagattaatcggtggtgatcttttatcaacatcttcagagtttccgttgcaaaaggtagttcttcgccaatctctggatagcgatgttcaacaatagttccatcgaaatctactgcaatagtcatagtgcaaatctttaagcgatatcaaaaattgataaaaataatctttaagttaatcaaaaagccgtattttttttattcgctatcgtttgatggaagtgtcgtttttatctccgtaatggctattggcatagttgccgtagcttccataattgccataattaccataactacgcttgctataatgtccatattttccgtatttgccataccttccatagccataataatagccatacttcttcttggacatatcaataccattgattacaatggacatctgtggaagcttcttctcttttgcaagagtgttaatgagagtgaaactctctttaggggtatagtcagcgcgacacatgtagaccgttgcatcagcgacacgtccaatttggagcgtgtctgtcaccaatccaacaggagcagtatcaattaatatgtaatcatagtgctgtttcagttggtcgatgatgagctgcaaagagggtcgagctatcagttctgcagggtttggaggtacaggacccgataacagtaattcaaggttgttgttaatacctgaaggtaaaatctgactttgtatctctgcccaagtaggctgctctttggtcaatagcatcgtaacaccatgatgatgatcgtctatttcgaacaattctgccaaacgtggcttacgaatatccagacccaccaagatgactttcttacctaataatgcgaagctaactgcaaggttggaggcgttgaaagtttttccttcacccgatgtggtagaagtaaacatgatgactttctcattctctttcatcataaattgcaaattggttcgcatactgcggaatatttcttccatctgattattttggttctcatgaaccacaatgtcggctttggttttagccgattcgctggctactgccacatctgctaaaattggcagcttggttagtttagcgacatcatcgtgaccttctatcttatagcggaagaattgtatcaagaacagaattaaagaaggaatacccaatgctatgagcagcgcaattaggaatatcatcgtacgttttggacttacttgtccgccacttgcaggttcatcaatcaaggtacccttgtctgcggtagctgccaatgagattgagttctcttctcgcttttgtagcaacatgaggtaaagtcctgatttcacatcctgctggcgtcctatttgggtgagcatgcgctcctgttcaggactctgagatacttgtccttggtatttaccatattgcgatgccacgctattgcgttgtatttgtagtcctttctttgcttgattcatagctcgatgaatactgttattcaaatcatccagctgagaagtaagtggtgtaactgtaggtgaggtctctgaagcactccttaaaagtttatttctttgaagagcaatttcattatacttgctaatcaatccgttaacagtagggtctgaaatacctacattggcagggagtgtttcgtattttcctcctggccgccccatactttcctgaacgctgttaagcagtgccacctgtgtatttgcttcggctaacttctggtcgtatgcgttggcattgtccatcgcctgtgcagcattcatttcttggttgaccattctgttgcgtttcttatagctttctaatgcaccttctgtagctccgagctctgcactaatcttctctaacctgctattgatgaaggcttctgtattgcgggctatttcgttcttatctatgttcgcctgtcgattataacaaataactatctgtcgtagataatcttttgctctatagggaatttcatctctcaatgtgagtaatgcaatgctattgcctttgctactttgcgcaacattaaaggatgatctgaatttggcagccatcgctttaggagagacaatacggactttgaagctctcaccgtcttttaacgaacccgcgtttctactattgaatgttaagattcccgctttggtagctaaggttgctggaagtttgttgatggttttgtcaattgtatatgccttctgtgattgctcatctgtcgcattgtaatttcctgtgacatgaaaggaattaccttctcgttgtatatacaaattgatagccgtggatagcttgtcaagatgagcagggtcgatatctacatcaatgggttgattttgatacatcagtatgtctttcactctcccttctgatgtgtaaatggtgtacaacttcaggtctctaacagcttgttctgccagtgataaggaagataaaatttccatctcattttcaatacctgccgagttggtcatcattcctaaagtcgaggtgtttaatgcgctatttctgccacgtctgtaattatcctcttctttaatcagcattttagcatttgcttgatagataggtgttgtgtaccttagatatatggctgcaattcccaagcaaatgatgagggataagacaaaccatttccagttaaaaacaagagttgtataaatggtttcaaaattaaaaaatgaactttcttcttgttcatcaatctttttcacttcttggtttttgatatcttccatttgaataaatgtgattatttcattactattccaaatacttatttattatatagcttcaaactatttcttattttgcgttagctcaagaagatattgtccataagaattcttcttcatcggttgagctatcttaatgagttgttcttttcctatccaaccttttttgaaagcaatctcttctaagcaggctactttcaacccttggcgcttttcaataacttctatgaatgtgctggcttcagacaaactgtcatgggtacccgtatccagccacgcgaagcctcgttgtaatgtctgtacttgtaattgttgtctctcaagatagatttgattaacggtagtaatctctaactctccacgttcgcttggttgaatgtgcttggcaatatcaatcacagaatttggataaaaatagagccctactacagcgtaattgctttttggggcttttggtttttcttcaatacttagacattttccttcctgattgaattctacgacgccatatcgttctgggtcgttgacataataaccaaaaacagttgctttattttctttttctgcatctacaacagccgtgtggaggagggatgaaaaacctgaaccataaaagatgttatctcccaagaccaagcaaacggattcattgccgataaattcttcaccaatgataaatgcttgcgctaagccatcgggacttggttgttccgcataggtaaacttcactcctaagtcttgtccatctcccaacagtcgcttaaaacctggtaaatcaaacggagttgatataatcagaatttcacgaataccagccaacattagtacagatatgggataatatatcatgggtttatcgaagataggtatcaattgtttgctgatacccttcgtaatgggatacaaacgtgtccctgaaccgcctgctaaaataattcctttcatgaatgtaaaatttggttcttttatttacctatacgctaaggataaagtagtgtacaacttcatcaacggcaacattgcataaacttggagttgtgcgacttgactcaatcagggcatgagattccaatcttgcgtgccgttgcgcacatatatggcacaaagatataaataataattgaatagggaaagtgagaaacctgaaattgttgattttgttttgtatttttattgttttgtcgtaactttgtggagcattccgtgagataatctcatgcgaagaaaaatattatgttacattatcatgatgaaatttttatcaaatatctttgacaaaaagggcaaacaagagaaaactggtggcatggaagactacatgacactaattagggtttactttcagtctgcaatggcagcgcaattgggaattaacaatttgaaaatgttacctgacttgcgcacgttcaagacaacattaaaagttccaactgtgaataacaaattaggtgttggcgaaaaagtacattgtaagaaaatgctgaaagatatctacaagacaaacgacaatttctgtaaggaaattgatcagagtattcgtcgaaactgtcgcagaatggaagatgttcagacttatcttttgcaatttcaagggtttacacaggagctgatgatgttgataggaaatctgatgaagtttaagttacgagttccttcaatctttaagagtgctatttataccatgacggagaagactgtcaacgatatcttcactaagaacgattatacagatgctgctgcgatgaaggcggttgtcaccattagaaagtataacaatcgtttggggttctcgcaaaaatgggttactgacttcgtgtaccaattggtgatgttggcaaagaaagagccaaaacccgctgataatgaacagaaataacatttgtttttcagcatcaatgacttttataaattcacttttgcaatgctctgtgctaaagtaaagcgcaaaaaaatgatggataatttgtgattatcaatttattaagttaaatttgtaaccaaattgtaaatctatgaatgcgaatgagaagactttatcgcttttcaccacacgtgtaaggcaaatgattctccaatatcaagaaatgaaaaaggagaatgatggcttgtacgaaatggtggatgagcagaatgcgaagataaaagaactcgaagcacagctggaacaagcaaaacagaattacaatagtctcaagatggcaaggatgattcaagtatctaatgcggatatggatgtcgcgaagaagaaattatctaagctcatcagggatgtcaataaatgtatcacactactgagtggaaaatagtcggagtgatggcaggagacaatagagataagctacaaataagattacatgtttacgatacagacatgagcgtaactgttctgagggatgatgaagaatattatcgccaggcagcaaaactcatcacggacactgtaaatacgtactcctctctttttaagaccaaaaggagtgagaaagaaatactctatatggcactgatcgatattgcgttaagatacgagaaagagtctggacgcaatgacgtgaagccttttcatgaaatgatggcacagttaacgaccgagattgaagaggcattcaagaagcaaattccttgattgaatcgatgaattgctggacgaataactgagagagcagcctatttgtcttttacctttttggagtagagcctgcattgattgtatggaaatcaatctgctaccaatctgatttttcatttccacggtaaagtttagaaatgaaattaaatttatattatataatatgggtacaattatcacaatgataatagctattgcagtcattggcgcaataggctatgcagtttatcaatacattgttaaaaagaaatacaatgagataatagcggctgcaaataaagaagcagaagttctcaaagaaaagaaactgctggaggttaaagaaaagttcttgaataagaagtccgaacttgaaaaagaagttcaaagtcgtaatcagaaaattcaacagagtgagaataaacttaaacagaaagaacttggcttaaatcaacgacaagaagaattggctcgtcgcaaacaagaagttgatagacaacaacagcgtatagacaacgaaaagaaattgttagaaatcaaacaagccgaccttgataagcttcagttacaagaacgtgagaaactcgaagagctgtctggtcttactgctgaagaagcaaagcgaagattagtggaaagcttaaaggatgaggcgaaaacagatgctgccagttatattaatgagataatggatgaagcgaaactgaatgccaatcaggaagctaaaaaaatagttatccagacaattcaacgcgttgccactgaaacagctatcgaaaactctgtcagtgttttccacattgataatgatgaggtgaaaggtcgtattattggaagagaaggacgaaacattcgtgctttagaagctgctacaggggttgagattgttgtagatgatacacctgaggctattgtcatttccgcattcgatcctgtacgacgtgagatttgtcgtttggcacttcatcaattggtagcggatggacgtatacatccagctcgaatcgaagaagtggtggcaaaggtgaagaaacaacttgataatgaaattatcgaaacaggaaagcggacagtaatagacttgggtatccatggacttcatcccgaattggtgcgaattgttggaaaaatgaagtatcgttcaagctatggacagaatttattacagcatgcacgtgagacagcaaacctttgtgcggtcatggcagctgaattgggcttgaatcctaaaaaggctaaacgcgcgggacttttgcacgatataggaaaagtacctgacgaagagagtgagttgccacatgctctttatggaggcaagattgcagagaagtttaaggaaaaaccagagatagtcaatgctattgcagctcatcatgatgaagtagagatgcaaacgttgttggcacccattgttcaagtttgtgatgccatatctggagctcgtcctggtgcacgtcgagaaattgtagaggcttatatcaaacgcttgaacgatcttgaagcaattgcgatgagttacccaggagtaactaaaacttatgctattcaggctggtagagagcttcgtgtcattgtaggggcagacaagatggatgatgcggagaccttaaagttgtcggatgagattgctacaaagattcaaaatgaaatgacgtatccaggacaagttaagattactgttatccgcgagacaaggagtgtagcatacgccaaataaccgcatttgtggtaatcatctataaaataaatcgaccgtatttgtaacttaaaatacggtcgatttattttatagatttatttcagaaatcacaaagagtatggaggaagctctttatacctcttgattagctgatgatatgaatgtcttaaaattcactggtaaagtgaaatttaatatgttcgaaatcttgctgcgccattgataaaacatattgggagtcggcaaggaagacatctcttccctcacggtcttttgccatatattggtatttccgtctcttgaagttttccagttcttcttcattgtccgattctatccagcacgctttatacaaatgaacaggttcccatctgcatttcgcattatattcattctctaatcggtattggatgacttcaaattgaagttgtcccacggtgccgataactttacgttggttaaactggttgatgaatagttgggcaacaccttcgtccatgagttgttcaatacccttgttgagttgtttagatttcatagggtcatcattttcaatgtatttgaacatttctggtgaaaacgaaggtagtcccttaaaatgaatcatttcaccttcagtgagtgtatctccaattttgaagatgttattatctggcaatcccacgatgtcaccgggataagcttcttcaatggtactcttacgttgcgccatgaattgagtaggtgaactaaacctgactgttttcccattgcgtacatgaagatagggctggttacgaacaaactttccagaacatactttgcagaaagcgatgcaggagcgatggttagggtctatgttggcagtaatcttaaagataaatccagtaaacttctgctcctctggatgtaccaatctctcttcagctaaagtggggcgaggacttggtgcaatttctacaaagcagttcaacaactcttgaacgccaaaattgtttagtgcagacccaaagaagacgggtgccacttctgccgcacggtaggattcttggtcaaaagctggataaacgccattcaccagttcaaggtcttcacgtaaacgttgggcttctctttctccaacttttttctctaactcttcactctcaacgtcaacctcaaccttctcggtgacacgttgtttgttcggggtgaataaatttaattgttgttcatagatgttgtaaacccctttgaaacgaacaccttgaccgataggccaactcaaagggcgcactttaatttgtaactcttgttccagttcgtcaagtacatcaaaagggtcacgaccttcacggtccattttgttaataaagataatcactggcgtttggcgcatcctacaaacttccatcagcttgcgtgtttgggcttccactccttttgcagagtcgaccacaatgatggcagaatctacagctgtaagcgtacggtatgtgtcttctgcaaagtcttggtgtccaggagtgtccaaaatgttaatcttatagccttggtagtcgaactccataactgacgtagatactgatattccacgttgcttttcaatgtccatccagtcactggtagctgtcttcttgattttatgacttttaacggctccagcaacttgtatttgacctccaaagagcaggaacttttcggtgagtgttgttttacctgcgtctggatgtgaaatgatggcaaaggttcgacgacgttgtatttcattcatgttgtattccgttgatgtgtttgtttttattgttaattgagaaagaatgaattgcgaggtggtaggttgtagaatccaccttgatatgatttagctttcctctatcatctttgctaaactctcttcccaatagggtatttcaatatcgtaagtcgtttttattttcgttttgtccaatacactgtagtgtggacgtttagctgctgttggatagtcagctgtatgtaatggatgaacgtgacaagtggtaatgcctgccaaccgatgaatggcttttgtgaaatcataccaactaatgacaccttcgttggaatagtggtaagtaccaggaacaatgcccttcttgatgattgtcatgatagcttgagccaaatctcctgcataggtcggtgttccaatttgatcgaagatgacgcccaactctgatttttccttgcctaacttaatcatggttttgacaaagttatgcccatgaacggagtagagccatgctgttcgaatgatgacatgcttaggacaaatctgcctaacagctacttcgcctgctaattttgttgcgccatacacactgttggggcatggggtatcggtttctgtatagggagtatgttgcgttccgtcaaatacataatctgtactgatttgtattatccacccttttcttttggctatggctgctgccaaataagcgggagcttcagcatttagtgcagtagctaattgtttattgtcctctgctttgtcgacagcggtatatgctgcacagttcacgattccgtctatttcgtgagcagtcacaaactcttcaatggctttttggtcagtgatatccaactcctctacgtctgtattccaccattggtgttctttcatttgtttttcaagccgttgcatctcgcgtcccaattgtccgttgcaacctgtgataagtatattcataaattactcctcctcaaattgaattccttggttcttgtctttgatataatagtcggacagcatcccgatgaaggtggttatttcttcaatggcgtgggctgtttctggtgttatctctttgtgttgtaaacgtagaagcatgacaccgtatagcgcatttaggcacactaatatttcatgctggtcctttgctcctttttgtcgtaattcgacaatgaacggcagtaccttataatattctgagttgtaaaaaggaaagttcgtgctttgaagcaactgactgtgtaactcaatcagatcttgtagaatgatttcgttaatttggagatgacctttttctcgtttcccctcttcgttcatcatcctaatcaaattaccataccaatcagtcatttcatctttctgttcgtcagaatagttaaattgagagatatactctctacggattcgagccaatgaacagtcgtaggctctgatgagatcctctatttgccacatatacaaaagatattcggcaatgttctttttgcgtaattgttgagatatatacacgttgtatgaaattttttagtattccaattcgtcgaccctgtctttcgtagaatgtacactcctttagcaggaatgtcttgaatcgcaagtgttgctaataatgtaccgtatacaaattgaaaacagtaccgatgagaatcaccaatgaacacaggataacaatggttccaatgattttattgatgatgatgatgccgttcgtatcgaacttccctcgtattttatctattagccaagtcagcccataccaccataatatggcaccaccaaagattccaagatacccgcaacacatctcaaaagggtggttaggaatcacgaagttaaattgagcgaacatggcgatgagcaataaaatgatgagtggattcagaaatgtaagccaaaatgccgtaatgccattgtaggtatatgtgccttttttcgtgccactaacgtgcatgtggttcgttgggttatttctaaaactataaatcccaaatagcagtaataagagacttcctgatatctgtaagataaacatattcttcggattggtaatcaagtctaagacgaaactcattccaagccccgttaacagtgcatagataatatcggaacaagccgcccctacacctgtaacaaatccgtaccatcgtcctttattcagggtgcgttggatgcacagaactcccacgggtcccattagtccagaggcaatcactccaatgattactcctttccaaacttggtcaatgatatcaatatgaaattcaaacggcatacggtatgcaaaattgcaaaaattatgcgatatggacaaatttatagattaaaactttggttgaagttatatttttaataactttgcgtaatcgatttgttcaattcatgaagcgttgatgcgtatttagtaaattatttctatttgaatgttatcaaactggagatttttaaggagtattattgacgcttctgcttgtggacgaaagaatccattaatacgttaacttctaaattaaaacaacccgttggcggaattaaaataatagataaatttatatgaaagaaaagttgtacatacaagaatttatttgtaacttagtgttgctcaatacattaagttataaaatcagtatgcacaacttatatacaaatttcgtaaaaatccttgatatatgcaagctattctcaaaagatttagtaaatgagcaaggtaatat

SEQ ID NO: 115 - DNA, 332556 bp, Prevotella timonensis
  source 1..332556: mol_type = genomic DNA
tattttctcatctcttggtagtcaagccttcctttattctgttgtttccatttttctgcataaggtaacaatttatcaaaatacattccgaaagcctctacttcgtatttattattagccatgccttctaatgccgctctcaatcttgttggtacgtcaacgaaatctggcaaataggttgcttgatcccaagagaagttgttgttatacgtcacagttgtgcgttctgcggggtgtgctcccttggtttgaatcaagataacaccgaaagccgcacgtgtcccgtagatagaagtggatgcagcatctttcaacacagaaatgctctcaatgtcctgtgtgttcaggaatgagatgtcatccataggcacgccatctacgactatcagcggattgctcactgccttgttactcaaggtacctacacctcttatacgcatagatgcttgttcgttaataccaccactcgatgaggtaatagtaagtcctggcactgctccttgcagggctttcgtcacgtcttgctgaggacgacctgccatggttttgctcaaatcaaccgtcgagactgctcccgtcaggttggctttcttctgcgtaccataacccacaaccactacctcagagagctgtccagcatcttcttcaagtttcacctgcatgtctcgttgcgcacgaagcgtaactgacttatagcccacataagaaattctgagttctgtacctgctccaactgagagtgaaaaacgaccattcaaatcggtgatagcacccgtagttttaccaatcacagaaacagtagctcctacaataggttcgccttttgtatccgttacgacacctttgacaacttgttgttgcatcgtcacatttgacaaggatgtaacactggttgtcgccatgaccgtctgggacgcaaaagcactacctgcgactgcgagaatcgcacatagacaattttttgttttcatagacccatatatttaagttaattgaattgacgatatttttcaatcgatgacacgactcccaaagggtgtgtttataaaggttttatatgttgttcctacgtcacatcgattagacagatgcaggctttattgactttaaggttcttattaaaatatattcgcgttaggtatcacaaagatgacttcgacagcaaatatagtaatatattgttaaataagcaagctttctttgagttaattaatgttttcaaattaaaaataatacttcattgcatcctataacgttgtttttagtcttgcttttgactaaaaccatgcaaaaatacagccccatatcactggtttttatacattcatagcatagcgatgtgactcgtggaaatgcaccattttcgttgaagtaaatagcaaattttgtcctaaaaaatgacaataaaaaggctattataaattcgtgaaatagaaaaaaataatgggtaaatcaggtgtcttcagacatcaaatgaggcagaaatttgacttttcgggattgaagcatggagataacacggttgttcacatgagttaagcctgctataaacaacagataagacgattaacccatgataataaggcacgaaataggctgttttttggtcttaaaaagcgaataataagtctgcttttcgacacatattcttataacgcacagtgcatcaaagacatagcaaactttctcataacttcgatatttgagaccagttgtgcacttcctgatttacacgcgagttataatgcactcattgtaaagaaaaatgacacattcaaccctccatggagtgtacttggatagcacataaaagcaatgcgtatcgaactcatttcacacagatgtacgcaaagcatggtttcgctattcgtctaccagatgagtggcatgataagccactaagccttgagcaacatccatactcacctttgctggctcaaaatcataattgcgacaaatcgatcgaagtaaaaccgaaaatgccatggctgtcttccctgtaaagtacacaggatattgttgataatcgtactgaaacagattgcggtgcaaaaaacacttgaaactatcggtcaccaaatcacttacataacctgtgtgttgataatccaccaagaaacttgtcactgacgacaaataataatgcggcaaaggtttgtcgtacacagcactcatcacctctgctgcagaagtgtgatacttgaaataaaaagcgtcaatgagttcgggcggcgccaactctttaagcacatccgacaggaaagcacgaccgataaccgatgcactgccctcatctcccaaaatataaccaccggggcgcacatttttagtaatacgagtgccgtcataaaaacatgagttggagcctgttcccaagatacacacaacacctgcggagtccatgcacaatccacgagcggcaccaaacaaatcgctctctactattgcaggcgttttgaattgcgccaccaatgactgactcacctgcttcttgcgagcttcatcgctacaaccagctccataaaagtagatatgtcctaactttcgcttgaagtaggcttcacccaaacccaaccgaatgctcctactcatctcacgtcgtgtttggaaatagggattcaaaccctctgtttcttgtaaatctatcaattgatgttgttccacaaaagcccattctgtcttgtcagaaccgctcacagctatcagattcattgtatatcgtactcttttttatatgattggaagacaaagttacaaagattttttgtaaattgcggtaaattatcttcgtgagtgcgctaataaagaaatgaagacgaaaaacagagatatagaaacattaaatcatgtgaatattcgcaaatattattgattttatatttctaattctaaaaaataatctatctttgtttggcaacaattcagtagaaaagtacccatagctgtttgtttcggtaattccttaaaaggaggcgaaaatacaacatgggaacctttgcacacgaatgttggctactatccttgaaacatgaactatctaacacgatgacccatgagaacatttggctattttttatcctcgcttagctgtctattgtttggtttacaaacatttgctgacaatcctcccacaacctttgcgccaacttgccaaacgccgttagtgcaagaactgacatcacctaaccgtcctaaatatggactatcaaaccgccatattgcgatgtggcaaagtcatggacgatactacgaagccaaattagaccgctgggagtggcagagatgccgcttgttgcaaaccgttgaagacctatatacgcaaagttatgtactacctttcttggttcccatgctcgaacaagcaggagccaatgtgctgattccgcgcgaaagggattggagctgctttgaagccattgtggacaatgacggcaacagctttcaaccaaaggctaaatataacgaatacaacggaaaagaaagttggaaaaatggcacaggaaaaggtttcgcctacctccgaaagacctacaccaactttgaaaatccatttaccgaaggtacttatcgtatggtgacctctatcaagaacggacaagagagcaaagccgaatggattccacaaatcgaccaaacaggcgaatatgctgtttatgtagcctatcataccgtgccaggaagcaccaatgcagcccgctataccgtttatcatcgaggaggaatcagtgagtttaaggtgaatcaacaaatgggtggagggacttggatttatcttgggaagtttgtatttgacaagaatttaggcaaaagtcagcgcatcgtcctcagtaacaagacaggaaaagcaggcgaagtagtgacagccgacgctattaaaataggtggaggaatggggaatatcggcagaccagaaataagcacctaccctcgtttcaccgaagcagcacgctactggatgcaatgggcaggtgttccagacagtatatatagccccacagctggaaaagatgattacaaagacgattatcaagcacgtggcgaatgggtgaactggttggcaggagggtccgaaagctatcccgaaggcaagggtttgaacattcccattgagatgtctttagcgttccatactgatgcaggcgttaccaaaaacgacagcacgattggtacgttgggcatatacttcacacattcgtatgacagtgtgtttgccaatggcgcctcacgacagctttgtaaggagtatgccgaaaccattcacaacagtattttacgagacatacgagcacaatttgaacctacatggagaagcagaggcaacaaagacgcttcttactttgaagcccgcacgccacgagtgccagccatgttgttggaactgttatcgcatcagaactttgcagatatgcgttatgggcacgatcctcgtttccgatttgcggtaagtcgcgctatctacaaagccatgctgcgcttttcgtgcaaacaacatcaacaaaaatacatggtgacaccgctaccagtgagtcacatggcagcccatttgacagataaggggcaggtggaacttacttggaaagctgttgaagacacgcttgaacccacggcaaaacccgaccgctacattgtatatactcgctacggaaatggagaatttgaccatggaaaggtggtaaagcaatgtaaatatgtggcagacgtaccttcaggtatggtgtgcagctacaaagttgtggcaatgaacgagggcggtgtgagcttcccatcgcaaattgtagccgtaggacgcagtgcaaagtctcatcacaaaaaggctttaatcgtcaacggattcgaccgtatatcggctcctgccgactttgaagcgcctactccgttggacaccttgtatgctggattcttggatagtgaagaccatggtgtgccatatatggtagatatcagttatgtaggcagccaaaaagagtttaataggtcgctcccatggctcgatgatgattcgggtggctttggcgacagtcatggaaatgaagagacaacggtcattgcgggcaacacgttcgattatattgccctacatggagatgctattttgaaggctggatattcgttcgaatcatgtagcagagagcgctttaacacgtttgccagcgacatttcttttgtcgacttgattttaggaaaacaacgacaaaccaagttgggaagtggaaaaatataccccttgtgcttcaaaacctttactcccgaggtacaacaactgctcactgcttacgctcaacagggtacatccatattcgtgtcgggcgcatacgtggcaagcgacttatggaacaacaagttagctaagcctcaagaggcagatttggcttttgccaaaaacatactgaagtatcaatggcggaacagtaaggcagccattacaggacggttgtcaactgtaagatcgccattgaacctcactaaaacagaatatacctatgcacacactttgaacccaaacacttatatagtggaggcacccgatgccattgagcctgcttgcgatagcgcttacaccgtgatgcgctatcccgaaaacaacctaagtgccgcagtggcatatcgtggcgcgtacaagacgttcgtcatgggcataccgtttgaaagtatcatggacagcgtcaagcgcaaaaaactaatggcggaaattatccgcttctttgaataaataacattgtttgttgaaaatcgagcgtctatgaagattcatctttggctttgcagcctacttgcacttctgctgagtgttgacattcaagcacagattggcagttttcgttttgcccaactcaccgacatccatctgaacgaaacaaatcccaagccaactgaagacttgctctgctcgatagcacagataaatgcaacggacagtcttgactttgttcttgtcactggcgacctcacagaagagggcgacaacgccactttgctgaaagtaaagcagtgcttagacctgttacgctatccctattacacggtcatgggcaatcacgaaaccaaatggagtgaatcagggtgtaccatgttcagcaagatttttggtggcgaacggttttctttctaccacaaaggcattcagttcttaggatttaacacaggtccattcatgcgtatggcactcggtcatgtgaaacctcaagacatatcatggattcaatcgactatcaaggacaaaaaacaaccggtgatattggtcacccactaccccattttagaaggcgatgtggataactggtatgaggtgaccgatgctgtgaaaccctataacatacgccttttcattggtggtcattatcacagaaacaaacaattcacgtatgacggcatccctggtgtactgatacggacaaatctgcgcaatgcagacggtctgcctggttatggcatttatgaagtaactcccgactctattcgggtttatcaacaacgcataggtgaaaagaaacaaaggctttatgcactgtcactaacagacaagccctttgaccatcaacaaaaggcgaataaatatccagatttttcagtcaataaaacgtataaaaacgtcaaaaggaaatggtgcgtacaaactggaacagccatttacaattctcctgccgttgaagatgaccgactgtttgttggagacgatgcaggtgagctcactgcctaccagttgaagaatggcaagaaactatggactttcaaagccagaaatcgcattgtaggcacacctgcagcgcgaaaaggaatcgtcgtttttggctctgctgaccatcatatctatggtattgatacacagaacggcaaactgaaatggcaagtaaaagcccaagcgccagtattaggagccgttactattgatgatgacatcgcttatatcggaagcagtgaccatgtgtttcgtgctatcaacatcaacaacggtgaagtgttgtggacttataataaggtaagaggatatgtagaaacgaaacctttggtaaccaatcaagacgttatctttggtgcatgggacaatacgctttactcgttagacaaacgtaacggtcatgagaactggcgatggacgggcaacctcactcgaatgcacttctcgccagcagccgtttggcccgttgccatcaaggatcgaatctttattgttgatccagaacgggcactaacggctatcaacagcaagacaggagaaacgctatggcgaacctaccagtcgaaagttagagaaacaattggcatttctgcagacgaattacgtatctatgccaagactatgcaagacagtgtggtttgctacagtgccaccgctacccaaccacaacagctttggagcaccaatttgggctttggttatgagcatgcaacatccatgatggcagaacaaaggggcatcgtatttggcagtacaaaagaaggtttggtgttcgctttggatgccaaaacaggagatttgaaatggaaacacaaaattggcaactcactcatcaacaccgttgtgcctgttggacgcaaccaactgttagtcactgccgccagtggagagttgtgcctcttaaaatatcaatagcatttaacaacaaaaacatttataagttatgaaacaaatagattgctttttaccatacattgatgaaagtcagtacaagaaactgcaaaaggcatttgaagaagtcagcgcattcgtgacacttcacgcattgaaagacagcctttatcaaaccacaaccattcaacaaattgcaaaggaaacgaagggtgaatactgcttgctcatcacaaagtccacaccgttaaaactgcattacttggctttagaacgcttacagcaaatagctgaagacaccaaagcaggacttgtttatgccgaccattatcaattaaaggacgacaagtgtgttaatgcgcctgtgatagactaccaacaaggctctttgcgtgatgatttcgattttggatcggtcttacttttcaattcaaaagcattgaaagaaagttgtcaacgaatgaaaaattcttatcaacacgcagctttatatgaccttaggctaaaattgagtcaacattatgacttggttcacgctaacgaatacttgtacacagaaatagaagaggacaacagaaaaagtggtgaaaagcaattcgactacgtagacccacgcaaccaagaccgacaaaaggaaatggaaagtgcctgcactgagcatctcaaggagattggaggatacctcacaccatctttcaagacagtagactttgttcatgatgcgttcgaattcgaagcttcagtcatcattcctgtaaagaatagagagactactatcgaagctgccatacgttctgtgctggcacaaaaagccaattttaagtacaacatccttgtaatagacaaccattctacggatggcactaccgaaaagatagaccagtataagaacgatgaacgtgtggtacacgttgttccagaacgtaacgatttgggaataggcggctgttggaatctcggaatacaccacccaaagtgtggaaagtttgccgttcaacttgatagtgacgacctttatcaagacgagaacaccttgcaaataattgtcaatgcattctacgaacaacaatgtgcaatggtgattggctcttatcgcatgaccgatttcgatctgaacacgctccctcccggcgtgattgaccacagagagtggacaccagaaaatggaagaaacaacgctttgcgtatcaatggactcggtgctccacgtgctttctacacccctattgcacgacaaattggattccccaacacgagttatggcgaagactatgccatgggactgaacatttcacgccattatcagataggacgtatctacgatgtgctatatctgtgtcgtcgttggggtggcaactctgatgccgcgctcagcatagaacgtgtgaatgcgaacaatctctataaagatcgaatccgcacatgggagttacaagcccgtatcaaccttcacaaagaataagcgatcatgagacaattaaccaaaaacatcagtccttgggcatggatacccacgctctattttgccgaaggcatcccctattttatcgttaacaacatatcggttatcatgttcaccaagatgggtgtgcccaatggcgacatggcaatgtttaccagtttgttgtatctgccgtgggtcatcaaacccctgtggagtccgtttgtagacattctgcgcaccaaacgttggtggattgtgatcatgcaagccctcatgagtttggctttcgttttgctgacgtttacccttccacatccttcacccgacatcatcggctcgggcaacacacctgtgagcatgtttacgcttacgttagtgctgtttatcatcacagcttttgcatctgcaacccacgacatcgctgctgacggattctacatgttggcactcaacccttcgcagcaatcgttcttcgtcggcatcaggagtacattctatcgctttgcctctatcttcggacaaggcgttttggtgttcgtggcaggatatttagagttgcacacaggcaacattccgttgtcgtggatgattactctgggcattacaggcgtcttgttcaccatcattaccatttatcacaccttctttatcccttatccccaacaggacaaaggaaaagtaggtgccacaggtgtccatgctaaagacatcgtttcagagttcggacgcaccttctcaacctatttcaagaagcccggactgtggatagccattgccttcatgttgctgtatcgcttacccgaagcattcttactcaagatggctgtgccctttttagtagataacagtgctgacggaggattggctatgagcacccaagaggtggggttggtctatggaaccattggtgtcattgcactaaccattggtggcatcatcggtggtattgcagcttccaactggggactcaagaagtcattgtggccaatggctacctgcatgacgctcccctgctttacctttgtgtaccttagtatgttccttcctcacaacatcattatcatcagtgcttgcgtggcagtcgaacagtttggctatggatttggtttcactgcttacatgctgtatatgatgtatttctctgaaggcgaatttaagactgcccactatgccatttgcaccgcattcatggcattgagcatgatgattccaggcatgtttgccggttatctgcaagagtggttaggctacgagcatttcttctggttagtcattgcctgttgtgcagccacggtcatggttacattactgattaaagttgacccagaatacggtagaaagcagactcataaaaatgaagcataagatgaaaaaactactgctatgcgcactgttgggcatcatgtccctatccacaacagccaaagcccccaaggttttgactggtatcgacatgttagaacgccagaatttcaaaccattgcaaggcaagcgcattgggctcatcaccaatcccacaggggttaatcgttatctgaaatcgacgattgacatcttacacgatgcccccaacgtacaactggtggcactctacggtcctgaacatggcgtacgaggcgatatctatgcaggagcaaaagtgcaagaccaaaaagacgaaaagacaggtttacccattttctctctttatggtaaaactcgcaaagccaccaaagagatgcttcgtggcatcgatgcgttggtgtacgacattcaagacattggctcacgctcgttcacctttatcagcactatgggtttggcgatggaagcggctgccgaaaatggcatcgaattcattgtactggatcgccccaaccctcttggtggactgcacgtcgaaggtaatgtggtggaagatgattgtgtatcgtttgtcagtcagtttcgtattccatatatttacggactcacttgtggtgagttagccaaaatgctcaatggtgagcgaatgctcgccaacggtgttcagtgcaagctaaccgtcatcaaaatgaaaggttggaaacgcaagatgacctttgcagacacgggattgccgtggatagcgtcttctccacacattccacaagccctcaccgcatggtattatcctaccactggcattgttggagagttgggatacctgtccattggggttgggtacactcttccattccagttgtttgctgcttcttggattgatgccgaagagttagcaaatgccatgaatgcgcagcaaatgccaggcgttacattccgccccattcacttacgacccttttacagcaccggaaaaggcgaacaattacaaggcatacagattcatatcaccaactataaaacggttcaactcacccctatccagtttgtgctgatgcaggaaatagcacgtttgtatcccgaacattcggtgatggaacatgccaaccagcaacgattctctatgttcgacaaggtgtgtggctccaaacaaatacgccaacgcttcatgcttcgtaaccaatggagcgacattgaatcgtattggaacaaggacgtgaagccctttaagatactgtcaaagaaatattacctttaccgataaacagcttgtagcaatgacacacgactcgagtaagcagaaccagcgcatcttggcgattgacatcttgcgaggaattactattgctgggatgattcttgtgaacaatccgggcagttgggcgcacatgtttgcccctttggaacatgcagaatggaacggcatgacgcctaccgatttagtttttccgttctttatgttcgtcatgggaatgtgcatcttcatctctatgcaaaagtttgattttgcctgtaaccgtacaacggtttacaaaatcattaaacgtgcgctccttctctacctcattggcattgccattgggtggttttcacgcttctgctatcgttgggcttaccccttagaaaacgccacctttggcgaacaactatggtactgcgtgtggtcgttcgacaaggctcgtctcactggtgtactggcacgattggcagtttgttatggcatcacagcgctgttgggtgtcagtgttcgacataagtacttgccacacatcgcagtaaccatattgataggttacaccctgctattgtttttcggcaatggctttgcctataacgagacgaacatcctcgctatcgtggacaaagccgtgctatccgatgcacacatgtatcacgataatggcatcgaccccgaaggacttctcagcacactgcctgccattgcccacacactcatcggctttttggtggggcgaatgctgtttcggaaagaccaacaaccactgtcttccaatcctcaatcacagattctcttgtcgaaagtcgtgccactttttgtcataggtgctatcctcacttttagtggcttgctcctttcttatggttgtcccttgaacaaaaagatttggtctcccacctatgtgcttgcttcttgtggtttggcgtctaccttacttgccctgctcatctggataatcgatatcaagggtcatcgcaactggtgtaccttctttgccgttttcggtatgaatccactgttcttatttgtgatgagcggtgtgattgccattgtgtttgggtctttccaatttccttttggagcagagccgacctccatttcaggatttctctaccgagatttgtacgctcctctgtttggtgcaaacttaggttcgttagcacatgctctgaccatcctcgccttgttatggctcattggctatcctctctataagaaacgtatttacattaaattataaatcatcatcaatcctatgaatctttccacactacttattgcagatagtggctctaccaagaccgattggcgtatcattcaaaatgggaaagagacgcatgccattgccacaaagggcatgaatccgttctttcaaacaccttcggaaatggaaacagagctgcgctcatccttgcttccacatcttccagtcccattatttgatgccatttacttctacggagcagggtgtacacccgaaaaatcacaagtcgtggcgcaaacattgcagcagtgcatcaaggtaaaagactgcatcgaggtacattcagacttattggcagctgctcgtggactatgtggacaccagcctggcattgcctgtattcttggaactggctctaactcgtgcttcttcgacggcacagctattacggcgaatgtgcctgctttgggttttatcttgggcgatgaaggcagtggtgccaatcttggaaagcgattggtgggcgacttacttaaaaatcaattggacgatgaactcaaaaacaagttcttctgtcagttcaacaccagcatggcagaggtcattgacaaagtctatcgccagccttttcccagtagatatttggcaagtctcaatgtctttttggagcaaaaccgcacacacgaaggcatccatcggctgcttgtccgggcttttcaagatttcatagaacgcaatgtgatgcaatattcctacgagaaatatgccatgaattgcattggtacgatagctgtggtctatcaacccgaacttgccgaagcggctgacaagtgcggtgtgaagctcggcaagatttgcaaaagtcccacagaaggacttattcaatatcacacagaaacgcattaaacaatagaaatatgagctttcagaaaattacggaagagacatcgctttacaatgacttggagaacaagtcggtcacagagatactcaacgacattaacaccgaagaccagaaagtggcaatagcggtacaaaaaaccataccacaagttgccaagctggtagaacaaattgttccgcgcatgaaacgaggtgggcgcatcttttatatgggtgcaggtaccagtggcaggttaggtgtcttagatgcttccgagctacccccaacgttcggtgtacccaagacattagtcattggactcattgctggaggcgacaccgctttgcgcaatgcagtggaaaatgcagaagacaacgatgaacatgggtggaacgagctggcagagcacaacattaacagcaacgatacggtcataggcattgccgcatcgggcacgactccctacgttgtgggcgccttgcgcgatgcacgtgagcatggcattctcacggcatgtatcaccagcaatcctgaatcgccaatggcaaccgagtcggatatcgccatagaaatgattgtaggacctgaatacgttacaggaagttcacgcatgaaatcgggtacaggacagaagatgattctgaacatgataagcacagcagtgatgattaagttaggacgtgtaaaaggaaacaagatggtgaacatgcaactcaccaaccaaaaactcattgaccgtggtactcgtatgcttgtcgacctattaggtttggactatggcaaagccaaaaacctgctgattcttcacggttcggtagaaaaagcattggaagaagcccagaagcggcaccagtaatcatccttcaacttactatttgcatatatgaaaaaaacatttttattactctgtattgccctcgtggcaacagtcacacaggcacacgccatggatagagccgcatgccacgcacagaagaagtgcactgcccaaacacaaaccgtcaccgacagcatattgaacgtatctcacaaatatcatgagcattattacgaaaggctgcaactctttgaccatcagccaagcatacaatgcacagacattgtgatgttgggcaacagtcttaccgaaggaggtggcgattggagccaaagattaggcaaaaacaatattgtgaaccgtggcattagcggtgatatagccatgggtatctacgacagattatatcaaatcttgccttaccaccctgcaaaaatattcttgttggtaggagtcaacgatgtgagtcacgacctcagcaccgatagcattgtacacatgatacaaacagtcatcaccgccattcgcactcagtcgccccaaacacaactctatgtgcaaagcatgctacctataagagaagcaacgggcagatggaaacggctcactggaaagactccgcaaatacccgaaatcaatgcaaagatagaagtatggactgccgaacacggcattccgtacatcaatctgttcccctacttcaccgaaaccgataccgctatcatgcgcgcagaactcacttacgacggtttgcacctcacagaagcggggtatgcgatatggacacaactgttgaaaaagtttctataaggtgtaaaaatggaatacgaatgcgcccaatgcagactcgttaagcaagcgtagaattcctctttttgtcctaatttttgacatttccgagactcccccaaatccttcaatttattaaagcattacattaaggcggttatctacatgggttaaccgccttatttgcatgagttagtcgccttatctccatgggttaagaatgctgaagcatgggaggaagaaaaacagggcatttacccatgctcgctatgttatataactctttatctatctgcttgttataaagttgaaatataaaaatgttgagcagtataaaatttgcaaaaaatgaggctgtcatttcagttttcctctcattttcgcccaaaaatcaatcgctattttgtaaaaataattcacatttaattcgatagcaaccaacctgattttatcttattctaacgacactccccacttcttttccaatgcctgtattcgttcgtgtgtttgacgaacaaaatcttgatatgcaatgctattggcatcgaaaggtcgatgcgccaaggcagccttcacgggtcgccaatcttctataaacttcttagcctcatcgctcaaataggtctcagagaaacgttcccaaatataagaaacagcctgataggacgggtgcaacatatcttcttgataaaaacgatagtcgcgcagctcatcattgacaatctcgtaagcaggaaagtaggttaccgtatctggataacgctgagtgagttggttggcagccaacaacaacgtagccttagatagttgactgccatggtagccatatttggcataacgaataggactcaccgtaaggatgatacgcacggcaggattgcgtttctgcaagcattctatggctttggataaataatcggcacaggcatctacacttaactcctcctcacggaacaagcgctgcggacgcttttggcagttatcgacaatctcgcccgtttctttgaagacatatacgtgattagtacccaaagtaaacaccgccacctgagggttgaccttggcacgctctaccgtatgcaggatgctggcaggattgtacatcacaccatagggattgactatggcattgaatttttcttctataaaacgcttgcctatattatcggcaaagcacgaaccaaccaagaagatgtgctcgaatggagcaatggtaaaggtgggaggttctatctggacaatcgttctaaattgcatacgcccatacatttgcttctttatttgcctcaactcatcatgagatgtgcgtaaccaactcacttgaaaattcattctttggtcggttacaaacttgctttggcgaagttacatataattttttaagaaggtaggacatctgattatttttcgtatctttgttgcattatttcactcttaagcatgtctttttatgaaaaaactctctaaaccttctctgaaagactggcgtcaacaacttacagcacttgtgttacgctttcctacttctatctttttctgtatcattacttgcgcttcatggatttttctgaatcataagtttttggaagatacagtcatcaatacgatgagaatcttcctcatgctctaccctgttactgctttacttttgtcgttacaactccatttatgtacagaagagtggcaacaacaaaaaagagcgtggcaagttcatcttggcatacaagtggtttggctcggcatttgcgcactgttggcaaacacttatacgaataccattgagcaaagtattgctattgtggtgcttgctactgtgatgggcgttggttggtttaccataccctattaccagcaacgcaacgatagacccgctatcaattttctgctgaacctcataggaggttgtagtttggctttcgtcatatcgcttggcgtgctaataggactctctttgttgctaaactcgctcacctcactgtttttgttagatatcaaatacaccctctatttggacttatctgccgtgtgcttcacgctcatcgcacctgtattactcatggcttcactaccacaaggagccaacaagtttagtgagagtaattggctacagaatcgttttggcaatggggtgattcattatctcttgataccgttacacatggcatacaccattaccctgtatgcatataccgccaaaattatcattacatgggagttgcccaatggttgggtgtcttggttagtgtcagtgttaatgcttcttactgttactatcgtctttttgctctatcctatacatcatgaaaaagaggtcaagaggttcgatcaattcattgttcgctatctgcctgtcattgttttgcctctcctcgtattaatgtctgtgggcatttacagacgttttagcgattacggtgtcaccatttatcggctatatcttttgatattcaatgtttggtgctatgccgtgtgcttggggctaatggtctatcgcagtagaagagtgatttggattatcaactcctttttaattgtgtgggctttgatttctatctttccctataatatcgccagctatacccgaaacaaattgacaagcgatgtaaagcatctggcagcccaacaaccagacatcaaattgcccatgaatagtgtcacctatgacaaactattgcaagggctaagctatatagatgcgaaaaagacggacgggaagctatcttatctccgtacaacttatggaatgaagtgtacggaagagctattacaaccaaaagttgaaacctttggctacgagtttgacaagaaagtgaaaaacaacaaagggaaacctgcttcagtgcaaagcatggtgagctatgaatgtaattttgaaaagagcgatgtgcttgtatccattcccgcaggatatcatcatgttgcaagtattgcagcctatgacgaggataacgtcaaagggtatttacaaggtgattcgatgcgcattgtgcttaaagataatattgacggtcagaagattaacgacgagtatcttgtcagtttatcagacctcgaagccatggcgaatacggagaaaacacacgacatccaacttaaaggcaagaagacacagctaaccatcacttactttttattgagatacaggaaagaggtggaaaggctgcacatcgtagggtatgtgtttgttccataaacggttgttgaatgaatggacaacaacatgaaaaaggtccgaaaagcaaccgcgcttttcggacctttttttattcaattgttttagcctctcaatgctcgaaatcatttactatcttgagttgtcgcaccagttttacgttgacgaatctccaaaccaatgcccaacaaaatacagatgactaacaaggcaaaggcaatgtatgccaccgtctctgttcgatcgaccgatttggggaagaaactcaacaccacttgatgcttaccgggcttcacctgtatggcgcgaagaatataattgacacgccctacaggcacctctttcccatcgaccgttgcagtccattcaggatagtagttctccgagaacaccaataccccaccctttgccgactcaacctcgtaggtgagttggtttggctcataggtcttcatggttacttgtgcatgatggtcttgctcacaactactacccaagacatctctaaacttcttgtcagctaccgcttccgcacgaagattgagcttgcccaccatttctaattcctcattggcattattaacataagtcaccttgtcgacaaaccatgcgttaccaaaagcgtatggattttttaacggaacggtctgaccgccttgcaaaggcatgatgaagaatttggtatttagcatattcaagacgggcgagatgctatccccgttcaatttggtcatatcgccttgcgcttcgaaaatacttttcattagtttctccatctctggggcgatatacgtctctatcatttcttggtagcggcgcaactttgcaggatgataccctccaatactcttgtggaaataactggtttcgttttcgttaaaggtactcgttgcgaggtttaacacacggtaatcgagttctttcgtctgcaaaatttgctggtcggtaggtgtcatttcaataggattgtcgcgcacactcttctctacaaacatgccatcgttgaggtaacgcttgttgacttgccacatatctacaaggcacagcacaatcaccagccctacgaaggcagactttttaagtttgttggtacggtaaagcagcagcaagaaagtgccaatcacaatgataaagaacgaccgccaacaatcatcagtaaagatagcttgccgcatttcacgaagattggcgagtaattgtccttgatattccgcaggaatgctcttcattgcttccagctcttgtgcagaaacaaaattagaaaagaacacactgggcatgagggcaaacaacaaacaaaagcctgcagtgagcccaaagctgatatatacatatttaatctgcttattcaatatcgatggagtgtccaagattttcttcaaacctaacatcgccaacaatggaatggtaaactctgctatcaccaagatggatgccaccgtgcgaaacttagcatacatcggcatgtaatcgataaagaaattggtcaatggcatgaagttctttccccacgaaagcaagacggaaaggacggtagctgctaacaaagcccacttcatagggcctttgacgatgaacaatgccaagatgaagagcatcaacacgaatgcgccaacatacacaggtccactggttccgggttgttctccccaatactgacctatttgttgatagatttgaataaaattaggatcagcttttttcatagccgtctcattctgggacagaggtacagaagctcctcctttggcattcggaatgagcagcgtccacgtttcaccaataccgtaactccattgagtaatgtaatcacgctccaaaccactattggtttggttggcagtattggcttttacgagttcgctcttgccacgcatggattccttgctgtattcccacgtgtggtacaagttgctcaagttcatacaaatgccgagacaggcagctgcagcacacactgccgttgctttaccaaaatgtagcagttgcttattcttaatggcttgaacaagataagctatcaccatgaacagcaccacaaacagataataatacgtcatctgcacgtggttggctttcacctcaaacgctgtaaacaaggcggtgagaatgaagccccacaggtatttgcctcgatacgcaagcaccaaacccgctatcattgggggcaaatatgccaatgccatgaccttccatatatgacccgcagcgatgataataaagaagtaactggaaaaagaccatataattgagcctaacacagccaactcctgacggaaatcgaatgcacgcagaaggatgtaaaagcctaacaaataggcaaagacataccacacattttcgggaagccacaaatggtatgcatccattaccttgctcaaggcatcagtactcttatacgaaggggctgtttgataggtgggcataccaccgaaaacagaattggtccaacgggttcgttcgcctgttcgctcaaaatatgtttgctgttcgtgtcccatgccacgcccagcagaggcatcatgttggaacaaaatgcgaccgtccaaactcgctggaacaaaataagcaaatgagataagggcaaaaagcacaacagcggcaacatctaagccatatttcttccaaacttccatgatagttttgttatgattatattttgccacaaagataacaaaagtttagggcttaacacggattatatttccttttttgctatctttgcaagaaaacgagaacgattggatatgaagataggcgtaattgtggcaatggataaggagtttgtacaattgaaatccttattggaaaatagccaaatggaacaagacaaccatttgagttttgtcaaaggacgaatcaaacaaaacgaaattgtattgatgcaatgtggcataggtaaggtgaacgctgccattggagccgtagaaatgattcatcgctatcagccacaactcatcgtatcatcgggctgtgcgggagctgctgatacagcattgaaccccaaagatgtggtagtaagcaccgagtgttgctatcatgatgcgtattgtggcaaggaatgcgccaaaggacaaattatgggaatgccagcaagctatgtgtctccgccagaattagtcaacaaagcgttgtctctatcctatcacaaaaacatcaaaagcggactcattgtaagcggagattggtttgtggacagtcgggaaaagatgcaacacatccttcaatcatttccaaaagcggcagccgtggatatggaaagtggtgcgattgcgcaaacctgctatctgtatcacattccttttatctcatttcgtatcattagtgatgtcccgctgaaggatacagaggcatcacaatactacaacttttgggaacagatagcacacgactcgtttgaagtaacgaaagactttttgcaaaagatttaatcaaaaccccgacagtttcttgcaacaaacaaaagaaaacgcatcactcaaaaactcatcaactcacaaactaaaaaacttaaagatgaacaaaataccttcattcaccattgatcacaacaaattgttgcgaggaatttatgttagtagacaagacctcattggctcggaagtcattaccaccttcgacatacgcatgaaagagcctaaccgtgagcctgttttgcacattggtgccttgcacactatcgaacatttagctgctacttacttgcgcaacgatgcacagtggaaagacaaaatcatttattggggaccaatgggatgcctcactggcaactatctgattgtgcatggcgacttgaaaagtcgtgatattgtcgatttgatgatacacacctttgagtttgttgctaactttgaaggcgaaataccgggcgcacaagcccaagattgtggcaactatttgctgcacgacttgcccatggcacgctacgaagcgcataaatttctaaccgaagtgttagagaaaatagaagagaaaaacttgatttatccgaaataaatggtgcgacatgattgcccaaatacatccttgacagcgaacaacaatatcccttaacaaccgataagcatgcaaaaattcttctttattcttttgtttgcttgcattggcacaagtctttctgtgaatgcacagcgcaagattgtggtgtacgatgccgagaccaaagtacccatgcgcaaggtctgggtttgggcagacacgcaaaaatgcgactcaacgaactatcttggacaaacaatgattccccaacaatttgacacgctcactatcatcaagcccaaatatttaccacttcgcattcctgcccgaatggtaggcgactctatttcgatgataaaagacgaaaagatgataggtgaggtagttgtttatggaaaggatatgcagacacaactcaacaagacgattcaaggatggatgaaagcggatgccaatgaacgagccatgttagacccctcctcgggcgttgcattcgatttcttttctatgtttgacttcaaagctaagaagcatcgaaagcaaaggcaacgcatgctcaaatcgttcaaacaaatggacaagctggacgaagacccgattatccaaatctataaggaaacacaaaaagagcaacagcaaaagaagaaataactcggaaagcgtcagaactaaaacaactcaatgggaaacagtttcgtctccattgagttgtgagctttcaaagcattgataacctatttcagcgtttcatttttcacgctgtgagagctatcaacttgttattaaagcatggattgcatgatgacgattttttagttattcatcaagtctgttcaaggcataaacgtaggcacctaatgcaatcgattcgctcgccccatttttcgatacgatgacccctattcgcttcatcgggtcgtaatcaacctgaacgctactaccaggcacattaatcttcacagcgccaccccttgtaaagtctgcaaactgttgttcgtcctccaagttgtacactttcatttgcatgtgtcctacctcctcgccattcatcattttaagtttgctgttcatctcgcctaccaaagctgggaagatgttggctgacgccttcgatacacctccaccaatgacaaccaatccatcgacaatagtatctgccatagcaatggcatcgcctgccatctcaccaaactctgcgaagctcttcttggcagcatccacattgccgtctatcgttcctgcgataatatcattgatgtctttgggttcaaggtcacgcacatcgccagaaagctcacgatatacacgtttgatagcacggatggcaacgctatcctccacaatatatgcaggatattttttgttacgaaaacaccaaatatcaccgcccaatccattatctccaaccaacaattcaccattgatgaccacaccagcaccgaaacctgtgccgaacgtgagacctaagagattgttaaaccgcttcggactgcccgcttcttccagtcgattattgaccaaaggcaatgctcctgccatggcttcgccataggcgaataagcttccatcgttgttgataaaaacaggcatgccaaaacgtatttgtaaatacggacccaatgccacgcctccacggaaagaaggaaaattgggcaaatcgcctatgatgccgttctcatagtcggcaggaccagggaaagcaaagctaatagccgaagcatccataggaataaggtgttgtattttctcaaaccctttgactaactgacctaaacaggcattcaaatcgtttgccattgatggcaatgcaaaaggttctatcatctgttcaccgccctgcatcgccgaaaagacaaagtttgttccgccagcatcgagggtcataataatacgcttgtcgtctttgtaattcatttgtttagatttataattcaagttgatatgattcgtgacttctcctcatcgcctcgtcataggtcgaaaatgtagccaacagtaaaggaaaataccttgttcttaaaagtactgtactcatctttattgattttcagcaagccgatgttataccttgcatccaacagcacattcccatattcgtacgaaatacccacaggaacggaaacatctatgcgcttcatgttgtccgtcatatcgtatttgctcttgtagtcatatagtaaattcccctcttcatccttttcataatgcgttttaccttccttgtccgtgtagaaatgcgattgagacgcaaagcctttggcagacagcagatagcctatttgtagacctgcattgacagaaagtccacttactacataagtatggagcatcactggcaactgcaaataatggaatttccattgaaatccgttagatgcatgatgaacatttttatcatctatgctctcgaactctggaaaatccatgccctgtctactataaaacaagccagcagaagcagcaactcgctctgttagctgattttgaatgtctaaaccaatgatgagtccttcaagatatttggatttcaaaacagatgagccttcaaaagctttcattgggtcatccagatcaattacatcaaaaccactgatgtttgcgaagttcactccaaccttcggaatcagtgaccacgtaccaacagtgccttgtgcccagccgaacaaaacacttaataacaagacaaacgttactaaaaactttttcataagtaaacggtttataggaaaacgacaattacacctattttattataataatgggagcaaaatatttcctacacagtctgcgcatattgaagtggtgctgtcattaaatcacttttgaaaccaataagaaaaaagctggtgcgaattaagaataaccatgactcatcataaaaaatgagagagtgcaccataaatacgaatatgatgcaccctccccttttatattaaatgagtatatgctggacttgcgattgtagcccagcatacgaaatctaactaaaagaatagatatctattgtcctcaatattagctttcaatatcaactcattcataaagttgcctgcgtattgtaaagccttctgacgtgtcttctgctcttctgtcttagcgtcaaacttgcctggacgcattgtgcgacctgttacttcgaatacataaacacctgcattaccttttacaggtctcgaagagaatttacctttagcagttgcagccacagctccactcaaggcaggttcgcttgctccaacactcatcacaaagacaggagctgcgaaagtaatttggttaacggcatcaacctttgctcctttggcttgtgcggcagcaatgttcttcacatctttggcctttgccatgagctgttctgccttcttgtcacgaagtacttcagctttcaaaaattcttttacctgtggatcgtcataagaacgacagccctttggatgaatcttatccaatactaccaataacaactggtcgttattaccacactcgtacattggggaaatttcaccttcttttgcatcaaagagccatttcatagcctcacgagtcgcattgattcccacaagtgtgtgtgttgaagtggtaatatcctttgcttcctgtaccgtgtaaccacttgacttagcattcttttggattgattctggggtttggttagcacttacgaaggagctaaatttgttatatgccttagaataggtgtcctttgagaaatcaatcgtcttctttatcacagctgctgtgtacttattaatcatcgccctgcgatccacaacttgaacaatgaggttaccttgtcctatcttaacattctttaattcattgacacctgaattattcaacgtaccaatataagtcttggtatctgcatctaaagaaggagcattctgatattgtgcagttgtcatccataccttttcaccactctgaccatattttttggcaatggtctcaaaagcagcaccagcattcaatgctgtgtaaatggaatcagctcgtttctgagcctctgctggagttttaccaattacctgaatttgtcgatattgaacagaatcaggcagcaactgcttggatataagtttgacaacattcatcgaattgtccatctttgtttcaaaaggtccataagtctgtccaactgccatagagtctaacttatcagcaatatcattaggataggctgtcttagcaacagggattccaagataattcaccaaagaagtactcttgcgaacaacgtttgcgggttctgaagcagctgctaaatctgttgtatatttcttgaaagactgctgcaagtcggcacggtctgttggagaaggctcaacacgaacagttacatatttgatatcgcggctttcaacattttgcttaaagcgctctttcagttcgtcatattttgcctttaggtcagcatcttgaacctttatcttactgtcatcaatggtggaataagcaaaagtagcgagctgaatcgaactttcttcgttttcctctttataagaaagtttggcttctacaggattcgacaagatacatcctgccaataaactctgatatttctgtgctaagatttgctggcgtagtgtacgttcgataaaagtccagtatttataaagagtttggtactgtgctgccatttgtggattggcagtttgttgcgttttataatcagcaataaacttcttcaacgaattgacatcaaaccttcccgtttgtcgattaacgaatggagtttgcatcaacatggggttggtaccttcagctaaaatgttttgaagttcagcatctgtcactgtcaatccaatctttttagcttcatcttccacaacttttgtttggatataggtctgccaaaccatatccttaacttgattcatctgcatctcattgagattatcaacaccttgttgcatttttatcacttcggtgtactcatcaataagtttttggaagtcttggacattgactttctctcccaacactttacctacttgctgacgctgatcattacgagaagcttcacatgatcggaatccctcttctgcaataaaagcaaaaaggcctaatccaatgatgcttatcagaatcatacctctcttacgaatttttcctaatgctgccattttttattttaatatttattttattttatattcttcaatgagcctacaaacgcttatcacacctaccgcatcgtacttcgttctggtgcttatgccttcaaatgcgtacaaaaatactaaattcttagcaaacgactgaatattttattgaaattttaagtttccaacagtcacaacagctcaattagatataatattcagctgtactaactcgattttagacgatgtgctcttcagtattttgaatttatatttaccgatttcgatgatttcattcagtttggggaagctgcgatattcattcaaaatcagacctcctatcgtcatatagtcatcactttctggcaaatctaattcaaacatttcattcaccttatcaatttctaagcgggctgataataggaactcattttcgcctgtttgcttcgctacgtatttaaggctgtcatgttcgtcttctatctctccaaatatttcttctacaatatcttccaaggaaaccaagccactcgttccaccgaactcgtcaacgacaatcgccaagctttttttctgcgttaacagtatgcgcatgagcttctgcgctggcattgtctctggcacaaaaggcatcgtccgaataccctcctgccatgtggaagagtgcttgaacatttcagaactatggatatatccctgtatatggtctatatcgtcctgataaacaataatcttcgagttgccactatccatgaatttttggcgtaattcgtctaaagaacattgattcatgtcgacggcattgatttctgttcgtggaatcatacaatccctaaccttggtatcggggaaatcaagtgcattgtgaaaaatcttgatttcattttctatgtcatcttcactttgagcattttcaatacttgattgaaccaaataatctaaatcaaccttagaaaatcctgcagcaactgcatccttagggatactaactcccaacaaaccaagaatgatgcgtgctaaaaaagtggcaaatcgacttatcggccacaagataacataaaacaaataagcagggaaagcaaataatttcagtagtcgattgggattactattaaacagtgtctttggcacgaactcacctgtaaacaagataatgagcgtggataatatcgtatccgccggcactgtaaaggcaggattcattcctacaaatatcgtattgtctaaaagccgcgctatcaaaataccataaatcaccagcacaatattgttcccaaccagcatcgtgctaacaaaagcatttgggttgctataaaataaggtaaggaaacgttgcgaaaatccattcttttccttatccatctgcaccaacatgcggttgcttgaaacgaaagcaatctccatacccgaaaaaaaggcggagagaaccatcgttatcagaataaaaataatcaaagagagatctacttgttcattcattgttatcaatactaaggtgtcgtgggcaacttcggtcgtggtgatgcttgtggtctcaagaagacgtttgtgctgtctgtgggcgcagacgtcgtatctgtctctcctgtaaaatctgatttttcaaaggagccacgactatttgtaacgatgtatttcgtcatccgctcatcacttttgaagtatgaaccctgaagtgtgcgttctggcgtaaccaatttggagaaacgatgtgagtacatctcatgtgctcgacggtccaaaaacagctcctcactcgagaacttcagtccatctttcgtcaatattcttacccttcccctcaattcccaaagttgggcatctatattataatatgcggtatcgcattggataaaagactgcacatgaaagctttcatcaaactgttccaagaatgcacctttccgaaacacaaacttttgcggggtcgtgttttgataaatctcccaccgctcggtaacaattcgatatttaataacacccgaatcggatatcaattgatttactccgtaggtagtcatcgttggcacagagtcacgatcgtatatggcaggggcaatgtgttcggtttgcttttcacaagaaacaaagcccaagatttgcatcagtacgacgacaaaaacgattgacttactcttcatacacccttttcctgtcctcttgggagggttattgaaccttccatttagcaaaccaacgctcattgaacgttaagccgatgttgattcggaacgtattttctttgataaagtcttttgcatcctgctttacccattgtgcggagatattcaacatagaacgattgttccagctattgacaatcggaataccgaaacctgcactcacactaatctcactgggaccatcctgtccgttgattttgaggtaaggagtggcataggaagcacctattcgataatgcattcgctgaaagaaatggcgactgttggcatcttgacaaaactcaccgccgaaggtaaatttatgcctatctttgaacatgccttgtgtgagtacatattgcggattaccgttcgccatcgtatagtttggataagatgtttttgaccactgctgtaacaagtaatccgctcctatctttaactgattgcggtggttccagcccaatcctcctccaaaggcagaaggtaattccaaaccattgttcaccgtaaaaagagttgtgtctctaatgcctgtctgtggattttgagaaataatgcttaacgacggatcggcattcagacgatgtcccaaagagtaaattgcgcccaaggtcacctgatcttgtctcgacaaccgtgctgtatattgcaatcctacgtctaatttataattgtgtacagaggctgaataatattttgaaaccgtattgatagacatatcgctatagctattcacgattgagcggtcatattttccccaaaggtaagagacattaacccccaatgagaagcccttgaacggttcccagccagcacctaagtacacttgatgcaatcctccctttccaacataagcgttggtagtggtcgtcttggtataattttcatcaatatgaatggttgcagtgttggagtagttgtatccgatgttagtaaatggtaccaaaccaaaactcaaccctaaatgctttgccagtcttaagccagctaccacatattctaaatctgcattctttgcattcagtttgcgattaccttcctcaaaatgagtaagctgcccagaaagtccagcatcaaagataaaggtaagtgaatcaagggcagaataagaagcaggattgataaaattcacctgatcattttcccgaaagccataacccaagccattcatccccctattaaaaccactggtctgatcagacagtacgccaaatccatactggctataaggagagtttgtaccactctgtgcaaaagcagatatagaaatagacgcccataaaaaggcaccaaatatctttttcattctatttttatttcagatttggatgcaaaaatatcgaaaattttcgaattaaacacactttaagtgggaaataacacttaaatttgcatcgtgaaacgttttactacaaatttaaggattgtctttatagcgattttgctgttgatgacaacgatgcccacttttgctcaagctgatagcacaatgctcaaaagcatggactctgtacgcatcagtttgctcacttgtggacctggcaatcaagtctactcctactatggacacaccgccatacgttaccacgacttggcgcgtcaacaggacatcgctatcaattacggcatcttctcctttcaaaaaagttatttcatccttcgcttcgtgttcggactgaccgactatgaaatggggatagaagattttgcaactttcatatctacctattctcatcggggcagttgggtaaaagaacaggtcttgaacctgacacgtgaagagaaatgggctatcactcaagccattgacgtcaactaccgaccagaaaacagagtgtaccgctacaattatttctacgacaattgtaccactcgtgcaagagacatgctcatcaatcatatcgatggacatgttctctatccagcaagtcagtcgcaaacaatatcctatcgggaaatgattcaccagtggaatcagtcgcatcgctgggcgcgttttggcaatgacttattgcttggcgtacatgccgatgcagctacaaccaacgaacaacagcaatttttgccagatagtctacgagcagattttgccgaagccattgtcatcgaccatcaagggcatcgccgcagtttggtagacagcacatactatctcgttccgccagtagaaaaacacgtatcgagagctcctatcaccccgctgcattgcgctgttttatggagcattgcgacattgattatttgctttgccgaatggaagttcagacgcattctatggcagtacgaccttatcgtcatgctcctttctgggatagctggtgttatactattggcaatggttttctctcagcatcccactgtgcaacttaattttcagatactcctactctgtcctctccaccttttctttctttacccttccattaaggcgttgagaaatggacacttgcacgattataccaaattttggagcatactcttgtgcgctttccttctgctttcgtttttccaacattatgcggaaggcatgacacttgtggcattatctttgctatgtagatattgttggctgtacatatacacccataaaatcaagaatagatgaacaaatgtctctccgcaatcatcatggctacccttacgggagcaacgacacaggctcagaccttgcaagttgcgcctcgtttggttgtcaacattacgattgaccagttacgcaatgactacattgagcattattcaccgctatactcgccaaatgggtttaagaaactattaagtaaaggctgcgtttacgaagccgccaactatccctttgagtctgtagatcgagcttcggctatcgctaccatcgtcactgggactacacccaattatcataatatcatcagcacaagatggttagataggaaaaccttacgccccgttttttgtgttgatgatgctaaatacaagacttcccctcaaagattatccacctcaaccatcagtgacgaactgaaagtgtcaagcaacggtggttctattgtttatggcatagcctcacaaagagacgctgctgtcttatcggctggccatgccgctgacggtgctttttggatagatgaaaaaacaggtagctggaccacttccaattattatgggtcgaaagcccaaaagtggattcaggcttatcgcaatactacaacaaaaccgagtaaggaacaggcggaacagaacaatgccgtttgtgatgcagcgattgcttgtctgaaccatcacgccatgggaaaggacgcccagaccgactacctctcgattacactttctgccaagggaacacaaaacgaaaaatggcgcaccgattttgaaagcctctaccgaggattagatcatacacttgccaccctgattgaacagatagaaaagtccgttggaaatcagcaagtgctctttgtgctaaccagtacggggtatacagatgaccccaaagtagattatgcaaaataccgcatccccacaggcactttctacatcaaccgtacagccaatttgctgaacatgtaccttggagccatttatgggcaaagtcggtacgttgaaacttgctttaataatcaaatttatctcaaccgaaagtttatcgaagacaaactgctttcgtttgaggacattttgtcacgctccaaagactttctggcacaaatcgcaggaattcggaaagtgtctgaaagtccgtataatccagccgtgagtggcgacttaatcattgaggttgcgccaggttggcagttgctgaatgaagataatcaagataattatattgcacgtgcatcctttgtaccctttcctattattttgtatggaatgggtatcaagcctcaacgtgttaccacacctgtctcggtagaccgcattgcgcctactatcgcaaagtctatccaaatcagagcacccaacgcttgcaaggtgtctccgcttcaataagcattcgcataaagtactcatcagcagcagtttccgcttcatctgcatagggttcttttgattgctatttacccccttaaaattaactcaatgttccaagcctcttaactcatggagataaggcgattaactcatggagataaggagcttaagtcatggagataaggcggttaacccatggagataagcagcttaagtcaatgagataacaaatccatgctaaagaaggaagaaaagaagaaatagcaagatagaaagtcagtgacatgaagcaccttacccaaacatctgaggacaacaccaaataaataaaagagaaatagcaaattaacaaatattattcgtaattttgcatcaccttattatatagaaaataaaaacaaataaatagatacaatgaatatcaataaatttctaaaatcattgtttggcgacaaatcgagccgagatatgcgactgattcaacctttggtagaaacagtgaaaaaggtttatcccgacatacaaaagctgagcaatgacgagctacgtgccaaaaccaaagagatacaaaagtatgtacaggatgctgcacaagcgcaaaaggacaaaattgcacaactgaaagccaatatcgaagagacacctatcgatgaacgtgaacccatcttcgaagaaatagataaattggaaaaagaggcactcgaaatatacgaaaaggcattgaatgatgtcatgcctaccgctttttctattgtaaaagataccgctcgaagatttgcagaaaacgaagaagttgtggttactgctaccgactttgaccgtgaattagctgccgatccttccaaggattttgtgaccattgatggcgacaaagcgatttatcacaatcactggacagctggtggaaatgacttgaaatgggaaatggtacactacgatgtacagctctttggtggtattgcccttcatcaagggaagatagcagagatggctacgggtgaaggaaagaccttagtcgctaccctacccgttttcttaaacgctttgacaggaaacggtgttcacgtagtaacggtgaatgactatctggcaaaacgtgactcggagtggatgggaccactttacgagtttaatggattgagcgtagactgcattgataaacaccgcccgaactcgccagagcgtagaaaagcatacatggcagacatcacatttggtaccaataacgaatttggttttgactatttgcgtgataacatggcgatttctccagccgacttggtacagcgtgcccataactatgccattgtggatgaggtagactcggtattgatagacgatgcacgtactcctttgattattagtggacctatcccaaaaggcgatgaccagatgtttgaagaatatcaaccactggtggaacgactggttgatgtacaacgaaaacttgctactcagttcttagctgaggcaaaacaactcattacagagggacaagcaaacaaagatcagaagaaaacagaagagggcttccttgctctgtaccggtcttataaatctctcccaaagaacaaaccgctcattaaatatctttcggaagaaggtatcaaggcaggtatgctcaaaacagaagagtactacatgcagaacaacaaccgtgagatgccaaaggcagtagagccactcttcttcgttgttgacgagaaactgaacagctgtgacttgacagacaagggtacagaatggctctctaaacaggtgaatgacaatcaactatttgtactgccagacatcacggctcaactttcggcattagagaacgaaacaaatctttctgatcaggagcgtattgataagaaagatgaactgttgacccactatggtgtgcaaagtgaacgtgttcataccttgcagcagttgctgaaggcatataccatgttcaacaaagacgatgaatacgttgtgatggatggcgaagtaaaaatcgttgacgaacagacaggacgtatcatggaaggccgccgttggagcgatggattgcatcaggcagtggaggcgaaggagcatgtaaaagtggaagctgccacacaaacctttgcaaccattacgctgcaaaactacttccgcatgtaccataagttggcaggtatgacaggtactgcttctacggaggcaggagagttctgggatatctacaaattggatgtggtagagatacctaccaaccgtcctatccagcgtaatgatatggacgaccgtgtgtacaaaaccgctcgtgagaaatatgctgccgtcattgacgaaatagaacagatgcgaaatagtggacgcccttgcttggtaggtaccacctctgttgagatttcggagctgctcagcaagatgctcaacatgcgaaagattcctcacaacgtgctgaatgcaaaactacaccaaaaagaagcggacattgtagcacaggctggtcagtccatcaacggcttaggggctgtaacaattgcaaccaacatggctggtcgtggtacggacatcaagctctcccctgaagtaaaagaagcaggaggacttgcgattattggtacagagcgacacgagagtcggcgtgtagaccgtcagttgcgcggtcgtgcaggacgtcaaggtgaccctggtagttcggtattctatgtgagcttggaagacaaactcatgcgtctgtttgggtcagaacgtatttcttcggtcatggacagacttggattcaaggaaggcgaacgcattgaaagtccgatgatttccaagagtattgaacgagcacaaaagaaggtagaggaaaacaacttcggtattcgtaaacatttgctcgaatacgacgacgtgatgaacaaacaacgtacagtcatctatgagaaacgtcgccacgccttgatgggagaacgtatcggaatggatattaccaatattatttgggaccgttgtctcaacattgttggatcgaacgactatcaagaagccaaggaattgttcttgaaagtgttggcaatggagattccctttacggaagaagagtttacggcaggtgataaaaacgctttggctgaacgggctttccaagatgccatggcagttttcaaacgcaagtcagaccgcattcaggctgtagcttggcccgtcatcaaacaagtgcaagaagaacaaggcgaacgctttgagcgcattgcagtgccactgaccgatggcaagcgaatgtatcaaatctcttgtaacttgaaagaagcctacgacacagaagcaaaggacgtagtgaagcagttcgagaaatcgaccttgttgcacatcattgatgaaaactggaaagagaatctgcgacaattagacgacttgcggcacagtgtgcaaaatgcttcgtatgagcaaaaagaccctctgcttatcttcaaactggagagtgcgaaactttgggacagcatgattgacgagatgaataaccaaacaaccagcatcttgatgcgtgcacaaattcctgaaatgcaaaacgaagaagtgcaagaggctgctccagaacaaagaagtcaacgctacaacgaacagaaagaagatctcaccgatccaaatcaagcagctgcagcgagacaagacacgagagaaggtgcacaacaagtgaaccgaactccgtatatcaaagataagatgccaagaccaaacgacccatgtccatgtggtagtggtaagaaattcaagaattgtcacggcagaaacctccgttagtgacaagcagtagaacgaagattgctgacgatgaacaagaatagataactcttgcccgtcagcaatctttctgtatgatgacactcactctactgttacgaaccctcacgtgcaaacatctacgtatttcatgacatgatgtcaaatgaagaaaaatcaaccttatgaagatacaacttactggtcttaagaagatatttggtgaaaaaacagctgtcaatatcccctctttggagatagacaaaggtgaagtgataggcttggtaggaaacaatggagctggtaaaacaactttgttcagactgttattggatttacaaaaggctgacgaggggcaggttctgctgggatttgatgagaaagagacaaaacaaacagtctctacggaaccaataacgtcggcacaagattcaaccaacttgacctggatagcaccttctgaaacagaagtatggaaggcattaacgggtgcttatattgatagtggattcttaattgactttttaacacctgaagaatattttgatttcatcgctaaagtaaaccatcttccaacagagcagttacaaagttttctcaattctatggcgcagctcatggatggtgaaatacttgaacaaaagaaattgattcgtgatttctctgctggaaaccaacaaaaaatagggattattgcggcaatgattgcacatccccaactacttatcttggatgaacctttcaatttccttgacccatccagtcagaacttgctcaaaaaaatcattttggattaccacaagcagacaaatgccacgattttggtgagcagtcataacctacaacataccatagagatatcaacaagagtcatcttgcttgagaaaggaaagattatcaaagacttgcccaacgaaaatcagaaagcagaagcagacttagaagcttatttcaatagagatatgagcaacgaataggctcgacaaagcatagtcaatagattttggactgacgataactcttggataaataaaacaagaatccaatgccacagcttatcagcagatagatagccaaaacctgtatggctgtgagatgaatattttcaacactggcaccagtccacgatgcgatgacagtgagttgttggttgagacactgtgctgtccatgccatgaccttagcaacaatattttgtgccgacggccaaaaggacaataggaacaccaagcaggctgtatataaaataaaagtggtgagaggaacagctatcaaattggtgaataggaaataacaagaaaaacgtccgaaataataagccaccaacggtgctgtacctatttgtgctgcaacagaaactgtcatcattccccataacaatcggataaaggaagagctttgaagccaatgcaaaggtaacaaatgataaatgggatggtataaaattaaaatagctaacacagccataaacgacaattgaaaactgacatcccacaacaacatgggttgaatcatcaacatcactatagctgcaaaagatagcgcattcaatgacatgcggtgacggttcagcaaagatactaatgaataaagcgtcaacataagtcctgaccgtagaagacttgaagacatacctgttaagaagatgtaagcccaaatcgtgagaatgacgataacaacgttcagaaggtgacgcctcccaaagacaacacttaataatccaaacagaatactaaggtgcaaacccgacagtgccaacaagtgagaagtacccgttatggagtatagttccttggtagacttggacaaggaggacttatctcctaaggtcatagcagcaatgacagcatagtcttggtcgcaaagaccttgccgttcaagaatttgcaacaaacgagaacggacttgttgagcaaacaaacgtaaacgctctacacgcggcaagtcatgaaagtcgacagcacaagtttgccaatcggtgaaataaataaaggtttgggctcgatatccgtgcagaaacatccattgtggataatcaaaatgtgatttagattttaggttttcaaatggtcgaaacacagcacaaaatacaataccactcccaataccaagttgctgataacgccgttgaagcgtatctttgagaatagatgctttcactttctttcctgacaacatgcctttcgtaagcaacacatcacattgtaccaccttccctttagatatcaacggactcataatgactccttgaacaacctgttcaccagtgggcagagatgaagtcaaccgacaatcctgaagtgtataaagagacattccccagaagataaatgccccaaagatacagacgccttgccaacgggcatgacttctgcatagcaaggcaactaataacgtaactatcgttatccccaaccatagccaccatggagcaaaagttccaaagttaaaggtatgggcaatcaccaaaccgatgatgaatgccaatactatttttgataacggatgcaactgaagccaatcagcacttttcattcataatcatcaatgacgttgttcgtaaactgcatcatgggcagtgccaccttaaataactcagccatcggaagaagccaatcgttcccagcaaagaagtcatcatctaccctgtgccaacaagcataatctttcatacgaaggtactgtataaattcgtaatcagaggggaaacctttgggacaagtctttaagcatgagattccaaatcctttctgagacgcctgtccatcgttccaaacaccttcgttggcataaccgaaataattgacaaattttccattctcaacgcactcacgccaagtgtcgatatgacccatgatttcatttcggcaagaagttaatatgggagtgggcaaccaataagccccagcggacaacaagcaatgaccaggctgtagatgaatgtaataaccagcatgcaaggactttctgcccttggcactgatataggcaccaaaatgtcgtttgtagggagatttgtcgggcgagaaacgagtgtctcgattaaatcggaaacatgcatcctttgccgtgacatgcgctaccgtagggtcaaactccgcaatagtagcaatcgccttattcactccttcctcaaattcttgacgacaacacaagtattcttttttgtgggattgaaaccaatctcggttgttattggcagcaatttccgccaaatagtgcaatattcttttaatatccatgggttatcctaatttagaaaaattcatgcgtttgggacaaatagcttcaaatgggcacttctcgcacttaggtcgcaaactttggcaaatatagcgtccatgaagaagaagccaatgatgtgcacttgacacatcctcctctggaatatatttcatcagttccaactctacctttaagggagtgttagatttttgagaaaccaatcctaatcgatgactcactcgatacacatgagtatccaccgctattttagcctttccataccaaacggcttgaaccacgttggctgttttgcgtcctacgccgggcaacttcaccaaatctgtcgtattatctggcacttctccatcaaaatctcgcaccaacatttgagccatctccaccagatgtttagatttcgagtttggataactcacgctacgcacatacgtgaaaatgtcttcgggtgtggcttgtgccattgaaagagcatctggataacgtgcaaacaacgcaggcgttacctgattgatgcgcttatcagtacattgagcacttaacaaggtggccaccaatagttgaaatgcagaaccgaactctaattctgtggtgacctctggcgatatttccttgaaataatcgaggatgtatttgtatctttcttttcgtgtcatcacacaaatttaataaatgattttgacattagcaaagaatctgaacggttttaagtattgaacaaataggagtaggaaaaagagagctatgcaaaaagaatgtgactaaattctcatagatgaagaatttagtcacattcagttttgaaattagtcaacagatttaataaacatctccttgcttcacttcttctttcgtaattttgtctttatccatggcataccatacataaacgatgtaagccaagacaaatggaatgaagagcgaaacaatcgacatcgttgtaagtgtaaattcactactactactgttggcaatggtcagagaactctgtaaatcgacattagaaggatagtaggctgtgttgttccatcctgcgatgagcaacaaaacgagtaccactaacacaacgccaatacctgctggccaaattcccttgatgtagttattgcacataacggttctgacgataccaaaaagtaacaacacaacacccaccaatagcacaactgccagataccacatgtccaacaagttatacagatacttcatcgattccatagagattactcctgtggcagggtcgtaagcgaagccatcttttaacaaagttctaatcaagaacggaaggaacaagagtaagaaagcagcggtattgtaaagcagttgtttgcgactacgtgtgcgtaaagtttcatctgccacattatttataatatagagagtacccaaaatacgtgctaagaagaaaactgccaaacctaatacgacattccaaatatccaacaatgcatccaaaccatgactataatttgcccaatggctaatcacaggagctacactattggtgatattcattttgtcgacaacgaaattagacccattgaagaaggtagccacagcgcctcctaacaatactggacctaaaataccattgattactaaacaccattggaaagtctttacgcctaagaaattacccaacttgttttgaaattcatagctaatcgcctgaacaacaaaagaaaagaggataatcatccacaaccaataagcacctccaaagctggtactatagaacaaaggaaatgaggcgaagaaagcaccaccaaacgttaccaaggtagtaaaggtaatttcccatttgcgtccagtactattcatcaccattctacgctcgtgttcagtctttccaaggttgaaaaccaaagagttagcaccttgaacaaacatcaagaaaaccagtaaggctcctaacaaagaaacaagaaaccaccagtaatgctgtaaaaaactatatgtaatcattgttatacctttctaattataattcaacatggtttgatatctcactgttctctggcccttttttaatagccttacaaagaatacttatctcgactgccagcatcgttgtaaacagtatcaagaagataaagaatgtgacaataacagaacttggtttaatgtcagaaatagctacccatgttggaagcatatcttgaatggtccaaggttgacgtccaaactctgcaacaagccaacccgactgtgatgcgatgtaagaacaaggcaataaaacgatgcccgaaatcaacaaccaacggtgtttgacgatgtctttcttgtacacaatgaacaaagaacaaataaagaagagaatgagcaacattcctatgcccaccattaagcggaaagcccagaagttaacaggaatgaaaggtaccacctgatgcggtgactttacatatccataaccgaagtaaggcatattgtctttcagagcctgctttgtggcttcatcttttttaccattacggtaatcctgtaaagctgcgatagccatgcggccacgctgcattttctcctcaacagagatcacttgcgtgccatcaggtttggtatatccgttcaaaatatcgttgatacctggaacataaccatcaaaatctaaagttgctaagaatgacaaacctttaggaagctccagcttcataggtggttgttgttggttggtataatcaggttgcttgaaaggattcacagcagcaaaaactgttaagccttgactcgttcctccattataaagcgcttccatggctgccaacttcatcggttgaaccttacctacctgaatagctgaactgtgtccagtaatcaacgctaacaatgttgccactaaaccaacaatgctaccaatcttcatacttgctattgccaatttgtggtctctcctcttgagcaaataccaactactaacagctacagtgaatactccaccaataatccaagatgaagtaactgtatgacagaacttatcgacagcgaacggagatagagcaacttccatgaaagagttcatctcgaaacgcattgtgtctggattgaactcctgtcctactggcaactgcatccatgcattggctaccaaaatccaccaagctgatatcgttgctcccagacctgttaaccaagtagatgccaagtggaagccaggtgaaactttcttccaaccaaagaacatcacagcaacgaaggtagcctccatgaaaaaggcaatgataccctcaacagccaatggcgcaccgaagatatcgcctacaaaccaagagtagttactccagttggtaccaaactcaaactccaagataagtccggtagccacgcccatagcgaagttgataccaaacagtttctgccaaaaacgtgcagcatccttccagaaaggatcacgtgtacggtaataacaagtctccataatgcccatgacaacggctagacccaatgtcagtggaacaaaaagccaatgataaatggctgttaaagcaaattgggcacgtgaccaatcaatcgtctgtgccgaaatctctaataacagattgtgcataatgttaaatatttaatgaattgttcgttttatcatctcgctcgaaacaaaatctgcctctcctccatctttggcattttgatgaatgaagtttgggaagaaaaagaattttaataccgcaaacataatgaagagtttgataataatgacagcccacagggttttacccagtgtcatgtttttgaaaccatcatagtataaatcaaaagctctatagaggaagctctttttattcatagtaagttgtttatgcggtgtaaagatagcaaaatttatttaatgttgtactttttccgaaaaaataattaaaaatcttgcttttttttcatgtattgagccctgctcccttatttatataaggtgatagatggggaaaaactgtttttttttatattcaacaacacctctcatgaaagaaacagcttacattgtttgcgctcattgtcgatctctttttctattttatttgtcctaaaaaatgacaataaaatgggcgttgaaaaatgatgaaatagaaaaaaacgataggcaaagccaatgctatgatggcaaaatagaaccaagaaaaagctttgtctgtgctaaagcatggagataagccggttgttcacatgggttaagcatgctgttcacatgacttaatgcggttattgcatgttgataacagcaaaaaaagccgttatttcatgcaaaaatgcaggtaaaatgattgaatataaacgaccattatttgtatcatcttgataatcaacaaaatgcgaaacttcgccaaaacttcgatatttgcgagcaaagagcaggttgcttcaaaatatggcagctatgaaggggtacttgtaaaactttttcttatttttttgagtctttttattgttcacgaaacgccttttcgctgcacggattcagtaacctcacacgttgagatagtcgagttgcgcatctctcctactttggatgttttcatatccacctaaatacactccacccaatgcagcatcattgcgcattcgctttcatcgtctatcctacaagaagaaaataaaaaatgatttctacctgaaaaatctatcgttaacgtttgaagtgttacgttgtttgtgtatctttgcataagtttaatttatttataataattatcttatatgaaaaaagttattttaagtgcatgcgttatgtttataacaattgcagcgtacggacagcgtgacaaaggtacggttaccttacaacctaaagttggtttgaacatagcttcgcttacaaatgaaggtgatgccgactcaagatttgcgccagttgttggtgccgaagtagaagtgcaggctacggacatggttagtttctcgggtggattactttactctatgcagggagctaagggaaaaataggcgatgtagatggaacagtaaagttagattatattaatgttcccattcttgctaacgtctatgtggctaatggatttgctgtgaaattaggtgtacaaccaggctttttaatcaacaataaagtcaaagtttcacagaatggtgtcaacgcagaggttgatttggagaaagcttttaaagctgcgggaattgatgccaaactgaataaggttgatgtctctattcccgtgggtgtttcctatgagttcagcaatataaatattgatgcacgatacaattggggagtaaccaagattattgacgaagacagcagtaagaatagcgttttccagattacagttggttacaaatttgcactgtaattcgatatgagcatgtcaaaacatgctcctataattccgtatctaactattaagttagggtaaaaatgtacctccttattatatggaggtgcatttttttatgctattatcgtcagcccgtgactcacgtaggataagagttcagtacattgacaattgtattcacttctgcatcggtaagtgtttggttgagtggaatactcaattcttgttcgtgaatgcgttcagtaatcgggtatgaacggtggttccactctttgtaagcaccttgctgatgaggcggaataggataatgaataacagtctggatgccctgttgcaacaaaaattgctgtaacttgtctctatgtggagttaggatggggaagatgtgccacacgttatcctcgctacatccttgtgggagcgtaatcaaaggatggtgtatgttggacaaatagtgctgtgcaatggcgctacgacgtacattatctgcatcaaggtatcttagtttcacgctcagcacagccgcctgtatttcgtccatcctgctattctgtcctttgtaaggaaacacatatttctgcgacgaaccataattagccaaagtccttatcgtgtttgccagtttgctatcattggttgttacggcacctgcatcgcccaaagctcccaagttcttgccaggataaaaactgtgtgcagccacattgcccaaagagcctgtgcgttgactgccattgtagaggcatccgtgtgcctgcgcattgtcttctatgagttggagatgatatttttggcagagctcgccaataagattggtgtatgcacaacgtccataaaggtgtaccagcatgatgccacgtgtgcgctcggtaatggcttcttctatcttggtgtcgtcgatctgaaacgtatccatgcgtggttctatcagcactggcaccaattggttggctgttatggcgaggatagtagcaatataagtattggcaggcacaataatttcatcgcccgcctgcatcactcccagttcaatataggctttgagaataagtgtgagcgcatccagtccgttggcacaactcgcacaatgccgggtgccaatgtattcggcatattgtttttcaaacgtttgtaccgcctgaccttgcagataccaaccactctcaattaccttattgacagcctgttgtatctctgtcagatgttctttggttactcgttgtaaagataaatagggtatcatacctcccattgataagtgtcataacatatagcacgaccgccaaacccctctttttgatgaatgagtgaggcattgagcaggtgcccatcttgcagagtagacgtgccaaaatcaaaatattgttgttcatcccacgattgatgaagtaagaaatggaacaaaccatcgattacacgcagttgctttccttcgggcgatgccgagatgtattgcgtatgcaccacgttgggagtgagataaagaacggttcctcctaacaccatgttatctttgcatgccacatacaactggatgtgatgagggaaacgttggtgcaacagttctatttcctgcaagctatgaacgggtttcgcaccgtatttattcattaaattgtcatccagcacttgccaaaaagcggcaaaatctgtactctgttttatctctataccatttcttgcacatcggttaatgccgtattttcggtctctactccacttgaggggatgtgccaaatggatggcggaagaaatgttgcgtgccactaattgggcattgcagactttgaagagtgcgtacaaatcctcttcggcaggtattaggtgatagatagaaggtgtgggacggtacaccactcgcttgatgtgctgtgtgcgaagatatgtgttaagttcctcaaaaaggcacaatgtatcggaagcggtaacccgatcgtccatgacaagaccaccgtatgtcaaacctaagtgtgtgtataaggtgtcgtttgcaatatgggcaggcaacagcgcatacagcctaccctccttgtaaaagagcagtgaagcgtccaaatacctgtcttgatgatagtccatataggctctgtcaagcagaaaggtggcattttttgcctccctcacatagctattccaacgctccttgtcggttggtacatatcgttttatctcaaacatcaggtttgttcttgatatattccataaacgagtgataatcgcgaatgtaatctccttcgtcgaaaggctcagatgccaataccaagcatactgctcccgaggagaagtcatctaacgtccgccatgtatcagtatcgacaaacagcccttgataagggtggtttagcagtatagaagtcttttccttgccgttgtcgagcgttacgtggaagctgccactcaatgcaattaaaaactctttgcaccgtttgtgagcatgtccaccacgactttcgcctgctggcacgtcgtacacccagtacacccgctttacatcaaagggcacatccttgcatccttcggcaacggttaggtttcctctggggtcaacgatcttaactaagtcaatggttttcgcttccaactgctcgttcttcttatcggttaccgtacatttgttcgtagtatttttggtagtctccagaggttacctcattgatccaatcctgatgttgtaggttccatttgatggttttcacgattccgtcggcaaacatggtttcaggataccaccccaaatcgttctttatctttgtaggatcaatagcataacgctggtcgtgtcccaatctatcagcaacaaaagttatcaagttgtcgttgatccaatcaatcttaatgttgccttgttcatccacttcttgcttcttcagcacctttctcaggtctttatcctgttgcatcatgtcgtgaatggtcttgatagtgagcttcacaatgtcgatgttcttcatctcgttatgcccacctacattgtacacctctccttctttaccctctcgcaccaccatgtcaatggctttgcagtggtcttctacatagagccagtcgcgcacattgtcgccctttccatatacaggaagttgtttaccttcaaggatatttttgataatgagcggtatcaacttctcaggaaagtgataaggaccgtagttgttagagcatcgtgtgatgctgacaggcatacggtaggtgtcgcgataagccatgacaatcatgtcggcactggtctttgacgcactataggggctgtgcggacacagcggcgtttgttctgtaaagtatccttctgcgcccaaggaaccgtaaacctcatcggtagaaacctgatgatagcgtttgccagctttccaagtgggataaccttgtgcatctttgcccgtgacccaagcctttcgggcagcatccatgaggttttgagtgccaagtatattcaccgaaagaaacaattgtgggtcctcaatgctgcggtccacatggctctcggcagcaaagtttacgacaaagtctatatcgtgttcagcgaacaacttatctgccaaagccctgtctctgatgtcgcctttcacgaagaaacaacgtttgttgtcaatattattcttgatagtaccgagattgccagcgtaggtcagcgcatccagtataatcaccttgatgtcttcgttcttgtactttttgtcaagcaaatacttgatgaagttggctccgatgaagcctgcggctcctgtaactaagtatgttttcatatttcttgttgttttttatgatctttgtctttaaccactttatcgtaagtttccaaatattcctgattcttttcctttcgttttttctgttctttgtagtcagaatagatgttgagcaacgtcatggtcattccgaacaaggcactctcaatcataaaatttggccaatgatattcactaccccaatcgaacaggagttgtaaaccataataaacgcctgtcagtacgataaattgaaataaataagtatgagcctttttcatctgtgcatcatggaatattgttcttatcacttaatgtaataacttcacaatcggtgaatttattgccttctatggtcaatcttatcagcgttctttcacggtgccagccttgtaagcctgccgcaccgggattgatgtgcagcaagttgagcgttttatcgtatagcactttcaggatatgcgagtgcccacaaacgaataattgaggtggagaagcaaaaagcaagctgcgtatttgtggggcgtaattaccgggatagccgccgatatgggtcagcagcacatccacatcttcgcacttgaaacgcagtttgtcacggtacatccgtcgcaagtcaccaccgtcacagttgccacaaacagcccttaacggcttgatggcagccaatttttgtaccacctccaatgagccaatgtcgccggcatgccatatctcgtcacattcggcaaaatacttctcgtacttgtcgtcccaataggcgtgcgtgtcactgatgataccaattcttttcatttacgccttacctttctttagagttatatccaaaccgcattcggatgtagtctcctatgaattttgctgttttctccaatcccatgtagctcgagttgatgcagaggtcgtagctacaactgtgtccccacttctttccagtgtagtaattgtaataagaagcgcgctcactttctttgtcaataatcaacttctttgcatccttttcatcacagcctaatcgctgacaaactaatttgatgcggtctttcatgttggcagtgatgaagatgtttacgacgtttggataagttcgcagcacatagtcggcggctcgtcccacaaaaacacaactgccttcatcggcagccttagtaatcgcttcgctttgaaactgaaacaagccatcttgtgagaatttattattgtaaaaattattgtcactgataagaggagcatgcatgctgaataaggtttgaaagaatcctcgttgctcatcattctgctcaaaaaacttctcactgaacccactttctttagcagccaaattgagtatctctttgtcataaaactgacattcaaactcatcggcaagcagtttggcgataatgtgtccaccactgcccacttggcgcccaatattaataatcagtttgtccttgttttccattggtagattctttatgttgtattttgaatttcttcatataaatcgtcatcattatcaccgctacaatcaccgccacaaggtctgatgcaggtaaagcgctccatacgccatctattccaaacatgggaggtaagatagccagcagaggtaataagaaaagtaactgtctggataaagacaggaaaatgctaatttttacttttccgatacattgaaagaagttggtaatcaccatctgtgccccgacaacagggaacatcagcaggtcaatgcgtgtacctttgatagacatcgcaatgagtgtcgggtcgtttgtaaagagacgcacacaatagtacggtataaacatggcgatagcccaaccaacggtcatgataaccgtggcagctataatggataactctaaaaccctcatcacccgatccaactgcatagcaccgtaattgtagccagcaataggctgcattccttgattgatacccatgacgaacatgatgaaaaccacaccgatactattggcgatgccataagctcctactgccatgtcacctccatagcgcacaaactgattgttcatgaaaataacaatgatacaagcgcaagcgttcattaggaaaggagagatgccaatgccgacgatatttttcaccaaatctgatttgaggcgatagatacctctttttagatgtaacaactcattggggttgctaaacaacttgagctgccaaaccaatgcgatggcttgtgaaataatcgtggcaaaagcggctcctcgaataccccagccccaccaaagaatgaagattgcgtccaaaatagcgttcatgaccaccgtaaacatggtggcgtacatggcttggttgggcttgctggcagctcgcagcacgttgttcataccaaaatacatgtgagatatgatgttaccaattaagataacttccatatagtctcgtgcataaggcaaggtattttcactggcaccgaaaaataggataatgggatctaaaaagagtaaacagataattccgaaggcaagtcctataataatatttaatgtaacagagtttcccaatacattctcggcaatgtcgtagtccttctgtcccaactttacagaaatagcagtagacgctcccacaccgatagcagcaccaaaagcggcagacaagttcatgaacgggaaggtaatagctaatcctgaaatagccatgggacctactacctgtccaataaagatacggtcaaccatgttgtacaatgaggatgccgtcatggcaatcacggctggcatggcgtattgcatcagtagtgcccctacaggtttagtacctaattctaatgtcgctgatttattatccatgaacatctccttattatctttgcaaaagtacgaaaatattctatactttagacattaatatgaagataaaactaaccacctgttgtcctttcatttcaaagccgtagcaattagggcgatagatatcatgtaaaaattgatgtgtgtttatccgaagaaagagagtcggtattaaaaaatggaagtaagaaacgttccgtcagaaagtttcttacttccaaggggtcataaagagttgtttcactattatttgaaacagcttttattatttggtttctaccaagataggtctgatacagtttccattattagcatcgccaccattttgattaatgtagaatccatcgcggtcgaacgacacttcaaaagcataattatctgttttatcgaacagtttgcttgtccaataataaccaccatatccagcattttttatcttgttttcaaagcgataccctgctaatggcaaaaagaggtttttctctacttcagctttcgagaactctttaggtatggtatttgttttgccaatatctccagccgcttctgtaatcagacagccataaagttgcttgccattatctaaagtaatataacctaactgccaatcgcagccatcttttaagtaattccagtcggctttagatggcatgcgccatttgcctttggtagcccaaaatgccaaatcaccatattttgcttcgtcgaagttcttggtctcatctttacaatcaatatctttatacatttttccagagatgttgtagatgtcccaagaactattaccaaaggcctttacaacgtctgccccctgtgttatggctgcattgcctaatactccccatctgaaatgatctacttgcgtatcactgaggttacatttggtatttccttcgccagctcttccatagacagcattgaagtactcccattggttggcagcaattctccactttccattatcataaacaagattccccattgcccattttttaccgcccatggtaataaagcgtggttcatcttgtggctcttcctccttgccttttatctcttcaaacacgacatctttgatttcgcttgttgcaatagtaagtacttcaccgtttactttgtttaccttcatgttgtattcttgagcgttgatactcatcgcaatagctgataaaacaaacgagagaatgatttttcttttcatattttttgtgaatgatggtttataatgttttctataaaagttatttatttacaattttaattacatttttatttgaatggaaaatgtaaacgccatgtggcatggttgagacatcaatatccacacaaccttgcgaatcggctttgtagtgtgctacttctactccgttgagggtgaaaactcttacgacagatgatgatgtaagcccttgatacatcacatgtccattgagaacaattggtttctgcgcaacagttcgttcttcttcaatgtttgccgtgattttttgttttgagaaataatagcgtacgacttgattggtgaccatttcttttgtttcattggaattgtcagtaatcaccaaatttccatccttaaaagaaatgacaggttgtttgtccataccaaaggtaacaaaacttttgtccttaaactcaatggtcaaatattctgttgccattgttcggaaaggcgtaatcatgaacaaaacgcatgacaatacgagcttgtaattaattttcattttatacgttgtttattttattataattgtttatctaataagtatttgtcatatcctccggcacacaaaggtaataatctgctaatcccttgtatgtatcatctaaaaatgtaatatcttcttgtcgtacagtacgtagcgtaattatttttttcttgggggcatatttccttaggtaggtgataatgccattgttgccatcagagtggatgtttccatttatatgcaacatcttaggcttggaggtttgtgcgatatgccatgccattgttgcatctttgagtgcctgcgcttcagaaaggtggttgttatccttatttgattttccaccacccaacattctcatcatggcaaatccttgctcggcttgtgggtttggttcgtagggaatgggtaatggagggaaatactgcttagcttctttagaaagtgaatcaatgaatgctaatccgtgttcttttaccattgccgcatatcttcttggtacatttgttgccacagttggtatcttgttttcacgtgcgaagttgacaattggtgcatagtcggtaacataattgggccatatacgcgcctcttcttcgaatctgtcagagaatataagtccttgcagatattcattaagaatgagttgattgtcggcttcgaacatctccatgcctaatgccaaattgtttccatgtaccaaatagagtgattgcagaatgcgtaactctaaccagtgagtaatggcacaattatgtatctcgcctaaaaatacgacgtctgcctttgatagttgttgcaccatttgttgataatcgatagctttgccattgttgtcatataatcgatacgcatcataggttttctgttgcgcatttacggccatggatcctgctgctactataacaagtagaagggatagaaatttatttttttgtttcatctgtctttattagtactattcgtttgtttaatttgatatgttgcttaaacatttgttgtatttcctgtggtgtgatttgttgtaagatagattcgtaatggttgaagtcagcaatgctctcctcattcttaatcaatgatgtgagtgcatttttccactctacgggcgtgtcgttggatagagcttgctgcttagctactaaaaacgatcgcttcattttttcaagattagctgtgcttactgcagtgtcttgaaattgcgtgacgatgttgcagagagtttgttcaaccgtttccagattgttcttttctgcatcaatggtaagttgtaaatatgctcgttgttgtgggtatccatcgtaaaataaatcgacgtaaggtgaatatacgatgtgaagcttttctcgcaggatatcgataacgcgctcttgcaacaagtcacgcattaatttcatgcagagagacgttctcaacccaggatgatagttgaagggaagtaccatatagagtgttcccttttgatgactatcactgtctatgaatgcttttcgcacctcattgtgtggcaaacttataggtcgattgtccaaaggcatggcatcttgttgaggcatttcagaaaagatagcgacagcttgcggtatgatttttgtcaaatcaaatccccctgttaggatgattgatgtattgcgcaaatcaccaaatgtacgcttatagtaggttgccaacgtatctaaattaagctgttgccaatctgctttattcattaaaaaggttttatctcttccgtttccaaccaatgaatcaatgcaaatatctatgagtcggttggtgtcacgtttcatcatacgctgtaacaaggtctcttttccattatttgctatttctgattgtttcagattttcgaatagtagataatctaagcctggatgcattattttttctctgatcaaacgaaataaagaagagctatagcagactggtccagaagctaataattgatgccaatattggtctactcccaaagccattgagagtgatttttgcatcatgatgtcagacagcgtgtcgtttggcaatccttgtataccacccaaatccacataagcaatagcatcgtagtagcgcttttgttgtagagttgtaaggtctgccattccgccacgtcctatccatgcgatgtaaatggtagagtcggcggtattggtaggtttgagcaataagcgtattccattggaaagtcttatatcggttacctccaagttttcatggtagttttgctttgttattgctccttttgcaatctcgtactttttcagatcccattcggggcgttgtatggcagcacttggagaacatggataaggtggatggaatgtgtatctttccatgttttgccgttgcccttgttgccatgcttgtatgattgcttgcttggacaatgagttgtcactatgactattgtaagctattaggcttgatcttcgcatttgtttcaacaggaagcttaaacgctttacgatatctttgctcgtagttttacttaatagcactttcagttgattggcttcttgattagagtaaattcgtctttccccaaaaataacataatcgattagatcatcgcaaatctcagtagcagttttgtcttctttttcaacaatcattttttcttgttgctttttgatgagatgttgaagttctatggagcagacaccttgcttgacaacacgtctacattctgctgaggcagctcttatggattgtagcaatgtgctgttatgcgttgatgaaaatgagaatgtaaagtgatttttatttgctaaataccacgagtcatagacttcgcaccttgttccgctttcctttaatctgttgttgagtaaagaacacacaatttccatgcgtttacgttcaagcatgttgtgcaggttggtggtaaaaggcatgacatgtggaattatccaatcaattttttgagtggtttgtaaactatcggttaacaccatatagttgatgcctttgctgtaagttaaaggataggtgggaggtggagtttgcttgttagtgtttggaagatgtcccaatgttgttgatatcaaatgcttagcctcattaacgtctacatctccaacgatgataatagttgcattatgaggcttgtaccatttgttgtaatattgtagtaatgctttaggcgttacagctttaatttcttgttctgatcctaaaggcatacgcttagaatatcttcctgttcctatttttagcgtataaaaatcatcaggcagagtataactgcgaagttcttctataatggtgcctttctcattttcaacatgagacgttgatatatcaatagcgccaagccaatcgcttgccgaatgaagtgctaattgcagtatttcaaaacgttgttgggcactggtgattggtagagataaggaataaatggtacggtcgaatcctgtaaacgcattaatatctcgcccatatttcattccttgcgcctcaaaagcctgtatcatagtgcgattgggaaaatgtttagttccctcaaacgctaaatgttccaaaaagtgtgcgcatcctctttgttcttcatcttcaaccaacgagccaattcgcataatcatccgcatttctattttatgcgattgatttgtagtaggtacaaggatataacgtaagccattggtgagtttcccctcaacagcattggaggaaaggggagggaacgttgtgtcccccgcccttgatatagaaatagaaataacaagtagaagtgataataagcttattctacaagttgttagttttatgtgcatatacctttagggtatgatgttatgaaattcttattgctaatagttgtcaccgcttcttaatagaagaggagatgattctgttttttaaccaatattaaaaggtatattctacatttatttgtgtgtaaccattcgcctcatcaaagtcccatggaaatgtaaaagacatcttccctcccttgaagtcaagaacagaggtaggcttgatgtagtcagacggatcgttcttatatgaatccttgtctatggtgctatatccgagccatctatttggggaaatacttccacctgcatcaattacatcttggttgatcaatatcgtttgctcatggtcttcataaggcaatttgatagtaacggagacattcccttgctttaccatgttctgcaaacggtcccatgcagagaacttgtatgaaaaaggcactactgttatttcgtctccatacatatccttaccctttcctaagaaattgatttttccatctttaatattgagttcaatgttgtcaagagctgtggtgaacgcatctttcttaggatcaaactttactgctttcacaactgccaaaccattaggttgttgttggaaaaattctgtatcctcaaccgtcttctttttaagtaccatgtagaaaaaatcgttaagtcccattgcattggatatcatctttagaacaggtttgtcggcagtagccttttcgctgagtgtaataatggtgtagccgttgaatgtttctttctctttacctccaaaatattgttctttgtcgtttgcattataactaacacttgcttttacctttactttaccaaggatgcttgtgaggtcaactccaaacttttctttataacccttgattaaagattgttgtgcttctgttaagactggaatatcactatcttgtcgaatgttaatagtcacaggctttaataattttacgttatcattgtttatgtgacccacattgatggtaatagaacgaactcctttaactaaatgtttgttgttggatttgatagtaaaggtttgaaccttttcacctttcttgaaaacaagattttgtgtagaaagttctacaatgttgtcatcgtttcctgagaccatcaaattggcagtaacgtcttcctctggtgtaaaggataaacttgccttaatcgtgatagttgtattatcatcttctgcaatctcatgaactccttgtagttcaagatttagatgatttgtcatttgctcatccttttcctctgtacaagagggtataagcaaaagtgccaaaagggctactaatgtaaatttaatggttttcattgtgtaattgttataaaaaattgagttatttttatgagatatttgccagttccgtgttatgtcttttagtgtgatgtcatgttagacgatatcacctatttttcatttgtcatttgtataataccagcctttgttttggttgatttcggcaagattaaagcggtattctgcttttggtatagggaaagtccaccgatagtcgtcttcagatatataagcggaatgtccctcgccccatagagttaaacgagcaagcggtttgttatgtgtacgttttaagtcaaagtaattagtgccttctccaacaaactcttcgtatttgtcgtaaaggatagaatcgattaaatttttgccattcaaattttctgtgagcatgttctttccagttaattttcgataactgtttatcgttgcaatagctttgtgattatttcctatttgtgcataagcttcagccaccatgaagataagacctgcccgccgcatcttgttaaggtaggaaacaaccatgttatctttttgtaatttgttatatttacccaagagcatgacctgtttgttgtacatcttcttgggtataatcgccatgtcataacgtctgtctgatttgtcaattgcaaagtttgggttgatggcaaataaatctcctttgtttctgtcgtattccaaattagtgaaaacaggactatccatataaaaagcaaaaatacgttctgttgaattcttgtcagtccataaagaatggtattctttttcatatgagtccgaccctaacttaggcatggtagaaaacagcgggacagcatactcgagaactttatcccattgtcccatataaaggtagaggtcggataataagtaatgggctgcatcgttcgacatccacatctgatttttgttgttaaagggatgtttggctgtttgcagtaataaattctcgatataactcgtacattctttgatagaactacgttgtttgttttcgataccgagtgtcgactttagtatgattcccatgtcgtctgggtttctgtcgtaagctggagcatatatcttgagtaattgcaaatagcaccaagcttttaatagtttgctttccgaggaaatattgatgatttcttgcctgtcatcttctttttctatctgcacttgtggcagtcgttcatctaaagcatcacagatagcaatgacgttataatatccaagccaaagattcgtggaaagttgtgtgatttctttaggacgccacgcatacaggtttgttaattctacattgctgtgagagagtgacgtagggcaaaagtcattgcctaagattgaaaactccaattcgtaatgagggtatgccctatatgctgaagttaagagtgaacgtgcattttgaacgttagtaatcgcatcggggtctgaaaacatatccattggcggaatgttgagcgagcacgatgtaaatatcatcgcagaaatgatataatgaaacaataatatatttttgcgtgttatcttaaacataatttcaaaatgttaggttcatgttaaatgtgaacacaggttgaagtgttccagaaagttttccactttctggatccgactccttaaaggatgtccatgtatagagatttgaaccttgaaatcccactgaggcgaattgtaaaaaaggtaaatgcttttctaaccattttcctgcaatgcggtatctcaatgacaccatggataattttaacatgttgcttgaaccaactgtgcgagaggttgcatacaaagccatattttcttcagccacactgtttgcgtaatagggtgtgggataaattttgtgttcatctccttgcttaaaccacatgtgttcagtaagtccagcaatagcattcttgtttgcattgtctttattgcgcacgtacttgtaatcaaattgacggacacccgaaagcgtgtagtaaaagccaacattcatttcaaattctttgtattgaaaatcaacattcaatcctccgttgtagggtggcgtgagatgacctaaggattggaaatcagacttcgtaagaaattcgcttgcttgtttttccttgccgtcaggagtcttgaatactggataaccagtaagaggattgatacctaatgaatgaagcccatacagcatatcgtacgatttacctacctcgtaagttggcagtatatcatcttcgttcgtatataatcgattgccgtcatatagatcaataactttattgcgattatagcaaaagttggcacgcaaatttaacctgctgtcataattgtcaataatcctaacgttaaagcccaactctatgccgttgttttgtaatattccaacgttgcgtttcatcaattgaaatcccgtgcttgttgcaataggtacatctaacagggcttcttctgttatgcgattataccaattcgcatcaaatgtaatgcggtgaaatagttcaagggttagaccagcatccattgatttattttgctctgctttcaagtctttattataaagcataagtagttccaatggccttacctcatcatagcctttgttggaaaatgagaatgtgccaatcgtttgtgatacggaaacaccattaagattagctgttacgccatacgatgcttttaggttcagtgcagatattatcttattgcccttcaaaaaaggatagttggttggcgtccaccctattcccgttgcccaagcagagttccaacgtttctttttgggaagaacggatgacgcatctgctttgtaggtagcgtaaaagtcgtagatatttttaagggaatagccacctaccactcctatacccaattgtgcatttctgtcatgtgggtttcgtatctcaggttgcctaagcccttgcagcgaatggtttatggcagaaggtgagtctatattacccacaccatatcccgtgatgcccactccttcattgtcgtaaaagtaataatcaatattcgcgccaagggtaaggtcgtgtatgtcattgattacttgattatatgttgctctaaagttgctcgagatgtttgttgtcgcattttgagatttgctgtatatcccgcgccttaggatagggataccttgatgctgttcactgtaagaggtagcaggagtaaatcgatgattgttgccaaagctcaaatcagcacctgcaatatatgccaatgttagtcctgcaaagggagtaagagtgaggttggcggaaaaccctacgtctttatctgtatggtcttgttggaattggtaaagcaagtctttgaacctttgtcctgggtatgaataaagttgcgatgaagttgtttcgtaaggattaaggttatacaccaatgaagttggatcgaaggttgtgccagttggcgtattcgtttttgcgtatgcaccattgactcccaacatcatatagccaatctttcctaaccgttgatctaaactaagacgtacgctataacgttgtttgtcatttcctttcattcttccaccttgattggcatagttcgcagaaacataatatgtcgttgaattattcccgcctttcaagctgaagctgtggcgttggtagatattattatgtatcagttcgttaaaccagtctgtgtcaattttccgtaattcattaagatatacttctccttctttgataagttgagtcttatcaggattatctgcctcatacttattataatagtcagcactaaaccgataacctggtgtggcaggattttgtaaaagtcgttcgaattccaatttttcactggaattcattagtcgaactcctcgttttcctcgtcccgtaattccgatattgttgctgtaggaaatggtaagtttaccgcaatatccgcgttgtgacgttatttccaaaaccccattagcagctttaacgccgtataaggcacatgctgatgcgttctttaacaccttaatacttgcaatatcttgtgggggaaggttataaaaggtttcggcagctattattttcccatctaaaacatacaatggttcattggtcatattcccctttctaaatgaagagtttccacgtatgcgtatttcaggggctttacccaattcccccgtattagaaaccattaaaccaggtaccattccttgcagagccaatcccatgtcaatcattggcttgtctttaagtgctttcatatctacattaaccactgcacccgatttagctcgtaagtcaatcgcgttgatattgctcttcgcacgtattacgacttcatttatttgatttacatcttctgacaacttcacgtttaggcatggtgcgttgtctttacatttcactttttttgtagcatatcccacatatgagaatgttacagtaaaagagttttgtcgtggaatacttaataaaaatcgtccttcgttatttgtaacagtcatcgtattagtgccatccactttcactgacacgcctattagaggctcgttatttgtgtcagtaacataaccgaaaaccttacttgtttgagcatgagtattgagaatgccccctatcatacagagcaagacaaaaatactcttcttgcatggtatgttcccaaatagcagcaaagtcatctgtacgattttggttgctgttgctgtgtgttttggcttaatacgtaacatgtatgcactatttaactaacggataagattgaagagctatttcttgctcttcaaccattgtgtcgtttcttctattacccaattggcaattaaatcggatgatgctggcaaaattccctcattgctgtaaactatttctacgccatctttggttagctccgcttgtttttcctgcatgttgtgcctatctgccatacgtttcacgtctgaagtaagataaatgccctgtaccaatattcgctttttgtgttgtgcggcacgttttaatattgggagtagttcatttgcgaagtcatgtcccatctctatctgtcgtgcatcggtataagttatcttgctgttatctttgatgtatttttgtacatgttctaacatcatgttccaaaatccaatacgttctgggtcgccatgtgcaagaaataccacggcttcgtttgcctcatctttcgacatcgcttttatacgttgtaacatcgtcttttctaacacgtagctataatagaatgttggtcccatgacgataggaacattggtatgaaccatctcggtattttcctctgccaactcttcgcgtacatatctattatacttcatgccgagaatattaggtaaatcttcttcggtgtgacttgatggagctatgaacaaaggtaacgcaaagatggtatcggctccttgtttcaaacaatcctttactacagtggctactgaaggttctgtatattccatgagtgccacacgcatatagtcgataccttttacgggatgagttgctaatttttgccgtacgattggttctaagtccaagaccggtttgcgccaactgggcataggtgagccatgcgctattacaattaacgcatttttggcttgcatgctaccaactattgtcaatataaatgttaatgctaaaagtttttttcttaaatttttcattttcaaagatgatatataaattagttatttcattatcccttcaatggcatacttatgcatgtattttttgaatttgcaaaggtaacagctcctaattgttaaggcaatacctaaatatgatgatttttctctaaatcattgctggttagtttctcttgtatctccagcagtaatgtcatttaagaaatgtaactttcgaaactatctgcctgtgcatttttattactatgcatcgcctttcaaaataaaattgtatttttgtatgtgaaatgtcaaagcaaatgaaacaaaaattaacgctttatgaactcaacgaactggtgagcgaaacgctccaaactgtcatgcccgatgaatattgggtagaggccgaattgtctgaggtgcgcgaggtaagagggcactgttacatggagttggtgcagaaagatgagcaaaccaatacgcccatagctaaggcttcggctaagtgttggaagaacaagtggatgttgatgcgaccgtatttcgagcgaatgacagggcaatccttacgagcaggtatgaaagtgttactcaaggtctatgctaatttccacgaggcttatgggttctcgtggattatcacagacattgatcccgtttacacgatgggtgatatggcaagaaaaagacaagaaatcattgcccaattaaaggcagagggcgtctttgatttacaaaaagagctcaacttaccactctttgctcaacgtgttgcagtcgtttccagcgaacaggcggcaggctatggcgatttcttgcgacagttacaagacaacgatgcaggactttgtttcgatgtgcagctcttccctgctgtgatgcaaggcgagaaagttgagcagagtgtgattaatgctttgaaccaaatcaacgatcaggtggacaacttcgatgtggtagtcattatccgtggcggcggtgctaccagtgatttgagtggtttcgacaccattttattagccgagaacgtggctaatttccccttgcccattatcacaggaattggacacgacagggatgagagcgtactcgacatgatttcctttcaacgagtaaagacacctaccgctgcagctgcctacttggttgaacatttgagaaacacttggcatcgcattgatgatgcagaacaggaaatcatacaaattgtaaggcatgccatggaacttgagaagaaccgttttgaccttcttacgagtaaaatacccttcctcttttctcgtgttaagctccagcaattgacgcatttgcagcaatgccaacagcgtttaactacttccgcaaggctccatatacatcaggcacagcaacacatagagattcactctgccagattatcccccactgtccaacgtctgctccttgatgctcgtcatcatctcgacttgttggaacagcgttgctcgttgctcgaccctcaacttttactcaagcgtggctatagtattaccctgcaccaagggcgagcagtgcgcaatgcacaccaattaaaggctggagatgagatagaaacacgtgtagagaagggaattatcaaatcaacagtaaaataggatacaagagagaattgccgctctgttcttcaagaatatacggagaaaggcaactaaaccgtgctgacactttcgtgtgggcgacagctcgttggacgaacatctcactataacttcccgctacaatacgtcatttctgcaagttcgcaccagcctgcatcttttatttctcgaaggaatagacgtgcacacatctcggcatcatcgccagcccgatggtgagtaccttcgggaatttcaaactgttcacagagataaccgagcgtatggcattcaaaatcgtagtgatgacgtgcggcacgaagtgtacaataatagtcaacatcaagtgtatcgaggtggtacaactctaatgatttgcgaatacaggagatgtcgaaggctgcattgtgggctacgagtataggcgtttcctttagataggtcaatatttcttgccatacgcatggaaaactgggcgcattctccgtatcttcgggatgaatgccatgtatctgaatgttccaatatgagtaggcattgtcttcgggacggattaaccacgacttggtttcgacaatctttccgtctttcaccacacatattccagcttcgcaaacagatgctcgtttgcctgttgctgtttcaaagtctattgctataaagttcaatccttccatgtcaatccttgtaatatgagagtaaggtgtttgccatatttcgtatttggtcacgcaatttctttggctccaacacttctatctgatctccttgttgcataataagttgcacgaagtcgtatgtcaacctcacgtggtatgagaaagtggcagactcttcgcaggtttctatttcattttgagattcatgcagcggtagcgtgcgaaggtagtcaggcgcttgttcgtaggcttttaagacgacacgttctattggttcgtcgcttggaatgatgcctgtgcaaccttcatagaacttctttatgtcaaaatctgttttcatttcaaaggttttgtcaagaatcgttgcctctatgatgcggtcaagtccgtaggtgcgtatttcctttcgtggtgaatacccctcttcttctttatgttttttattaagtgccgtgtagtaagggttgttggcaatgacataccaacgtcgctttactactttcagacaatatggctcaatctcgaaggtgtttgggaagtccttgccaaagccttggtgtgtaattttcatgactttattctcgcgcatcgcctgcatgaaagtggtaagccatgtgtttcctgatgggatatcctcaaacactattcggtctttcaacttgctgtctgcctgaatttggttcaaagtagcatacgagtcgatgagccaactacgaaggctgtcatcttccagttcgattgggttttctatatgatatttataacctttcacatcagggtcaagctcaatggcaatattaaatatgtcgtaaatggctttcctatgattgtgaaaagtacgaagaggcagctcatccccttcaccatagctcaatccgctttgttgccacttggcgttaatctccttataggaaaggtgtttgtagcgccgaagtgtatccacaagccatacatatcttccaaattggtttgctggcataatgcattaggtttttattgattgcaaagatacaaatagctgctgacatttgtcccactgcttgtttgttatttgttttctcgcttgtatcgccattgagcatctttatcaaaatcctatacgtcttgcatcgtttcgcttgatacgctcttcgttacatatctccacaagcgattggagcgtaggcttgttgccatgaacgatttcttgcatcacagccttcctcacaatattgtctatctgtccgccactcaactcataagctgccgccaacgtttgcgcatcggttgccaaaagcgtaggcaacttattcatccagatgtttttctttgcctcgatggaaggtttatcaaaatgaatcttgaataagaatctccgctcgaaagccctatcaagattgtccgccaagttggtggttgcgataaggatgccattgaggttttccatttcttcaagaataatgttttgaatggcattctctgtctgtgcaacgctaccattgtttacatccttacgcttggagaaaatggcatcagcctcgttgaatagcaggataggttttagcttgctcttggtgcacaatcgccgatagtcggtaaaaaccttctttatgagtttctcgctttcgccaaaccagcatgttttcgtggcactgatgtccacgtgcatgatagcgcgccctgtagctttggctatctgtagcacgctttcggtcttgcctgtgccaggctctccatacagcaaaacggcaatgcccgtaggcaaattgttcttttttattctgttgcagagcctttgatagtacgcttcctctaaactattgcgcagaagcgacaactgcttttcaagtgctggagagaaaaatagtttctttttcgttatcttgttgcaagggattagttgcttttctgacacctcactcataaatagttccgcatcttcgcccagcaacatctctttcgctttgtcggtcatgaccaatagtgtattctctccaaataaggagaagtttgtctcaatcacaaccaattcctttttctgcagttcacttcttttgtccttgaaatcttgcaacacctttttccgcatctgacgagggtagatagtcttaaccgcaagtgacaaagatgtttcttcaccgtctatcatttcttttgccacggtgtagaaaagcatcttttcgaaggcgtcgggtatgaggttctgtattcttctcacctcagctaaatgttggtttgtctgctcataactatgcactgttttattgataatgcgagtcaccatctcattcggtcggttgctgttgtagcgttttgaggaatgaaagaactcgtatatgccgttgacgaacgaatagatgtcacggtatttatacaacttggagaacgccacgaggtcttcagcatagaaaaattccttccctttatccgttagtaacaggtcttcgtcataattgtcatccaactctatcagttccaaggtgaagagaacatgttttcgctcgacaatcttctttcgtgtggcaatgcgttcgctgatgttgctgtacaaatctttcaaggtagtatttagatctgaagttccatctccatcttcttggaaattgtcatggcatatatcgtagaacagaattcggtccacaatgttccctaatttatccgttagttggcgtacaaacgtaagatgctggcaacatttctctaatttttcagcaaacaatatcagttcattggtaacaatgttcgggctttctaccttttctgctattcgtttgcaaaactcatacttatccatctgcacctcttctatcgtgtcatgacggatctcaacaggcttgttgtcaatcacagcagatactacagcatcgcatacgctataattctgcttcaagatgttttcctcattcctacccctacgcacaaggatacctttgctttcgagcgatgtgagtgctggcacatactctatcatgtctaatgacgaacattcgaaatagctggcaagatcgtccatatcggatattctatcgcgacaagtcaggtcaaactgagcaacaaacaagtacacttctcccattgtttccaatccaaccgattgcatcacacctttgaaaatctcttgtgtcttggctgcacctaaccgctgtaatttgctatccaccaatttctttgcagcctctttgatgtactgaatgcttgtttttgccataattctctactattttttgtgttgatgtggcaaagatacggtgcagggtatgccaaaaaagtgtataggttgccaaaaagttgaaaagtgttgcgttattttttcctgctcattcttgataaaggcaaccgctgtttttgtcctgttattttaccaaaaaacggtcatctaaaatcttcaaaatagaaaaaatcaataggcaaacgaactgcaaaaatgggttgattttgtcaaaatcaatgccttttcaagctgaaacattgatttaacggtcttggaaacatgtattagagctgttattcacatgcttcagcagccttaaagcatgcaaattgcaagcttatctcaatgctttaatcgccaaaaaaggatgaaaataggaagaaaaagagcagggttaaatgtaacaacttcaataacaagaggttatgaaactttcgaataactcgcgtatttgcgaccaactttggtgttggatgttttcacgcgagttttgagaggcactttgtaaagataattcagcatcaataaacacttaaaatcaaaataaaaaaagaattgaagagcgacttttaagtctgcaaatctcgcaagattgtttctcttgatgatgcaaaaatgtgtgtctccacctgtgacctgataatgattggattgctattgtacaaaagagccaagcgctatttaacgacaagagccgtgccttaaccattatatatataactactgatgtgcttatttctgattttattcgtatttttgccatatcaaccatgggactggaagggacatcagactgtgcaaatcacatggtgtgccgtgtctcatgtcgagggtcgtgtcgtgcaaggcggcatggtaatatcttttatcatatagcagaacagaaaaatggcaaaggaaatgaactacgaagaggctgtgcaacagttggaaagtattgtgcagcgcatggaaaatgatgagttggacattgatgaactgaccacggaacttaagaaagcccaacaacttatcaagatgtgtaaagcgaaactcaccaaggtggacgaagatattaagaagatactttcgcaagacaattagacttgtaaaagtacttttgagaggtgttgcccaccctattttttacaactccgtgattcttggattttgatgcaatgctttcacaggcttgtctacgtgggtgaacatgacaaaggaacgcgaatttatatattgcagaccatcagtgcattgtaaaaatgtgtttgctgtctaaataggttcaccgcaataagcataatagtcgtttggctgaaaataaataattgcttacctttgcagtatagcaacaaccaatatgggcaaaggaaaattagcaaaatttgctgaaatggaaacatttgaaaatgttttccaatatccgcattcagtgatagagcaagtgccgtttgaaatgaaagggcactggcgagaccaatatttcaagaacaatcatccgatagtgttagaactgggatgtggaaagggcgaatatactgtgggattggcaaaactgtttccccacatcaacttcataggagttgacatcaagggggcgcgtatgtggactggtgccaagcaagcgatagaacaaggacttgcaaatgtggcatttttgcgtaccaacatcgaactgatagatcgtttcttcggtcaagacgaggtacaggaaatatggctcacattttcagatccgcaaatgaaaaacgtgcggaagcgactcacaagtacgtattttatgaaccgatatcgatgctttttggtagatggtggattgatacacctgaagacagactctaactttctttttacatatacccatgccatggtggataaaaaccagttgcccatcgttcaaagtacagaagatttgtatcatactacagatatggatgaagcgacaaagcaaatattgtctatccagacttattacgaatcgatgtggatagcaagaggattaaacattaagtacttgaagtttaagcttccccgaaatggcatgctggaagaacccgatatagaaataccccttgacgactatcgcagctatcatcgaagcaagcgaagcgataagacagtgggtaaataaacatgttaaataatagaatgatttgatataaataatgatgaccatatatcctaaactgattacagatgcactggcaacggtagtgtatgctggtacgaaaaagaacttgatagacagcgaaatgctggaagatgacgtgagaattgacggcatgaaagtggagtttactttactattccctcgagagacggacccatttctgaaatcaacgctcaaggctgctgaagctgctattcattatcacgtttcgaaagaggttgaggtgactatcaaaacggcatttaagtctaccccacgcccaacggttgataaacttttaccacaagtaaaaaatattatagctgtaagttctgggaaaggaggagtgggaaagtccacggtctctgccaatctggctatcgccttagcacaattgggatataaagttgggttgttggatgcagacatctttggtccgtcagttccaaagatgtttggggtagaagacgcacacgtatattcggtagagaaggatggtagacagttgatagaacccatacagaaatatggtgtcaaacttttaagtgttggtttctttgtaaatgctgacacagcaacgttgtggcgtggcgcaatggcttcaaatgccttaaaacaatttattgctgatgctgattggggagaccttgattattttattttagatacaccgccgggtacgagcgatattcatctcacattattacaaacccttgctataactggagcagtgatagtgagtacaccgcaagacgtcgctttagctgatgcacgcaagggaattgatatgtatcgtaatgaaaaggtgaatgtcccgattttaggattggtagaaaatatggcttggtttacacctgcagaacttccagagaacaaatattatatctttggaaaagaaggatgtaagaggcttgcagcagagatgaatacgccgctcttggcacaaataccattggtacagagcatttgtgagcatggagatggtggtgaaccgtcggctgttgatgtgaacacgatgacaggacaagcctttctgaacttagcacaagcagtggtgacggtaacaaatcgtcgcaataaagaacagaatcccacaaagagagtgcaggtgaaataattcaaaagagttgcatctccactgggcgattgaaagttgtatcaacacatggggcaggtgaaatcattcagaagaactgaatcttcactttccgaggactgttcccccgaaggggattcgtgtcaattctgaactaacgaatctgctctttatcttttttgttcttgatagatatttgtttcaggagaaggattcgtaaagagaatttctccaaggtttagtcgtttcccttactttctttagctgcttttgccttattcttcaaatactcgaagcggtttatcgcttggcgacgagtatgaatgatttgataacgatacacaaggcaagtaagtatgaagtaaactaacacctgtatccacagtgcttgatattcagtacggatgtcagccaacgtagctcccatactatgaacacgtaagaatccccgtacaccaaaggtagaggggaaaagagtcgatactccttgccacatccctggtatgttatgctgcggccatgatatcccagtcatgaacaaaaggggtatggatgtgaagataactaataggattacgttttctcgatagcgtacgaggcacgataatgtcattccaaaaaatatactggcgagtatatagggaacgaggagtccgatgagggagtgtcccgttgctaatgaggtaaaaccaaaaaacttgggtaccgccagtgctaaataagtaccgagtacgatgtaaagcatgaaataggccatggatttccctaacacaatacgaaagatgccattataatggcggctgataggaaccagatcttggtatctgttgttctctcttgcagtaccagcagctaagccaatgcccaaaagtagcgtttgctgaataatcatcatcagcactcccggaatgatggcattgccatatcctcccgttgagttgtagatttgtacttcatctacagcaagaggttgggtggcaatttcatcatctcgctgcgtatatcctccagtctgttgtacttggagttttgtgttttgactactggctgcagcttgtgcgctttgtaaaatggctttataagtgagcataagactcatgtcacagtacacactcacgtgtgcttgctcacctctatatatcttttttgaaaagtcctcgggtatgtaaacaatgccatgtaccacctgtttggctaccaaatcttgcgcttcagggagactgttacagtagtaagcaaccttggtgtctggtgatgcgtcgatagtacgaatgaaatctcggcttaactgtgagttggcatagtcaacaatagccacaggaacgttccttgtcacttcgttattgtaggcccaagaatagagcagaggatagagaagtggtaccaagatgcagaatatcaaaacaccctcgtcggtgaacgatgaacggatttccttcatccagatgtagcacatatcctgtataccttctttgattctatataataagccgtcgttcattgtaatgttttgctccttgaattatttaacaggttgtaggtttttgacctaaaatgttttatggaatgtatttataaataagcatcgctcgtttgatgtttcgcatcgtaaacacgggcagaatgatgaagatgcccaacgccaacaagttgaaccatgcatcggttaacggaaatccattgaagatgcacatctggtagagcatgtaataatgcctaagcgggaaaagttgagccattgcctctatcataggattcatagagaatactgggaaggtagcaccactggtggtaaagctcaacactccccatagagaacaaacgctcattgacattcgaagcgaaggaacaagtccgaaaatgaagattccgaacgcttgtgaagcaagcacggcaagcagtccagtgattaaaatagtcagcaaacctcctgtgtgtggaaattgaagcacataataaatataaatctcaaaggcatagaatatggtgaggaagataatggtttgcggtaacatcttacccatcattgccacatagatgttattgtcagccatccctaaccactttttcgactccttaaattttagttccgttcctatcgagtaagcagaaatgaggaagataaaaagcatgagtacgcctggaatcatcgtggtgctgaggtagacattgtagttcgcccatgggttgttgaccatgtgtaggtcgagagcaatgggttgcaaaaaggttcgtatctccccttgagttttccccatcgctgatagtttggctgatgaaacgcctgccgagcctaatgtggcaatagttttgagatccttgaacaaggtagaacctgcaacaagtgttacactgctgtaataaaaggaaatctttggttggcgcgcgctcatcatgccttcggtcgtaccattgggtatgagtagaaacgcatatatctcattgcgttgcatcgcctgtcgggcatcattcatgttgggataatgtgccaccactttcgtcgtctgaaaagcatccaagtttcgtatcaagcggcgagaagtgggtgtgttgtcctgatccacgacacctactggcatctctacaggttgcccttcgttcagtaaagaggtgaaaaagaatatgacgagcagtgggaatatgatcatgcaaaacccgtacatggggtttttaatcagtattccacattcgcgcaacgctatttgcaatattctttttaccattgttttgacagaaaaaattgatgttgaataggaggaaaaatgcgtctacgattcgcgtatgatgagagacataccgggacggagaccttcaaatttctgaatgggacgagcctttacctcgaatgttttcaaatcgtattgtccattagtctttgttgctttccatacagcatacgacccttggtctttaatgtagtacaccttcatgttgatttctttatcgaaagctggtgagtaagccttgaaggtgtcgccaactttcaagcctttgagttgatcttcgcgtacattgaacgtaccccaaaggtctttcatcacagaaatgctcatgatgggcgaccctgttcctaccaattctccttctttaggatagatagtacttacttcgccctctacctttgctatttgtacggtttctctcaagagcgattttactacgtttacagcgccttgggcagcctgtgcttgtttagcagcggcacgcttttcttctgttcgtgcaccattctttgccaaatcatattgactctttgctgcttttacctgcgcttcacgagccttgtaggctgcaaaggcttcgtcacgtttttgagcactcatcacaccttgatcgaagagattttgcacacgctgataagacttttgtgcgatgtcgcatgctgcaagcgcttgttgccacagttggtaagcgccttgtatctgctcctttcgtgcgccattgtcagccatgtcgctcattgcagcagcagcctgttgcgtcgctgaagccgcttgctcttgagcattcatttcgggtgcttcgagtatagcgagtgtgtcgcccactcgaacatagtcaccttctttcaccctgagttctaaaatacgtcctggtatcttgcttgatacccggtattcagatacttctacttctccttgaacaatctctggcgttcttccaagtgtgaagaaaccgatgatagccacgaggataacggctgcggcaaatcctaagattgccagcaagatattgttgtgttgtgtttttgtcgacatgatgttattattgtaagatgcccagtgcctttttaaggtcaacttcggcaagtttaacttctacttctgcgtctattttttgagtttgtgctttttgccaagctgtttgtgctgccatgatttccgttgcgttcatgatgccttctttaaatcccaagttggcgcatcgcaggttttcttctgcacttgaaatattctttaacgccatggcaagctttttacgagcctccttgaacttaaatttactttgtgtaacttgcagttcaattttctcttgtacatcactcatattgagttcagctatttgggtggacgtacgtgtggcgcgcactttgtaatcgcactcaaaccagttccatacaggaatttgcaccatcaatcccacgttccacattccagagaactttctttgaaatccgttaaacatattgggatttgagatgatatatcctcctgtaagtgctacgtgtggcaagtaagtagctcgaacgagcttggtattttccttgcttatatcaatggtattttgtagcattcttaattctggacgagtgctgataagatcagtgttaggatagctgtttggtgtcatcaccgttcctaacatttcattgtcttcatctgccagtgtgatgtcgttttctaaagatagaccacagagttgacatagcaacatcttagcgagtgatacgccattttgtgcttgtgtgatttgcatgtcagcctcgttcactttcacttctacctttagaccgtcagcacgtgtcgccactccctgttctatcatctgatgaacgtcgtcgttgagtttgccaactaattgacgatagctattcgccaactttagtttctggttgagtgataccaccagccagtacgcatggtcgatgtcgtagatggtcgtttgtgtacgcaatgttaggtcgttggctgctaattgttccgtgatatcagcaatattgtttgctgctatgatggctccacctaaataaatgggttgtttcaccaccacagaaccagcccatacttgtcgagtatcggttcgcagtgcatcgttgatgttactgccaatagtgttgccagtctgagcaaccgattcaccaatcgttccaagcagagcacccatgtgctgtgccatttgaggagaaagtactccctgctgtaccaacgttgcaatgttcccagagatttttccgccaatagcattattgagctgcgtacccatgctcccaaatcctgccttttgctggtcgttgagtaaggaaatctctcgactgaagtatgtgtatccaccgatagcatctaccttgggaaggtatttcgtacgcagtgccttgcgagtgttctttgcaacgtcttgctgaagtctggctacattcagttgcttgttgttgcgcagtgccatcgctcgacagctgtccagtgtgagcttggtttgtgcgctaaggggtagcaccgtacccacaagcatgaatatagtaagcaatctgttcatgataaatatgtaatacctttaattaaatgtgaaacttcttgatcctatcatattcccttctgcgaagatactcacttgataactccctgccactaacgcctgatctatattccagtaagttgtgacatttgtttgggcgccaccatattcaacagttttcttcatagaagcttgtaaattcttattttcgtaggggaacgttcctgccccaccaagaacagttcctgtcggtgagacaattctaacgtagagcgttcgcatgccattggttgctgtaacgttttttgcaatgctaaaatcaacttgtagagttttcgcttttttcatctttgaagtagaacgacctcttttatcacgcaaagacatattgatgttgatggcatctaactgtgcggctattgccactttttcagaaagattttgcttctctgtgctaagtccttcaatctgccggttagcagcttcatattctccttttatacgtgtattctcagctgtgagattctgattaagacgattgagcgagtctatttcgagcacataactacgcaatacagcacgaactgttgccaactctctttttaagcgtgcaatttctctcgcatcattgcttttcacttgccgcagttcattgagtaactgttgggttcgctcttgttctttggtgagttgtgcaataatagagtcgttgctaatttgcgtcttcatttcgctatattggttggcgaagcgctggtattcgttttccatttctttcttatccaactctgccaaggcttgcatttctttgttttgttctttttgctcaaacaaataataggttaaaatgcctacgcccgccagcaataggattataaaaacaagaatgggaattacaactttttttttcaccgcttatcacttattaatatgatgcaaatttaacgaatatatcttgaacaacaaaacaattagtgttggtaaatatgttaaagttcattatttcgtctttttaagtaaaaaaataaatagttattcgtcaaaatatctgataattaccgaactaccctgcattagaaaaaatcgaaaattttaactgatagtccgcttcaacacttacggttctttcattgaaaatttatatttctacaacaaaaagcatcctattctaaaatcggtggtgcgcaatatgaaaggcttatcaatgctgaattatctttacaaagtgcctctcaaaactcgcgtgaaatcatccaacggcaaagttggtcgcaaatacgcgaattttgagaaagtttcataacctcttattattgaacatgttacgcttaggcctgctcttttccttcctattttcatccttttttggcgattaaagcattgagataagcctgcaatttgcatgctttaaggctgctgaagcatgtgaacaacacctctattacatgtttccaagggcgttaaatcaatgtttcaacttgaaaagacatcaattttgacaaaatcagcccatttttgtagttcgtttgcctattgattttttctattttgaagattttagatgaccgttttttggtaaaataacaggacaaaaacctccaaatactttatctgaaaaaatgaaaatttggaaaaagataatgatagttggatattttttcttatcttcgtagagtaataacttagcccactaacagcaatgagctgaaaggcgggtacaaaactaaaagcaaatgaacataggagataaggcgcccgaaatattaggacgcgaccaagatggaaaggaagtgaagttggcagacttcaagggtaagaaattagtgttgtacttttatccgaaagacaatacacctggttgcacgacagaagcatgcaatctgcgtgacaactatcaacgttttctggatgcaggctatgccgtagtgggcgtgagcgtgcaagacgagaaatcgcacaagaagtttattgagaagcatgaacttccattcccactgattgccgacacagagaagacattgaacattgcctttggcgtatggggcgagaagagcatgtgcggcagaaaatacatgggaactttccgcaccacattcatcatcgacgaagaaggtaaagtggaacgtattattacaccgaaagaaatcaaggtaaaagaacacgctgcacagattttgggataaaactttccccctactcttccgaacaagggggatgtaaacgtaacgactgaatcttcccgcaacaatcaaaaaagcgggaagttcttttcgctataagaaagcacgagtacaaacgtaagtgtttttaacctgcacttggcatattgataagttgtccaaccatcttagatcctccgctttcggtggagccgagagaggcattgtccgttctactctttcgtcatcaacatgccattgccagcatcaatctgctgtcgctcaacgtccaagcgataaatcatgatattgtttggatcgccaaaatcacatactaactttcgattttcgtagtaaaacgttcccgaagatttttctccgtcaatgctctctgtgattttgtttccatgaatggacaacagaatgtcgccatattcggtcgtaaacttccagtttccctgaatccaactgggtgctttgcctggatgaatttcatcataaggatcgacagattcgtcctgcacggctgttaaattatcatcttgagaaggcacccccattgtagtttctgacaaagatgcaccattatactcatgcgtcttagccgatttccaacaacttctgatgctaaatacaaccataatgagcacgacaaaaaagataaaagtgcaagaagtataaaaatgcccttgctgtttttgttgctgtgtgggcgttgctttacccgccatagaggaagggcgactcggctttgaggctgtggaggcgttcggtttttgccaatctaatatttctgatgacgactgacgtgaagtcgtggaaattctgccagcaggcgtatcacttgaggtttcttcattatccaaagcacctccctgtggagagtcggttggagtttgctggttgtacaccccttccgttcggtcaaattcgccgacagaatcctcctcttgttgagagtctacaaggtgagtaaacggagttccacatctggggcatacacacgacacttctgtcatgccaaatggaatgtttgtctcatatcgcaacctacactttggacactttacttgcatattctctttcacgtttttagaacataagcacctgcatgggcttaaccaaattttacaattgccttgttcgtgattcgccaagaatcattttccaagacggcagttccttcttcaagggtctgaatttgttgaggataaggcgacaaatttccctgaaccttacaagcggtttttacaaattgagacacactaatcatggcagtagcaatggcatcgggcgtgtcgagcatgataaacgttccatgaacaccatcggtggtgcttaactgatagatgctttttcccacctgttcagtttccgaacttccagcaaaaacaccttcttcgttgggagctgtcatgaacaagatacgatgttgtggcgctttcccctctgtctgtacatctgtcggagcggaattgacaatagatgcctgaacagctaccgtctctttgttttccttgtccgtagagatttctatcggatgggatgaatgtgcctcgatttgctgctctaaagattctacccgtttattcagttgaataagatgtctttccaattcttggattctatcttcatagggttcgagcaaagactgtattttccgttctatcttactttcaaacatattgatttttctattgtccacattgcactaatgcagatgattgataagattgtcacggatacttccaataataggataaaagaagagtgtatcttcaattgcatcacttccattcttctcttcttggttcttattaacgaaattccaaccattgatgagatgatgttccaagtctttattcaccaactctttgaacatctgtaggcttcggttgtccaccaagaaacgatctacaacgtgaatgtcctcacacaactggcaaaagaaatcattaaattcacgcacttgtgcgattatctgtgctcgcacttgaggattttccatgtcttcatagcgcacagtttctttctctatcattgaatagttgtacttaatggaattatcaaagctatccattaaacggttaagctgcatcacttcttccacgcccctactgtcattcacctgcatcaatgcaccacgacaagtgatttgctttggctcattcttttccatgacgatattaaagccgtctgcattgtacttctgaccatatacacgctctataacagcctgcgaaatcaaatctaaatctcgctgcgttccaacgatatcaaggacttttgaacccgtaccagaaaacataatgctgcgtggcatatccaaatgtcgatgcttcatcatctttgcgacataatagatgagggtgacaaagaagtagataaaaattattttacgctgttcgtcctcattcaatcgcatattataagagaacacatcattttgggcaaccactttattgttaatgaccgaaaacaaaaaagcattgatgtcttccgatttacgcttagcagtaatatcgtctaaaataccatttagctctccatatctgtcatcatcgctatcgaacaagcgtttgaagtaatccacatacttaattaacatggggtttgtgtcgccctgcggcacatctgagaatccatctccaaacaggacattcgctgcaaaacggaacgaagtgaggatagttggttgctgcgcattgctctcataaacaacgatgtcgcttgagccgccaccgatatcaatacttgccacggtattggcggcacccttaaacgaactcgaactcttatagaaatagtaaggagccacactttcgggcatctgaataagattgttattcgtcactggaatgccaaaaacttctgtgaaagtttttgcccacatttcgcccaacttgcgcacattacccactttcatggatagcggatagaaccacaccagtcgagtttttgtaatgtcaccattttccagtaagactttggtacgcatcaacaacgccagttccatgagataagccctaattcgcttgctattagccatctccgtagaccatttcagattaggaactatgcgattgccatagcctatagattctttttcataaatgaaaggaatgttggcatcacccagagcaacaatctggtcgacattcatcgcatctaatcgctcacattctgacaatactgttcgttgtggaaatccataactttcgccaatcaccttaggcaagaattcttgcttcatgatgacatcgtataaaatactctctccattataggacgtggcaataagacgttcacgtgccgtagaactaatagaaagaggttctggcatgttatcagccttcatagattcaacatgagtgttggttgttccaaagtcaacggaaaaggtgtacgcatcatgtccagggacataagatggccaacggggacaaagaacaccttgggcggaggtgtttccgtgatcatcagatagggtgatagcaatataatcaaaatcactttgcaaacgataataagtagaaccgacacgcttttctgactttaacgaacgattacggataagaacttcatcttcttgcattccatttcgatagccatttttaaggaaagtcaagtcaatattgaaattctccaaagcgcccaaagccctatctaccagttgcacgttgtattgtttcagccgctgagctcgaacaaaaggaaaaacactcaaggcaaaaggcactgtgataaagtgtccgtaattgttcttctcatcgtaagtaaaatcaatgttggaggttgatacatacgtacgttgaagcgtaatgaagtgtctttcttttttaacaggtattcgcaagatagctgtcaccttttctatacttcctgacaccgtatgttgaagttcgaaacgaggtcttccttgaatggttccccaaaggtcttgtacatcaaaatacttaaaatatagaggcttcaatggtaaaacaaaactgcattggtcggtctctcgtgaacctactgtaagatttccttcaaagaaacaatccttgtcaagcgtataatctaacttgattaaggacggttggaagaaatcatcgtcggttaaccaaggatactgatgagtcgttgcaggtaggatacgcttttctggagcaacagcatagtctgctggagttatttgagtgttgtcatcccaagtgcctgtgatgtatttgaaagaatctacttgcgtggcaagaagatgattttgcaacaccagtggaattacatcctcgaccgaacgtgaaggaatcatcttaaaatcactttcggctattgcctgttggatgtcctctgggcgagctgaatagaagggtacgcccagcgcttgtatgccttcatcaaggggcatgaaattgttttccaagaatgagcgagcgttttccacatgccctaaatccatggcagcaggattacctatttcacgtagtatttcatcttgtaccgttttcgataaaagagagaaattagtaatcagataactgttcacttcctcgcattgattcttcaagtttggatatgctgtaaacagcgcatagatatatttgatgaaccgtgtatcacgcatatagagtggtcgccaaagctcaaacaaattgacattttgctccacaggcaaatcatacatcccctccttcgcattcggcgaagccataaagagagtgactggagaggttgatccgatgacttgatttccataaaccaagaaataaagtctatccatagaatcaaaattaaaggcttcttggtcttgttgcagaaacatctcaagtgtttcacccaacaattggtgttgtggtgagtcctttaatctctgtagttctgtactacgattccattcaataatatgcaattgattacgcaattcggaataattgaaaaacaactgtgcaacgtctaacgcatttgcaacaagcttttcatccattgcttctccttgtagacgttcgtgcatggagagccgtttgaatgcgttttttaccaaatccatttgtgcaaatggagatggaatagcggtgcgaggttgttgagatagcccatcattagggtcttctatcattgctatctcgtctgcattatactgactggtgagaggaatccatccttctcccgttgttttcttattatatgataatatctttgacatgaaatatcgtttctatatgacggctcaatttatgttacactatggagttgtatttttcatccaacagcttatccaaggcttgatccagcaaatccatgagtttatatgccacttgatcctcaccatacttatgagatttcgtagcttgttggctcgttttattaagcatagagagtactgtcttgtaatcaatggttgacttaaacagaccagtctttggtactatatccgttagtgcgtcagaaagtttatctgttgtaagattgaaaggaataaaactccgttggtttactttgagttcttttaaccatgtgcggtaagcaacaaagaaattactggtcaatgtattataaaaacttgtcgacacaaaactctttcctatctctggcttgtcttctgtgtaccctcgtccaatatcattttgaagttgattggttatatacagataagctaaataaaactttgccatttgcttattgatttggtttcgagtagagataccaaaatctttcaatgagagggttcgcttgtcgtttgccaaaccatactccttaaatatgggattgagtgccattccatcgattgtttccatctgactatcgggtatctgcaagaagtctaagatggataatgcaccaacatattctactacatgggcatcgttacgctgaccattcccaccgggatcattaaaatatggattactcggtacttcatctcccaagtaataacacacattcaccttcgacttaggcaaatcaactcccccttgtcgaatccctgtcaggttatcatgataatagaatagagccgactttgttttagaaatgaagtctgctcgcgagataggactattctcatcttgctgcacattaaagtaaggaagcacggtaagtgttcctatttttgcatcacgcaaatcaccacggttgttaatctgaatgttgttccctgcgtttcggatattcttcacaataataggataaccagctgctcccgttcctccaaagatgctgctcactacaaatatgcggtcattcttttggaacacattggagaattgtcgaaattcttctgaatctttgaactgattcaaggcaacagagccgatattgggcgatccaacgaaaccaatgtccatctttgtgttgagctggtcatttgaaaacagcatcgaacataaagcttgattgccagaatctaacgtagcataagaaataaaatcttgaaacttctgggaagcaatggagcccatattgaagatgaaagtatcacttaggttacttccattgggcaggatgtcgctcaatgtggatatcttcacggaataaaagccatgcgttacatctaccgattcgccatacagagatttccgtatctgtttataccagcgcaaaaggttgtcggtacgcttcaagtcttcatttgctttatgtggatctacgatgataggaatgacttccagtggcatcggtttacccgattcggttgtaggatgtaccccagcagcaaactgcatgataagaggtcgcatgacacgcgaccctgttccacctactaaaaacaaaaatagtctcacaataatatttctaataattcataaacttcacaaacatctttctactattctggtattggcgtatgcctgcaattggaagaccaccaacgcatggagtagctcgcaatgatgaatagtaccgcctcaactgcaaggttgatgacacagaaggctgagagttgcccactaaagtccaacccatcatctgcaaatacatgatctgcgtaggtataggtaatgaggggaacgatgaccacggctacacataacatgattaaccaatgataccaacgtgaaaaactcaccgaattgatgacataatagtaaattccagatagcccccatgccaccactgcagtgacaatagcgaccaccaaatataagttggcggcgtacatctcgttagaaaactcccgagaataaaagagagattcaaacagaggagtagaaaaaataatgaaaaggagtgtcaatatggctcctgtaattaataatatggtattctttttcatatttcaaaggattgttcttcaattgtggcaagtacctatgagtattctatttggtggattttttgagttatcaattatctcttaaattccaattccaactcaaagtaatagggctctccatccgactttttttgataactgttatatattccttgcaataagtatttcagtccaaaggtggttttactgtcaacagtggtgtcatcatcactcgatgaagctgctacccatgcaggcaaacgattcatcagcttgatatcaacatcctgattattcgatattttctcaaaggataatataaataggtgtgtagcagaaccgatatatttcttctcggctggtgtgatatccgctttagtgataggacggatttcttcaatggtgattttgtcgtccgactcaatcttatagttgcgaatgtctgtcaagtaatctttatctataagcattttacttaaatcaaccgccagcactaaccgaacgtcgccactgtttctatcttgcttaacaccctctatatccttaatctgtgttccttgccctctttctggctggaagcgtcctcgtatcttcggatgacttaacaacaaggaataataaggctcgtaaacatcatcggattcgaatagatacatgttctgatatcctttgagttcggacagtttagcaaacgatccgtagtcgggatcagtggtcagacgagcgatgttctcattatttcccactatgacaatataataaggtcgctttccatgataagccgttcccttgctgggagaattgtaaggatagtacaacccatcataagaccccatcatcttaacaatgagcatggactttttctttacttcatctttgaaaacagtattggtcatgctctgggcttcagcgaaaactttctgcggattgacgcccaccatattctttgtagaataaatcatgtcagtcatcaagatactaatttcgtcgtctttcgtcttgttcagtatctgattaaatatggctccgaagtccgtgtagcttggatcaccaatgccctttgtagtaacaaagatgtcattgtcgttcacaaattgctggattccttgtggataaggattgatagaactattcactacataaattttatgctgcgaattgttgcctggcaagttgttcagcatccgcacaattgctgccttgaatgagccatcgccttgcggagagtcgtaagcaatcatggagccagaccgttctaagaagaaattaattttgatgggttcatcattcatcccaacgaaatctatcttcttcgcctcacgcccacgactaaaaaagtcttctatgtactctttgacttcgtctttatcaagctttccgccctcataaaactccttaaaatgtgctttctgactatcaaggaacgactctatcgtcatccagtcctcgtgatctatgacagcatcgtctccagcaagttcaaggagcaggtggttcaaatctttctttgcactatttccgcaacttactaaaaaggcggtaaccgtcatgaaagaaaggataacccatgagcataatatcttcttcattctctttatctttgtgatatcttatacaaaaggtcgtagcactgtgaagcagaatctccctttatacaaacaagtacataaagtaatgatagataaggcgaacctaaatcttccattgtgttctctacaaagtgcctattccatgcaaagataatgtaaagagagcggacttacaaataaattaagtcttttttattttttctaaacgcttggttttcatgaaacaagaaacacacttcccaataggggttcaatgcctcaaatcatgagcgcctgttgactaacaaggcacataacaaagagtactcaacagcttaagagctaaatatcatcctcttcttctggatccgagtctgtatcatccaacctcgtattgcgcgtatccagttgcgtatctttatgaatagtgattgcacctaagttagaaaccttcatcactaagggtacatactcgtcgctcatcttgtcgggcgagcctacactaaccgcaaattgaatataattaccttcggctttgtcgaacacaataccaagaagggcgctattttttcgatacgcttcatctacatacgacacgaaatctgccttagaaaacgtgcgattaaaaaactctgagtggtcgtgtcgaagaattttgagcgtaatttgattgtcataatacttgtttcccatgccgtcatctgccaatggtaaagccttatccgactgtctactcacctcaacaacatagttggtacccaaccattccacaggcattgattggtggtaatcgcccatcgactgcgtttccttcttcactactggtttcggtttcgtggcaataatattggtgttttgctttttttcagtacaagaagacaacccattgcttagcaagaggagcatcaagagacctatcaaatttttcatttctactttttcctcaattgaatatgcacgcattcagtcacgttttccaagactggcacggcgtacattcatagatttattattttgcaaaggtaataagaaaaagcgaaactatcttctatcaacacctatttataacttgttggttcatgactcgttcacttaaaaaatgttgttttactgtaaaatcaagtttttcggttgtttcaaacgaaccaaaaatggcactcacgaaacaaggtttttgtcctgttattttaccaaaaaacggccatctaaaatcttcaaaatagaaaaaattaataggcaaacgaactgcaaaaatgagctgatttgagcaaaataaatggcttttcaagttgaaacattgatttaacggtcttgtaaacatgtattagaggtgctgttcacatgcttcagcagccttaaagcatgcaaattgcaggcttatctcaatgctttaatcgccaaaaattggtgaaaataaaaagaaaaagagcggacttaaacgtaacaatttcaataacaagaggttatgaaactttctcatatttcgcgtatttgcgaccaactttgtcgttggatgttttcacgcgagttttgagaggcactttgtaaagataattcagcatttattatcagtccatacagcattcctccaagttcatatacacagcgttgttggggttgtttttcgcgaagagtacgcatcaatttaccatcaaaaaatgagggaaatgtcatttatgagccaaccaccaacgaaacataatgacgccaaatttttaagttacaacgagtaagttacacgctttattcctgttcagaatgacaaaaacatgccaaatcctgcatgaaagagatgcaacgcaatcttgtttttaaaggtatgcgtgtgacttaattccactggctttccctgttgctgcaatgagtgcttcgcttggaaggtgtacttgggtgaagaataatcgtaaccgatatatcccttaaaagacaaaccgggtcgataagcccaagttagagatgcctcagtggaataaaccatcgcacgagttgactcttgtgacatcaattcggagacacgagcttgctgaccgtcgccccaactatcaagcgttttcaacaatcgagctttgatttcgggagaggcaaacgccaatttgttgttgtctggaatggagttgatttgcgctcttaaatcatctacatccacttgcgcaacagcataaacgtgttgatcggttatcactctacgtccaacaaggagcttgcttcctactcgcaaacgattaaaaataggataagagaaatacactcccccactaaaatcaaacaatcccatgggataagcttctgttcctatcagcttcatataagaggcaattaactgcttatctaccccttcgatggacagatagttgtctggattgacgtcaaaggtcgctttgatagggattgcggtagctcgtatctgtcctcctaatcccacataattgttcaagaagtacgctccttccatactcacactgacatttgttcctaaatgcaggtgtaaatcgaaagcgtgatcatcaacttgatagtttttagaagtagaagactgaacggctacgtgtgaaactgaaagctgttctgtacccatgccagcatctacagtgatgcccaaaaaagacggattttgctgttcgttggaagagaaagcttttagcacactacgttttttaccttttcctttcatcagcaagtctgtcacgaagtaacccaaatccgtggctataatacccacgccagcacctaccaacacatctgtcacccagtgacgattgtttaatacgcgtccaacagcggttgcggtagccatagaatatccagcaacactataccatgggctttgcgtttgtccgtattctttgtgtagaatggtagccgccataaaagctgttgcagtatgtcctgacggaaaagaattgctggaagaaccatcgggacgtctttcacgaacggtgtacttcagtgtattcgtaagacctgccatgaacatcgccgagatagcattactcgcagctaaacgtttccacgagctttgtccttcaacacccgctgcatgaagtccccaagtggcaacgagcggagcatattgtgtaaaattatcccatggttgatgatagtctttctgaaacaagttccgcatctctctaaaatcatgttgccgtgatttgatgagaagtcctgcggcaacgaatcccaacccttgataggtgatgtcaatcttgtaatctttttttgtagtaacgctatcgtttacgtacggacgtggaggcaccacactggcagtggagtcgagcttttgggcataaagtgcttgtgtccataagcccaacatacaaagcatcagaatgaaaataaccccccgaaaaagagaagacgaataaaaaaataagtttattagtagatactttctacacatcatacatttgtttcaaaatagagtgcaaaggtacagtatctttctgttttacacaaagtttttttattcagcaatgatgaaattcgtttaagttattgacagatatcaaattatttttctatctttgtgcaaggaattagggatataagccagcaatacaagccattgtttggttcattatccatttctttttaatgactattaattcattgttatgaggttacagctcattctcttttctatcttcatgctatgctgctcttgctctcgccacaaaacagaacaagagacggtaaccattgacaccattcccatgatggtgatgcaaatacagaaatgctcaaaactatataccgcagaatataaggttcataaaatcatcacccacgatgacaagatgaagctaaatggctcttttatgaaaaaagattttagcattaatctgccattgggaagccgaaagatagccattccgatggatgcaacactgaaggcttatatcgatttcgctgactttaatgaggacaatgtgaaaagacaaggtgacaaaatcgagattatcttaccagaccctcatgttactctcacctctacacgaatcaatcacgacgaaataaagcaatatgttgccctcactcggagccgattcagcgatgaagagttatcgtcctacgaacggcaaggacgagaggcgattatcaaagacattccttccatgggcatgatggatatggcacgtgagagtgcagcaaggacacttatcccgatgatagaacagatggggtttgaagagtcaaacattaccatctcttttcgtaagcattatacacttaatgacatcaagtctttacttgacaaaacgaccatagaacatggaaacaatgccaaataagcagttcaatcgtaaccatagattttcattgatgacgcgactcaagattgcaatcgcaatagtcgtggtggtgtgtttgggcatttttgtctggaaactcttctccagcaagaatggtttctcactctctcccaataacgatatcaacattactcctactcaaatacaaagtattcgagacattgggcaatgggagtttttggctatcaataatgaggaaatcatcgatacggtgagacatggcttctttggagatgccgaattggtacgcatttattatggaacattacgtttaggaattgatttgcaagacacagataaggacttcatccgtgttgagggcgactctattctcgttcaactccctcctataaagctgttggatcatcagtttattgacgaagcccgcaccacctcgttcttcgaaaaaggtgactggaacgcaaaagaccgtgatgatatgtaccaaagagcgtatgaagcgatgttagaaagatgtcttgtagaacaaaatatcaaaagtgctgaacgcaatgccaatcaacaattcttccgtttgatgaaagccatggggcatgaaaatgtgatcattaggaatacgccctacatgcagaagcccaagaagtaacacctaaaaactcatcataaatccaaatctcacaccgtttttgttgacacctgggtgatcgttgtaattaaatctgtgaacaaaatcaatggagaaaactttaagaacgttatgaacacctgccactaactccatatacggcacctttttatccatgatgtatgaaccttctgggaagacaaaaagattgtcctgactttggtttttactcaatgaggggttattcttgtcggtcactgtaccaaacattcctttgaaagcaacgtattcgcgccatttcaaccgcttaatcaaaggtatccgatttaagattttaccgttcaagtcccatgagatagaccagaaagcatatcgatcattgagaaattccatgttacgcatcaacgagaaagtctccttatgttcgaagaaagaaaggttgaccggtggcataattagcaaaggaaaaggaactcgatcccactgtgcacccacattgacgatgccatctacatagccccagctgcccaaccattgtcgcttgtacatgcctaactccgtaaaatttaagcgatattgtccgcctaagaagttttttaatcctaccgtatgtgataaggtaaactcgggactatctaagttaatggggactcttttctgctttgtattgataaaagtctgcccgggacagtatctaactccgaatttcaattctgttgttcgtatttggttcatttcttcaccatctgtcagacgaatgaaatgtaaatctcctgccacttcattactttcggctttgagcgaactgttgacgctgaaaccccaatcagtctcatacacaaacgagagtttctgtcggttatagaagtacatctgctgcaccttttgcgtcttgaaagccataaaagcattgtctttgttatgaattaaaaacttatctgcaggcgacattacatcataagctgtttcaaaaataaggtttcgttgtggaaactcgaaaggcgaattcttcttcttattcaacgaataggtgagttctgtgccataatatgctttcttagattttgttccgtaagctgcataaccattccaaaagatatgaggatttagtgctgccattgtacgtccacttaatcgaaaacgaagacaatccacgaaattcgatgatatcaacgtattaataggaccaaagtcgaacttacttggacgctgactactgctggtttccacatagttttctaccaaagccttaacgcctattatcaaccatttgaagtttttagattgctccatgcgatgcacaaacgcatccatagacgactctcccttggtcaattccactgctcgataacgattccaaaagttgtcatctctgaccattgcatcagcttcgtgtcgaactttcaatcgtcctttgaataatttgttaggcaattcatcaaaggcataatcgtgcaagcgtgtatttcgcaccactaacgccttggaaaggaaactcgttaaggataattctgcccacatatcgtccttcgtcagcacccactcaccgttgtcaagacgtgtaaattcctgatctacatgtagattttctacaaagtttacatcgctctttttaggcatagtcagcttacatttttttacatgtaatgatgaatctgccaagacatacaactctcctctaaagccaaagtcttgctgattgtttggaatgaattgcagatgatagcacaagtctctgtccacatacaccgtatcttctatataataacgataaaaggaaatggctgtacgccctatcggactgacaaacggatattggagcaaacggatgtaatcgtcatagatatctacactctggaaaacatctttcagaatcacattcaaagcatcgcctgtttgtaagagtttgttcactccttgactctgttgtcctttaataatctctttctctgatttaggttcttttctgtaaatgtgctgggtcaccgtttcatctacagacacaggaagcactaacttgttgttataaggactggtttctatctgatctaacacccattgtgacttaccaaatctgcccgactctatatctccaggcttgacatcattcagcgataaggtgagtttttgatacctattgtactggtagtaagggtaattgtcgaggtgactctgcttctttgcttcaatcacccgcttcatcaattctactgctggattattcttccgagagtatctccctctcttgctcttcaccacaacttcatttaagcttttcgaatcttcttttaatacgattttaagatacgttggagtgtgtgcatctactttgatagtctgcgatttgaagcccacagaactgaacgtgagcacccacccttcatgtctggggatactaaatttaccttctatatcactggctgcagccacgtgattgcccttatacatggcactggcaaatgggatagcatagccatccgtatccacaatttcacctgtaatctgggcgttggcggtcaacaccatcgccatcgtcaatatcatgtatgtaattaatcttctcaccttcatcaatatctttcctcatctgatagcacagacgtatcgttgtcttttattttgattattcatcagcatctccttccagcatcatggacgatgaacagcacatttgcttgcgatagtagatgccattcaagccaaaagcgaagcaagttttcttacgcttttgagccatcgactactacatacaaaggtaaacatattcttgcaattttaatgaaaactctttggatattaatattttttctgttatttttgcaccctaatatgaatcgtccgccattattagccgtagtctttggcactggattcggaagtggattttggccttgggggccaggaactgcaggtgcattattggcctcattgatgtggctaagcatgattcatttcttctcacccactgctctttttctcctaactttggcgttgattgtccttggtactatcattggcacatgggcaacgaaccaactggaacctttttggggaccagatcccaagcgtgttgtcattgatgaaatggtgggagtgtggattccattactcatctcacccaccaataacttatggtttgcattgggtgcgttcggtttattccgcttttttgatattctgaagccattgggaatccgacaattggacaagcgacaaggtggtttttgggtaatggcagacgacatcttagcaggtatttatagtctaatcgtattagcaattatacaatgggctatctaaagaatgcaatggtaacgttcggaaaggcacaagtgtcggcatggattgcttccatcgtcgacttttccatcaccgttggtctatctcaactgctgcacttgtggtatggctactgcacatttacaggtgcactgatgggcggtatcatcaactgtctcatcaactataagtgggtatttcatcctgatgatgtaaagaaaaagagtattgtcacacgctatataatagtctgggcagggagcattggactcaatacctttggaacattgaccttaaccgaactcactggcatcaattttgtcgttattaaagccattgttgccatcgctgttgctatcttatggaattaccaattacagaaattatttgtattccggtcgtccaactatattcccttaagaaagaaaattagaagaaaacgtcaccatagtgacctttctgatgcaccaacgtccgaatagttagtgtcatcagttcttaaataaaacaaaaatgaagtacagagattatttacaagaatgcatctataaaatcatcaatcccatcattcacggaatgataaagataggtatcacccccaacatggtaaccaccattggatttttagggaatgtattagccaccgcgatgtttatccttgccagcgaacaagccactcctgaagcgggttatgccatgattggatggggcggagccattcttattttctcaggattgtttgatatgatggacggtcgattagcacgcttaggcaacatgtctaccgcctttggtgctttttgggatagcacgttggatcgttatagcgaactcttttcgctctttggtctcacactttatcttctcaataccgtaggtacatgggctggtgtcatctctttcttggcattggttggctctatcatggtgagttatgtacgtgccagagccgaaggacttgacattgagtgcaaagtgggactgatgcaacgccccgaacgagtggtcgttacctctgtcgttgccatactgacgggtatttttaacagcaatgggtggctcatagggggcatgattctcattgccgtattagccaacatcaccgctttttggcgtgttgcgcattgctacaaactgctcaaaaatcaataaatgttcagcatttacatcgtcatcttataccttgcgttgctcgcctataagccgacacgtaaaatagcactggtattaacgccttgggctatctttggttgttcgtacgattgcatgcgacttctccccaactatgaggtaaatcccattgatattcgcggactatacgaaaccgagaaacagtggtttggcatcgtaacagctgcaggcaccgtaacacccaacgagttttttgcacttcaccaccacgccgtggccgacctcttggcaggttttttctatctttgttgggtgcctgtgcccattggattcagcatatatctatatataaaaggtgaccgtaaaaactatcttcgtttctcttccgcctttcttctcatcaactttgtaggctttgcaggttattacatccaccctgctgccccaccctggtacgtcatgcaatatggttttgaacccatactgcatacccctggcaatgttgctggcttaggacgcttcgaccaactcactggcattccggtattccaagccctctatggcaaaaactccaacgtgtttgctgccattccctccttgcacgcagcctacatgttagtcaccactatttatgccattatcagcaagcagcgcaagacaaccattggtattttcgccattatttgcgtgggcatttggttcaccgctatttacagtgggcatcattatgtcatagatgtgctgttgggcattctcacctgctttgttggaatagggatattagaatttgttttgctaaagattccaaccgtacagcagttcatgaagcaatatgtgcagcttatttcgccaaaataacgcatctaccccaaatcttttgtaaagctccattgctattctattggtcacatttctttccaaaaatgtagtcaatacacacttttttcataaatttgcagtctcactttaacgaaacgattcagagatggacaaacgactattttttatacttctcatgtgtccaatgttttttaccacatgggctactaccaccaaagataacgacaaggctcaacaatggagcgtaaaagcggggattggcacttctgcggcagaaacagaaagttctgataatcgcactttttacagcagtcctgacgcatcgagcaatctcttctatcttcaaggcgattattatctcacgcccaaacttacgctttcgggtggagtgtactttgaacaaacaggactgctggataacttttcgcaaaatatcgggttgctacgggtcaacactgcaggtctcacagtcggttcaaaatattattttttacctaagaagtgggtggttcaagcatacgcaggagcctttgcacaaaccaacttccttaacttaaaacgcacaacaggtaaaaaatattacgtttctaacaatcagtatcggggagcaggacttgatgttaattacaatatccagcgtcctgcattaaccattgtgccacaagtgggcttagacctccgcatctttagttcggtttctctatgtgtagattttaactatcagtttggtttgtggggacatcagcgttgcgacttccgctttaacagtggacctctgcaaggtgtatccagttcacaaacaacaagtaacataaaaccgggaatatcctttggtgtaaaagtagacttcccgatgcgcaaagtcagctcaaacgaccttgacaatctgtttgaaatacttttcggtatcttgtctggaccaagagctcaagatagatatcaatcgccttacttacgttaaatggtcacatcaaaaagtgctatttgccaacgcttaaaactctgaattatttttacattcgttcaaaatacgagcgttttagtcaccaactgtacatttgctcgcaaatacgcgagttttgcaaacatctgtttgtcaacacattaagcgattttcacccttttgcaacttcattagaagcatgctttaagcgcattaagtcattggattaaggctactaaagcatgcgaatagaggcacaatttgcatgtaatagcggcattaactcaatgggataacaaaaacgaagaccgaaaaacacatttttaactgcattttctcggtcttcattttctattttgcaactttcaaaaaatcaattatttttacatatcatctgtatttcttccgtatttcatacagcacattattcttgctatgccttattgaccttccatgaatttcttggcagcacgcaactgatgacgcatattggttaacaattgttcgctctcttgtaacaagttgagatacaccaatgatagctggaacgtttcgtttccttctgccatttgtatgcggtcgatgtgttgcttacgaatgctactaagttcggtttcaaactgttctgcctcatccagcacctgtcgataattttcaaaacgccctgttgcaatggttttctctgtttgtgatatcaaatctatcacctttctataaataggttgatattcttccgccaattcaggtgtaataggtgtgaagttattgtcaacgtgttctttaatcggatcgagcatacgacgcagcacataaatatactgttgcgaggcattgatgccaacatggaaccaagtgttgcgctctatggcaatgtccatcggtgctttgcgaagtgccagtaactcttgccgacgatacttcaacaaaatggttttctcgttgtgcaaatcacgtgcggcatgtcgcaacaagctgggcttgtctgtcacaaagccttcaataatcgttttgtattgctcaatggcaaaattcgccatataactttgggttctgctcacatgcttgctaagcaaatcccacaaaataacggggtcttgcgttcgcatcatcaagcggaaactattatctttgtcagtatcacccaccgattttccagtgttatttctaaacaatcgataaaccaccaagcctataaaggctgcctgaatgacaatgccgccatagtacatgagcaaaccaaccaaggcagaagcaacaaacgctacgcctgctgtgatgaaccaaccaccaatcacggatatgacacccgtgacacgaaacacagcactctccctactccatgcacgatcggcaaggctggaacccatggcaaccatgaaagtgacgtaggttgttgacaaagggagcttataattcgtaccaatagtgatgagcagagacgccaacactaagttcactgccgcacgaaccacatcgaatgctgccccatgatcgagcgtcacagaacgctggttgaagcgattatccaaccaaccttgcacacgctcaggaatgatattgctcacataggagttgctattctgtgtaaaacgcacaatactacgagctgccgcactcgatccgaacatctcgtcgccctcgtcttgacgcgacaaatccacagaagttttgataacacggtgggctttcttagaagttgccatcgccacaatcataatcaaaccagccaaaagcaaataaaaaggaggcgtcttggcactctctatcaaactggtcatcaagaaagaagtgggagcagcaccgctactttgtgccatataagtttggtatgaatcaagtcctgcgagtggaacaccaatgaagttgaccaagtcgtttccggcaaaagccattgccagggcaaacgttcccatcaacaccacaaacttaaagatattcacgccaaccaaatgcatgaactgcatcacgatagccgaacctataaaggtataaatgagcaatgtaccaatatgtcctttaatccaagattgagcatcttcgggtatgtagggagagtttccaactcctttcataaaaatgaaataagcaagggctgtaaaagcaattcctccaaagatagcaatggtgtaacgtgagtgtttttggtaattaaaggtgaacaccacacgtgtgatgtactgcacaacaacaccaaacacgaaagcaatggcaacactcacaaagatggcgataattacttgtaaggctttttcggtgttcagcaagtcgttaaatgccaaactgtcatcccctatcatcttaatggttgccaccataaaggttgctcccaataactcgaagaccaaagaaaccgtggtggaagtgggcattcccaaggtattgaagatgtccagtacaatgacatcggtcaccatcacggctaaaaagataaccatcacttcgtgaaaactgtattgggcagggttcataatgccgtgacgagccacatccatcatacccgaggacatcaccgcacccaagataacaccacaggaagcgacgatgagaatggtgtggaatgtggcaacctttgcaccaacagccgactgcaagaagttgacagcatcgttggacacacctacaaacaagtcaaatactgccaaacaaagcagaaaaatgacgatgcacaaataaattgttaacattgatatcggttaaaaatgaataatctttgttcagtttgccattggacatcctgatttctggtgcaaaactaatagagcgatgttacaagacttttaaacacatattacaattgtgtgacgaatgaaaatatttaaaatattgactactctatgggatgatttcaattttatattgtatctttgtacacaaaatattgagacaagacatagagatgagtcatgccaattacactcatacgctgagacgcacggtagaacaattatcaacattcacttcactcaacagcctgcgcaacagtcaacgcaacagataccccctcccttcaagtaaggcacttgaagtattattgggtagcatgtggtcttgcaagtacaaagagaaatggtctgcaatacatgaaaaacgctcaacgaatgtcattgcaggcttttttgacattccctttcaaaagagaacactacaacaaagaattaaatcacatttttcaatataaccattaattatcaattcaatcaaatggaatttgaactcatcgccaaaacttttatgggattagagcctgttttggcacaagagctaacccaactgggtgcaaacaatgtacagataggacgcagaatggtgtcgttttcgggcaatcaagaaatgatgtaccgtgccaatttccaactccatacagctattcggattctcaaacccattaaacatttcaaagcacggagtgcagaggatgtatatgaagaggtgaagaaagtagactggagtcaatacattgaacaaggaaagactttctcggtagactctgttgtctattctgaagagtttagaaactcaagatttgtcacctataaagtgaaagatgccatcgtagaccaattccgtgaaaacacaggaacacgtccaaatatctcggtgagcaatccagatattcggctacatatacacattgccgaggacgacgcaacgctttctttggactcgagtggcgagtcattgcatcgaagaggttatcgccaagagtctgtggaggctcctttgaacgaggtgttagctgccggaatgattatgatgacaggctggaagggcgaaacagatttcattgaccccatgtgcggcagtggaacactactgatagaagctgccatgattgctcgaaacatgagtcccggcatcttcagaaaggagtttgcatttgagaaatggcctgactttaaccaagaacttttcgaccatatctataatgatgactcgcaagaaagggagtctgagcatcacatctatggctatgatattgacatgaaagccgtgaatactgcacgattgaacgcaaaagcagcaggctttacaaaagatattacaatagaacaggctgactttaagaactttacacagccctcagaaccaagtatcatcatcacaaacccaccgtatggtgagcgtatctccacacccaatttgctcggaacgtacaagatgattggcgaacgactgaaacatgagttcatgggaaacgatgcctggatattgagttatcgtgaagaatgctttgaacagataggactcaagccgtctattaaaattcctgtgttcaacggaagcttagagtgtgagtttagaaaatatgctattttcggtggaagaatgaaggatttccgtgccgaaggaggcattgtaaagactgcggaagagaagatggcgatggctgagaagcatcgatttaagaaaaatcgtgagttcaaaaaacgcttagaagaaaacgaagagaacgaaattgcggacatccgttcgttcaaatttcattctttggaacgagtacaggaaagagacgagcgcaaaaaaggcggtaaccgtcgcaacgatcgctcgtatgataatgatgatatgcctgcttacaaaggcaagaaacgctttgacaaagacggacgtggacggtcatttgggaaacgaggtggtaaagaacatggaagaaagaattatcaaatagacgattatgaataaaacttggttcagttttcttaccctcattgccctattcgtaggtggacaaaaggttatgggacaaaaactattcacactcgaagaattaaactttggagggaaaaactatcgaaagttcgtcccagaaaatcgctacactacatggtggggcgatgaactgattcgcacagacgctaaccaatgcagtgttattgacaagaaatcgggcaaggaaacgcctctctttaccttagaagacataaaaaaacatgccactaccaatgatgcgaacgagataaaagatttatacaacgtctctttcccttatcctaacaagtcgttggtattactacaatatggcactacgagatgtttatacaactggaaaacgcacaaaacagtatggaaagggagtactgctaacgaggaaatttctgaatggaatcctgcctcaaaggctacctcttatatccaatctgaaagtcatcaactctttatccgcacggctgatggcaacgacactcagttgacaactgacggaagtcgtgagatcgtgtatggtcaaagcgtacaccgtgacgaatttggcatacacaaaggtatgttttgggcacccaatggacagaaattggcattctatcgcatggatcagagcatggtggctgactacccacaagtgaacattttcggtagaatagcaaaatgcgagcccgacaaataccccatggcaggcgagacaagtcacaaggtaacggtattagtgtatgacttaaccacgaaaaagacggttactttgcaggctggtgaccccaccgatcgatattttaccaacattgcatggagtccagacagcaagaccatctatatatttgagttgaatagagaccaaaatgactgtcggttagtaagctatgacgcgcaaacaggcaagaaaatcgcagaactttaccgagagacgcacgataaatatgtagagccacaacaccccattgcattcttgccttgggacaacaacctcttcatcatgcaaagccaacgtgacggttacaaccatttgtacctctaccaagcaaatggcaagttggtaaaacagcttaccaaaggcaaatgggtggtgttggacgtgataggattcaacgtaaaagacaagtcgattgtctatacttctaccgaaaagcatgcgctgcaaaccaacacatacaccgtgaatgttaagactggaaagcgcagattgttggacaacgggcgtggctatcacagtccgtcattatccccttctggaacatttatcgtagataagtacagcgaacccaccgttccacgcaacatagagattgtcaatactgccaacggaaagcgcacccagtactttgaagcggctgatccgtggaaaggatatcaagtaccaacctttacatgtggcactctcaaagctgctgacggcatgaccgacttgtactatcgcatggtgaaaccagccaactttgatgaaaacaagaaatatcctttggtgctttatgtgtacggaggacctcatgcacacaacgtagatgcacgttggcattacgcttctcgcagttgggaaacctacatggcacagaagggatacatcctcctcatactcgataacagaggaagtgagcggcgaggaagggattttgaacaagcaacattccgccaattgggtcagatagagatgcaagaccaaatgaagggcatcgaatatgtgaagactttaccatacgtcgatgccaacagaataggcgtgcatggttggagtttcggtggttttatgaccatttcgctaatgacaaattatcccgaaaccttcaaagtgggtgttgctggcggtcctgtcattgattggaaattgtacgaagtgatgtatggagagcgctatatggacactccacaagccaatcctgagggctacagcaagacttccttgataccacaagccaagaatttgaaaggaaaattacaaattattcaaggcactaacgacaagacggtggtgccacaacactgcttgtcgttcatcgcagagtgtatcaagcaaggcactcaacccgatttcttcgtctatccaggtgaaccacacaacatgagaggacaccaaagtgttcacctccacgaacgcattacacagtactttgaagattatctgaaataaaaaaggaaacatacacatgaagatattattattaggtagtggcggaagagaacacgccttgggctggaaaatagcacaaagcaaacgagtaacccaactattcatcgctcccggcaacgctggaacaagtgagataggcaccaatgtcgacatacaggtgaacgattttgatgctatcaaagattttatatgcacccaacagattgacatggtggtcgttggacccgaagatccacttgtgaatggcatctacgatacattgaaaaatgaccctcgaaccaaagacaccgtgatcataggtccatcgaaagaaggtgcaaaactggaaggtagcaaggattttgctaaagctttcatgcaacgccaccacattccaaccgcccgataccacacctttacgggcgagacattagatgaaggacttcgtttcttggagactttagaggctccttatgtgctgaaagccgacggactgtgtgctggcaagggcgtcttaatactccctacgctggcagaagcacagcgagaattaaaggaaatgttagggggtatgttcgggaaagcatcggcacgagtcgtcattgaggaatatctaagtggaatagagtgctctgttttcgtcttaaccgatggcaaacattatcaaattttgccggaagcaaaggattacaagcgcattggtgaaggcgatacaggactgaatacaggcggcatgggcagcgtctcacctgtcccatttgcagataaagactggatgaagaaggtggaggaacgaatcattcagccaacgataaagggactatccgaagaaggtatcgactacaaaggttttatcttctttggcttaatcaatgtgaaaggcgaacccatggtgatagaatacaactgtagaatgggcgacccggagacagaaagcgtgatgctgagacttgaaagcgaccttgtcgatttgtttgagggcattgccgaaggcaacttagacaagcgtgttgtcacctttgacaaacgagctgccatttgtatcatgctcgttagcgggggttatccacaaaaatatgtaaaaggatatcctatctctgggcttgaagaaacaggagacaacatcgtttttcatagtggaacaaaacgggaaaacaatcaaattgtaactgcaggtgggcgagttttggcagttacctcctatggtaaaaataaagaagacgcgctaaaaaagagttttgaaatagcccaaaagattcaatttcaagataaatactttagaaaagatattgggcaagatatataagaaggcaaactttggcacacaaacagagacaaggaaggtgtcaaacaaaaacgtcttttcgctgaaagataggtatgcaaattaagaattatgcggtgtgaaaatcgcacatcccatcaacttgcagatatagaaataaggtagattggttttattcatggcaaacagattacaacacaagatagcttgtagccgttatgcattcccacttacgattgtttacgcatgtgggatttggctatttggcggactctttcaacatcagctgtgggttccatttatcctcatgctcgttaccaccgttgtaatggcagagcttaacaaccaacatgcgctgatacgaacatatagtagaatgctatcttgttcgttcctaatcatgagtgcgagtaccttaccactattttttgatatagaaagtggtattatccaactctgtatggcattgacttacctttatttattcaaggcttatcaaaacaaaatggcgattggtagcgtattcaatgccttctttttcattggattagccagtgtgtggttcgtccaaaccttattccttttgccgctttggtggcttgcattgcggttttacatcgtagggatgagttggcgaacattctttgcttccctcattggtgtcatcactccctactggtttttgagtgggtattatatctatcaagatagctttgaacttcttatcgaccatttcaaacaactttgtacgtttgggacacttgcccatctgaacgaacttacccatatagaactgataactttcgggttcataagcattcttggcatcataggatttctttacttcatcaccaatagctcaaaagaaaaaatacggattcgcctgctgtttgcttcctttgcattgatgatgataagcacaatagctttcattattttgcaacctgtgcattatccatacctgcttcccatgctcattgtgagtgttgctccattcattgggcattatttaaccttttcaggttcacgactatccgctatcaccagtttggttatcgtcacccttaccctcattatcacagcgtatcaaatatggatgcattcatagatttacttgtacagtatggctgttggggcatgtttctcgcctccttcttagctggttcggtattgcctttcagtagcgaagccgtcatgatggggttaatggcagctggagttaatacgcttcctctcatcatctatggcacaataggtaatgtccttggctcccttctcaattattacattggtacgttgggacgcttcgactggatagagaagtacctacatgtgaaacctgaaaagcttgaaaaagcacaaaagttgataagtaggtatggcgtttggatgggattctttgccttccttcctatcttaggcagtgccatcgctattgttttaggcttggtaagatccaatatttggctcaccaccttagctttcacggtaggaaaggtaatgagatatttgctcattatctatagtatgaacttagttttataaacatcaatcatcgaataacaaatgaataaaattatatggataggcattttactactgactctcgttggttgtgaacatgcatctcaacataagacgcggcaaatcactgtgaccatagaacctttacgctatttcacagaacaaatagctggcgaccattttgaggtcaacacaatggttccgaagggtggaaaccccgaaacgtacgaaccaactccgcaacaaatgattcaattggctaatagtgacttatatattaaggtggggaatattggatttgaacgcatttggatgaccaaactgaaacagaatgccccgcataccctcatcatagactcctcttatggcattgaacccgtaaggacagggcaaaatatcaacgatcctcatacatggatgagtaccaaaaacgccattcaaattgctcgaaatatttatcaagctttggcaaagattgacaagaaaaacaatgcttattatcaagagaatttagataaactccttcaaaagattgataccaccgatcaacaaatccgccagttattagcaaagaagacctcccgagcatttctcatttaccaccctgccctcacctatttcgcacacgactatcagttacaacaaattccaatagaaataaatggcagagaaccaagcgcatcacagctaaaagagactattcagacagcgaaggctctccatgtgaagaccttttttatacaaaaggaatttgcctctcgccagacactactcatcagtaagtcaatgggagtagacacgactaccatcaaccctttgagtgcgcattggcacgaacaaatgttactcattgcctcaaaaatcaaatagtgtaatgcaacccattattcaattaaataacgtatttgcagcttatgacaagaaagtcgtgctcaaaaacatcaacttaaccattgatgaacacgacttcttaggcatcattggtcctaacggagggggaaaaacaacgctgatacgattgattctcggacttaaaaagccgatgaaagggcaacttttgttttataaagaagggaagcccgttaagcacttaacaatgggctatctgccgcaatacaatgccatcgaccctgatttccccatctctgtagaagaagtagtgctatctggcttaagcaaccaaaagaaattgtttcacccctttaccgccaaacatcacctcatggtgagcgaaaccttagaaaagatgcagctttccgagcttcgcaaccgtgcgattggaaccttgagcggtggacagttacagcgtgttctcttagcacgagccattgtctctcatcccacagtgttagttttggacgaacctaacacctatattgatcggcatttccaaacgcaaatgtacgagatgctgcatcagattcatcgccattgcgccatactcttagtgagccatgacattggagccgtgctacagaatgctcaaaatatagcttatgtcaaccgaaagctcgattatcacgtggcttccgacctttcagcagaggatttgcagggctgttttcatcaacattcgctattagatgagagctggcacaaatcactctaagcaaggtttgccgaaccaacttgaagccatagcaaaaagcattcaccgctttactgcattgccacagcagacagttcagacgacttaaagtgagcgccccctttgtgacacccactcaaagcctatccttcatctgcagcagcattatctgtgaagatttcaacagcatgctttgcgtgatgtgcgacataagcagcaggaccgttattacccacacctttgatagccaagaccaccgattttttcttttcgcctgttacaaaaaatatcacgtgcttggcattcataatgggttttccagtgagagcaattcgtttttgtcctgattcaggatgaacacctaccgcataaatttccgaagtagtcagtaaatgttcctgtccggggaagatagaagaggtgtgaccatcatctcctgcacccaataacacaatgtcaaagacgggcagtccgtcttcgagaggcgtcttcttactaaccagttccgaatatctcttacactcttcttctggcttattctcgccatcaattctatagatgtgcgattctggaacaggcaccttactgagtaagtgctgatatgccataccataattgctctcagcatcatcaggcgccacacaacgctcatcaacccagtagaatcgtagcttcttccaaggcgtaagatgcgagtactcttttgcccaaagatcaaacatgagcgcaggtgtactaccgccactgagggctatatgatattcattttgatcttctgccttgattagattgagtatgcgttctacgtgtgcacgagccgcttctgttgggtttggaaatacgtttgtaatcataattcgcaatataaatctgtgttcgttaaatttttacatggattcgtccattctgcagcatggtcactcatcaacttatcactctctaaaggcccccaagttcctgcaggatagccatacaaaggagcctctaaggtctcattccaatattttaagatagggtcaaaaaatctccacgatgcttctacagcatcacttcgagtaaacaatgtggggtcgccttgaatacagtcatctattagtcgggcataagcatccatgactggagctcctcctaactggtcataagtaaaattcatagaaacttctttcacatcaaagcctgcaccagggactttcataccaatatttagaaccatgccctcattaggctgtatgcgcagaatgagtttgttagggcggggatgagtgccatctgttcgtgtaaacatctgatgaggtgtctccttaaagtgaaccacaatttccgtgaccttggttggcatttgctttccagttctaatataaaaaggtactccactccatcgccaattgtctatgttcaaacgcatggcaatataagtttctgtgcgtgaccccggtgctatgttcttttcctcccgataccccttcttatctccagaaacagtgtattgaccacgcaccacatgttcgtcgaaatctacctttgtaagtggcttcaacgaattgtaaaccttgacgacttcatttctaaagttgttttcatcgaaatacaaaggaggctccattgcagttaaagccaccaattgaatcagatgattttgcaccatatcgcgtaaagccccagacgaatcgtagtagcctccacggttttcaatccctaaattctcaacggcggtcacctctacataattcacataatttctgttccacaacggttcaaaaattccattggcaaatctaaacgccaaaatattctgtgcagtctcctttcctaagaagtgatcaatacgatacacctgctgttctttgaacgctgaagcatagatagcattcagcgcttgagctgactccaagctgtacccaaatggtttttccacaatgatgcgcgagcctttggtattcagttttgctgcctttagatgcttaggtatcactccataaagggatggaggtgttgacaagtaatacaacaggttgtctggttgatcggtcttagtcaacgttaccaatttttctttcagtctttcgtatccttcgtcctttgcaggatccatgggaagatagtgcaaatgtgtcacaaactcctgcatcaaatgttcgtcttgcagttcttttttgatgaagtgctgcatttcttcccacatataggtttgaaatgactgatcatcgtatttggttctggacaccccgagaatagagaaattacctgtaaggcgttgttccttatacaatgtataaagtgctggaatcaatttgcgcttggtcaaatcgcccgaagcgccaaatataatcatagcaaagtggttcattatgtttttgttcatacttctattctgggtaatcaaacgttatatgttcccgacttggttttacctccatgccccgtccagtcttcatggaagaactttcctcgttcacaatcctttcgctcaaaggtgtgcgcaccaaaataatcgcgttgagcctgtatcatatttgcaggcaaattttctgacgtaagcgaataaaaataatgaagagccgacgagaatgctggtgctgagatgcctgcctgaatgacatgaatgacgagttgcttccagtctgttaacaaggtagctatttcctgtgcgaaatacggtgccaacagcagatgcttcggcttatcctcttgctcataggcacgggcaatatcgttgaggaatgagctcctgataatgcagcccccacgccacattcgcgcaatagatgccatgtcaaggtgccaatcaaatgtctgggatgcagcttccaagacggcaaacccttgcgcataactcaccaatttggaagcatataaggcagaaaagatttcttgcaacaactgcgttcgtggaatgtcgaggggctgaactgccggtgcaaactggcgagcagcttgtacacgcatttccttctgagcagacaaactgcgctcaaacaccgctgttccgatgagtcctaatggcattcctaagtccattgcattgacaaccgaccacttaccagtacccttttgtcctgcggcatccaaaatatggtctatcagataatctccattgggctcttgatgtctcagaatatctgccgttatctccaccaaataactatgtaacttgtcttggttccatgccgtaaacacatcagacatctcttcatttgtcattcctccgatgtgtttcatcgtccaataggcttcagagataagctgcatatcgccatattctatgccattatgaatcattttaacaaagtgccccgcaccttgaggacccacccattgacagcaaggagtaccgtccgacgccttggctgcaatgctttgtaagatgggtttcactgcttcccaagcagcatgcgaacctcctggcatcatagaagcgccgtgtaatgccccctcttcaccaccagaaacacctgttccgataaagaagaagcccttttcttcgcacaaactgacacgccgattcgtatctaaataattggaattacctccatctatcaaaatatctccaggtgataaatagggaaacagttggttgataacgtcgtcaacaggtttccctgcccgcaccatcatcattattttgcgaggagtagctaatgactccacaaaagccttgatgtctatgtaaccctgaatggacttacctttgccacgtccttgcataaatcgctctaccactccctcttctattccatgaacggtacggttatacaccgacacttgccacccatgattggccatgttaatggctaagttttcgcccatcactgccaatcctatcattcctatatctgtcttgttttgcattttcatcttgttaaatttatggttactttatcaatagtatgccactaaaaacccatgccgcccgaatcaagccttcacggcatccgcttttttagcaaacagtcaacagactgcctatatgatacaaatatacaactttatctggaaaacaaaaacattgttttcaattattttttgaaaaggggtgaacggttagcatgaagacgtattgaaatgcacttgcgaggcgtacaaaaaagtgcttttctgctatgattggcaacaaagtgaatccatttgtgaagaacaactgcatttttgattctcatcactgcatcaccaacaaacaagaaactatcgcctataaaaatggcaaaccataggaattgagagcgtaagaatgcgcaaatcacggctcatcttttgtgaaatatattgacaaagcaagggctcattttgatttttcttttacatttgaaaaacacgaaatagagaaaaataaggcgaagaaaaagggttatacccctcgaaaatactacttcacgagacaaaagcattgagttaagcacgctggaacaatgcttcaatgtgcttaaagcatggagacaagctaacaaaagtaatgggttagtgacattaaagcaatgctccaaggcagtcaaggggtacgtgtaaaaacgtacatgcttgattataagcactttatatttttcgcatatttcagaaaaagtggtggatgattagaaatatgccaagtatttcgcatcaaaatcgcaaagtcttgaataaaaaaattatacaaaatagattttctcatacttttcattatattcaatactttttagcaatcgtaaaaacgataattcaatagaatttgtttacctttgcaaaatactatttttaatgtcttgtggtacgcttaacggtgaggcttttcaccggaatcgtccacccaaaatagtgaaattagaaatgagcaattaattattcatttatctatcaatgaaaaaatatagattagtagacaatgtggtaggttggatagctttcatgatagctgctattacctattgtcttacagtagagccgacagccagtttttgggactgtcctgagttcatctcaacagggtacaaattagaagtaggacaccctccaggggcaccattcttcatgctcaccgccaatcttttctcgcagtttgtgagcgacccatcgaaagtggcgctcatggtcaacaccatgagtgcgctgttgggtgctgttggggtgcttttcttgttttggacaattacacacctgacacgcaaacttatcttgaaagattggagcgaactcactttgggcaaacttatcaccatagaagcctctggaatggtgggcgcactgatttattgtttctgtgacacagcgtggttctcggctgtcgaaggtgaggtatatgcctactcatcggcatttacagcggttgtgttctggctcattttgaaatgggaagaccatgctgacgaacctcacagcgaccgttggctgctgctcatcacctatatgacgggactttcaattggtgtccatctgctcaacttattgtgcattccagccattgtgttggtatttgtgtaccgcaagtttccaaatatcgaagcaaaaggctccatagtggcgctgatgatctcgtttgcagtcgtagcggcagtgttgtatggtgtcgttcctggtatcattaccgtgggcggatggttcgagttgttttttgtgaacacattaggtatgccatttaacacaggtgttatcgtctacatcttgctactcgtttccaccgttgtctgggcgatttatgagacttatgtagaccagcataccaagcgaatgaacattgctttcttgctttccgtagccttattgggtattcctttctatggatatggctggaaagccgtaggcattggtgtcgtagtgttggctattttatggtatgccctcaactatacgcaacacgtagagaagaagaaaatcccactcatcagtgcccgcatcaagaatactatcttgttaggactactgatgttaatgataggatattcaagttatgccctcattgtcatccgttctgctgccaatccaccgatggatcagaactcaccagaagacatctttacattgggcaaatacttaagtagagaccagtatggcgaccatccgctgttctacggacaggcatatacttctcaggtaaagcttgatgtgcaaggaaatcagtgcatacccagcatgaacgagggagcacccgtatatgcacgcaaggaaaaagcgagcaaagacgaaaaagactcgtactttgtagtgacccataattcgacatacaattatgcacaaaacatgctcttccctcgtatgtacagtagcttgtatgcacaagcctacgaaagttggttaggaggtgtagagggcacacaggttccttacgacagatgtggcgagagtatcatggtcaaagtaccgtcacaaatggacaatctccgcttcttcctaagctatcaatgcaactttatgtattggcgatacttcatgtggaacttctcgggacgccaaaatgggatgcaaggtaacggtgagttagagaaaggcaactggatatctggcatacctttcattgacaacccacgacttggcgaccaaagtaagttgcccgacgagctgaagaacgacaagggacacaacgtgtattacatgctacctctgctattgggtgtcattggcttgttttggcaagcatggcgtggcaaacgaggcattcgccaattttgggtagtgttcttccttttcttcatgacaggactcgctatcgttatctacctcaaccaaacgcctatgcaacctcgtgagcgtgattatgcttatgcaggttcgttctacgcatttgccatttggtgcggcattggtgttgctgctattttcgacttactgaagaagtatttgaagctcaacgagacactgattgcaagcgtagccgctgtggcatgtctccttgtaccgatacaaatggcaagccaaaactgggatgatcacgaccgaagtaatcgttatacttgtcgtgatttcggtcaaaactacctcatgacgctacaagataaaggcaatcctattatctttaccaatggcgataacgacacattcccgctctggtacaaccaagatgtggagggtgtgcgcaccgatgcaagagtttgtaacctgtcttatttacagaccgattggtatattgaccagatgaagcgacctgcttacgactctcctgcggtgcctatcacttggccaagacttgactattgctctggaacgaatgaggcagtaccgattcaaccgtctttgaaaaacgaattgaaggagtactatcgtcaatatcctgaagaggcgaaaaagcaatttggcgaagaaccattcgaattgaagaacatcatcaagtactggatgcgctcgaaagatgcggacagacaagtgattcctaccgacactgtttatgtaacgatagacaaagaagccgtgaagaagagtggaatgatgatggcttcagacaccattcccgataagatggtgatctcactggcaggtaagcgtgccttgtacaagcaagacatgatgatgctggagatgattgccgagtgcggatgggtgcgtccaatctatattgctatgacagttggagccgataattacatgaatttgggcgacaactttgtgtgtgaaggtttggcaaatcgcatcacacctttcaccactaacaagcctggcgtgaagaactttgatacagaaaagacgtacaacaacttgatgaataggtataagtttggtggtttagagaagcctggactatacatagacgagacaaccatgggcatgtgtatgactcatcgtcgtttatttgctcaattagtaaccgagttgttgaaagaaggaaagacagagcaagccaaaaaggcattggctaaagcagagaaagtacttccagaatacaacgtaccacatagctggaagagtggttctattgagattgctcgagcttatgcactgttaggacaaacagcaaaggcaaaggatatctgtcaaaagatgtggaaaaaccacaagcaatacgcacaatggtatctcagtctcgatgactttaggttcatggcatcacaaaatcagtgcctgctctacttccaattgatgatggaagtgaacaaggtaaccacattattcgataagaatttggctaaaaaacagatggatgaattgaacagattctacaccatctatgctcaaaagggtgggaaaccccttgaataaagataacaattaaagctgccgaaagttctacaaagccatttgtagtaaactttcggcacttttttaatagctaaaaagaaacatccatttatgtttattgagcaacctgcaaaatggcttcgttggttatatcccaatgcattgtggcgaatggataagaaagtacatgcggtttatcttaccttcgatgacggtcctgtgccagaatcaacaccttttatattagacacgctcgcccaatataatgtcaaagcaactttctttatggtaggtgagaatgttttgcggtatcatgatttgtacaatcgcatcgttgaagagggacaccaagtaggcaatcacacctttaaccacatggggtcgttcaaacattgggcattaacttacggcatcaatacagagaaagcgaacgaattaatacacgcacacctgtttcgtccaccgcatggatggatgcgatggtcggtatattggtggctatcgaagcgttataagattgtgatgtgggacttagtaacgcgcgattattctaaatggatgacacctgaagacgtgcttaagaacgttaaacgttatgctcgaaatgggtcaatcattaccttccacgattctatgaaaagcattgacaaactaaagtatgcactaccagaagcgctaaagtggttgaaagaacaaggatatgaattcaaaactttcgactgagataaaacaagaagcgctaaaattgggctttacaaaatgtggaattgcacaagctaaagccgttgatgaatggactgccacgcaatataagcagtggattgcagaagaaaagtgcgcaagtatggactatatgcgcaacaacatcgaaaagagattagacccacgaatgctcatggacggcgtgaaaagcattgtatgtgtagcacttaactacgctcctgcgcaattcatgcccgaaaaagaatggcaattggcagcttatgcttatgggcaagattatcattatattgtcaagaataagctaagacaactcgctcaacgctttggatttcatgagataatccagcccaataatccaaccaacgacggtgacgctattcattatcgcgtgttttgtgactctgcacccatattagagcgttattgggctgtgcaagcaggattgggttggatgggaaagcatcatcaactcattgttccaaaggctgggagtatgttctttttaggggagcttttccttgatattgagctaacctttgacacacccatggaaagccattgtggcaattgtcgtgcttgcattgaggcttgtccgtcgggagcaattcagttagattcatctttagatgccaataaatgcctatcctaccagaccatagagaaccgaggagaactggcagagggtgtagctaaggatatgggtgacatgctttatggctgcgacagatgcttacgagcatgcccatggaatcgcttttcaaaaccaaatgacacgccggaattgcagccaaagacggaacttttagaaatgacacgagacaaatggatgaatttatctgtggagaactaccaaaaactcttcaaaaaaagcgcagtaaagcgtgccaaatacgaaggtctgatgcgtaatatccgagccattgcatcgttatcaaagaataaaaacaaagaataaaacatactacaccatgtcacaagaaataccactcaatacgattgaaaaggaggttgccatcttttttcaccactatgcgcttgaaatacttaccaaacagcacgtagataggtccaacaagcgacaggttaaagaggctttgttagaacattatgaacaaatatatcctgcatttagtcaaacgaaagtgtttgaaagatgtttccaaaaggcagatcattatgcgatggtagcagcttatcgcactaatttttctttgctattagaaggatacttacccaccattgacaacgaataacaaccaaatcatttagaagaaagatctggaaaatggggtgaacgacagaataagaagagcaaaagcaccagtgcaatgatatgacgctggtgcttttgtgtacgttatcggcacgaatgagtgcaaaatcttaatccttattgcatctcatatacaatgttcatgagtttttgtcccaatgcttctgcctcttcttgcgttgctgcttcactgtaaacacgaatgattggctcggtattgctggctctcaagtgaacccacttatcagcgaaatcaatcttaacaccgtcgatatccgtcactttctcattggcataaatttctttgatacgatcaagaacagcactgatgtccgtctctggcgttaaatctatgcgattctttgccatgaaatagttgggataagacttgcgaagctcactcactttgcaacctttatgtgccaaagaagacaagaacaaagcaatgcccaccaaggcatctctaccataatggctttcaggatatatcactcccccattgccttcaccaccaataacagcattcacttctttcattttggtagttacattcacttctccaaccgcagaagcaacgtatttacctccatgtttctctgtaacatcacgcaatgcacgtgtagaactcaagttagaaaccgtgttaccgggggtatgactcaacacatagtcagccacactcaccagcgtgtattcctcaccaaacatggttccgtcttcacaaataaatgccaaacggtcaacatctgggtccactacgatacctaaatcgtatttcccgcttgccatctcgctcatgataccaccgagatttttagccaatggctcgggattgtgcgcaaaatcgcccgttggttcaccgttaagaaacgtgtactgaacgcccagtgcatccaacaacttgggcagaatgatgccacctacgctgttgatactatccaccactacattgaacttcgcttttttgatggcaggcaagtccacgagtttgagtcctaaaacatcgtcaatatgccgctgatcataagaattatcttctgtgtacttacccaaatggtcgacatcagcgtattcaaaatcttctttttcagcaatatccaacacctcgttgccgttagccttggttaagaattcaccttcatggttgagtagtttcagcgcattccactgtcttgggttatgacttgcggtgatgataattcctcctgccgattgagacattcttactgcaagttcggtagttggcgtcgttgccaatcctatattgataacgtcatagcccattcccattaatgttccacacacaatgttcttcaccatctcaccagaaatgcgcgcatcacgtcctactacaattgtttggctatccgactttccgctccgacgtatgaaagttgcataagcggatgtaaacttaacgatgtctaaagggttcagcgtgtcgcctgaacgtcctccaatcgttcctcgaataccagaaatagacttaattaatgtcatggtttttatattttagagtaaacttttacggtttaagacaccagcaacacattacttacctcgctggtaggtaatatcgtataggcaaggatatacactttgtcgagcatacgaatggttactggagtgtggcacgattaggcgtacacgtgcaatctcgtcaccctcatgcgctggtcttcccaaacgaatgtacgaaaacggaactaacaaccctgatggaacttctgtgctacgataagcgaaagccatcaaactctccccctttacaaaagatgcggtaaaggttccgctggtattacgcaccatcatcttatctacaatcgccgaataatagggacttagattggagagttgaacagaatctgtcatcagattacgctctgtaaagcgacacaacacattcgctgtctcaccattcttaattttctcacccgttcctttgcgctgaatttgcatatacacaccggtactactcaacagcacatactcattttgtgctacgtttgtagtataatcttgtgaggcaaatgtcgtttctgaaatcaccttcacagccgaatcagcaataaatttattgatagcactgcgctctgcttctttttggtctgcataggtttggcggtctctacatgatgcaaaaaagcaaacggaaagaatggttatgagggaaaaaactattttcttcatgatttaatcatctataattaatgtgcaaatataagcaaactcggcaaaaggacaaaggaatacgctttccttttaaggaatattgacggtgtgaaaagcacgcttccgtcactttattaacgtttcaataaatcctcaaaatgcgtaatcgcttgtctcaccaccccttctgcctcacttaacgaacaatgtaaacgcccgccactggcattgacatgcccacctccattaaaataaagtgctgccatctcattacatggaaagtcgtctaccgaccgcaaactcacccacaccagctgctctcggcggtcgtcttcgcgtagagaaatagacaatttcattccttttatcgaaagaggcatgttcaccaagccttcagcatcgcccttgatgaaatgaaaatcacgcatttcttgtcgagaaatggcaaaataagacgcatgataatcgtcaaacacgttcaatttctgaaacatgatatagccccgaagacgtatagcccactgactgtagttattgaatacgttgcgatatatcttatctttgtcaaaacctttggtcaacaactgactgataataaagaagatttcggggcgtgaggagttgtatgtaaagcctcctgtatcggtcatcataccgcaatatattgatatggcacagtcacgactcatcaactcgaatcctcccagctgccaaatcaacctaaaaatcagctcactggtactgcaagcggtggtttccgacaacgacaataccgtttccatatcgggatttgtgtgatgatctatcattacacgtggtgcagtacaggcatctaacactacttgcatttcatccactctattggttgcaccgaagtcaaggcaaaacaccagatgggctttctcgaacaattcctttacttcttcgggatgcttgtcatacctaataacacgatgactattgggaagccattgcagaaaatcgggataagcgtctggcattaccaccgtagcttgcttgccacactgatttgttaaataatcacaccatgccaaagacgaacccaaagcatcgccatctggtgacttatgcccacagataacaatgtgttgtgcatcagaaatcagttgctgcaacaacttcaacgctgctggagcaagaatgtcaatattcatatcaacgaaagtgtttttgagttgttgagtttcaagttttttgttgacgagccaaagcactcgtcaatggctttgctcttgatgtaactatttacgttggtatcgtgaacttagtcacaaggacgcattgataacttcaagcccaacaactcaatcactaataaaacttagaacaatcgattgggatatacaccctcctcaattaacttttgaatgcggtcaacggtagcctgacggtcagctgcgtaggtcacaccaaaccatttgctggttgtatccagcacctttaccgtagcagtgcccgcatgaatcaagttgttgaccactaaaggaatgaagaactctgccttcaaattctccatattcttagcgtcagacaagaattccttgaagtattcgtcgctgtactcaaaataatcgggggtgaaaccccacatattcatcgaaacaggggtattgtcttctacagcaacccacttgccttcttcgtccttataacataccgttccgtccacacgcattatttcggtacgctctactacctctgtaagatgtccttcattgttcttcgagcaaatgccacgtgccacagttccattttcagagagtgtgttaccaacacggaagcccaccattgaatatcgattctttgagccttctggcagttcggaaaggaattttcccatcaccatataggcatctcgattgtagaagtcgtcacagttaatcacacaaaatggttcatttatcaagccttttgccatcataacggcatggttagtaccccaaggtttctgacgaccttcaggaactgtgaagccttctggcagcttgtccatagcctgaaagcaaacttcagcgggaatatgtccttcgtatttagacaacaccttctgtctaaaatcgtcttcaaagtcttttctgatcacaaaaacgatcttcccaaagccagccttgatagcatcataaatggagtaatccataatcgtttcaccgttaggtcctaagccgtctaattgtttcagaccgccataacggctacccataccagctgcaagcaataataatgtaggtttcattatttataatttttagagttagaatatcgacagtagaatgattctattgtttactgcatttgtttgtcatgcaaagataataaaatcctgcacaaatgaagacatttcatcagataattagaaagctccgtgacaactaatttgtgagagatgtctccttattgctatcggtcaaaggcgtaaaacagactgttttccacaccaaaacagactgttttgccatagaaaacagtctattttgggttcatacctcaacgcctttttctgtcaacaatttagagagaatgcgtaaaaatattagaatggatagccaatagcgagatgaaaactgttgccgtccctaaacgaagggatgttataaatgcctttgcgctctgtatggtaaggcacatggataccaataccccaatccaaacgaatgacaaacaacttcatgtcataacgtatgccacagcctgttcctaccgccatgtctgtgagtaggcttttccatcgtagttttccaccgggtcgttggtccgacttttgcaacgtccagacattgcctgcatctaaaaaaatggctccataaatatcaccaaataagtgaggacggaactcaaggttggtttggaacttcacatctcctgtctgttcgacatacgacatgcgcttattttggggtctgtacttccccggtccgatgcttcttacattgaaagcacgaacactgttggcacctcccacgtaaaattgttcataatatggcgcttccgttgcattgccataactataaacaacgcccgcattgatatgccctaccaatgaatgattctcaccgatacgccacaatttcacaaagtctgtttccactttaacaaattgagcataagggtttttgaacatctttttattcttttggttccatttttcaccagcagccatgtacccaagagagaggatattggcggcttcgctaacagtggtcttccatgcaatcggactacgatagcctcgaggactggtatattgataagaataactcatcttcggcacaaactgatcgcgcatagaaatctgcaagtatggattcttgtccaagagaaccctaaacgagtctgtctgactggtcatgtattcgtaggacaacgtcagtgggctaaactcatgataagactgaggtgaggtgttaaattgataggttaaatcgccagagatgacatgccgcttgaaataatctgcacgattcaagatgttattcgacattcttaaaatcgtcactggaaccccataaaagcggcgtttacttattcttctgccttcatcttttcgcaggctatctcggacagaacgcctttgagctgtccaaaagagattcttcggtgtcaacattcgtgggaagataacagaaatatctccaccatattcgtacgaattcattttagacgaggagccttctgcatgatgtcctgtttgccactcatacgacccatgcaaattgatgtctaacttctctgcacctcggaaggcattcagtttggtgaaacccaacaccagttctggtccaaagcgattggatgtttttcctttggcattggcattgacataaaaactataacgcttgtcgaaaacacaatcgatatctacatcgagtgtgtcacacagaggcgaatgatttcggggcgtaaatttgaaactactgtaattaaatagtcctgttgcgtgcatgtaatcattcgacatctcttggttagaaagccgataaagctgccccggacgcaacttcaaagcagaatatatcactccgggacgtagcggtgctttacttccatgatagtgcaaagtaaagatacgttgctggagcgaatcggtcaactcttcgataaactcattccgtaaattcacattcaccttaccaatataccactggcgcttcaccattgcatccaagctatcagcttgctgataacgcagttgtaccttgcaaggtgcttgtaaggtatctgccaaataagacgcatcggttggtttggcataataatagccattgttgcgcaacaaacgactgatacgttgacgctctgcttcgagtgctggcacactaaagggactccccttcttgatgagcgcatcttcatgtgttgcctgaattaagctatctgcatggggtgtgaagttcagatagcgaatggagtccaattgccacaacggtcccatgtggacacgatatgccactttggctttcttgggatggttctgtggaacaatctcatagtctactttcccatggaaataacccaatttctttaattggagttcacctaccgacttccgaagagctggatttacttggctcaagagtttgggtcgtgacccaaaagcacgtgttaaccatcgactaacggcactggtgtcttgagacaatgcattccatatccatagtcttacagggaagggagttcggtaataactacttccaagaaaagcacctgtaggagctgttgccaataccgactccatttcagacttggtgtattctgcatgttcgctcttgtcagcatcatcaaattctattttcttcagacccgtaaagagttgttcaccatcaggaatagcgctggtggtagaacatgccgtaactatcaatgatagaagtgcgcataagagaataaaattattgcattttctgtatttcatttgggatagaatctttcttttgaggttgtatagggtcaaagacttttttatcactcttgaacctaaagatatctttgaaatgtgccaatttacgacgccatgtgaaacctacgccatattccccgatgagtccttccaaccaatcgtaggtgttgttgttataaaacaggcggagatactgacttgcattctggttcaaacggtactcaagttccacgttgtcaaagaaatactcgtctctatccgccattatctcttctcctgacgacacctttccacctacaatcacgcgcaatctgttgttccacaagcgttttgaaaagcggaaattataatccgtatgtataccacccgtggcagtggtgctattgtcaatgctcattcccaagtcaagtcccatggaccgcatggctgacccagcaatgtcattgatttgcgattcgaggtaagaactcaaggcattgttcattgagaacgaagccatgttaccatcagtgagatacatccctgacaccaacatggtgatggcgaccttacctctgccttccacagtcatggtgttcagttcgtcttgaatggtaacatcatttggagcattgatgataaattcgatgccaggattgtctaagttttgagacaacttcactccacaatcaaagtccaccactctacccgctccagttcctgcgttgaccgttgccttgatatcctcagtagcagtgatatgaagctttggattcatgggatcgcccgagaattctatataactaccgttttgaatgtcgaacgttttgaggggtatgacaggcagagagtatttcatttctcctgtatttagtgtgtaacgtcctgtcagttggaaattatctacaggattataattcattcgaagttcaccaccaccttgcaaatctatataattggtatggtcagcattgagcatacaaacaatgtgtgccgcctcatcaatcgttgtagctaaggacatatcaaaccctctcagtttaggacgttgaaccacttctacgacagaatctttgaaattggtgaatttcaccagctcttctaactggttgtcggtagacaattcactgtctctaagcacataagtcatatccgttgtacctaaaacattcagcacacctcgcatacgaaggttgtcaacagggcctcgcatcgtacctaagaagtcgacgaaggctttcccataggcttctgaacgtgggttttctctggcatcaatgatttcaaagttttgggctctcatgcgaatgttgagcatcattttatccaaattagagaagtcgaacgttccataaatattcagaggactattgttattggcaaacaactcaaagttttcaaactttaactgactatgagctatcttaactgggtcattggcaaagcgcatctcaataccataaggctcactgaaaatatatgaagaatccaagaacacctcaccatcaatatcaggcttcgaagccgtacccgttagcatgatatcgccatctgcatagcctcgcaaccctataatcctgtctggaataaagccatttaccaactgaagtggcagtcgttccaaggtgagtttggcgtctaaacgatcccttttaccataagtaccggacaccttcgctacttcttgtccttcactataaagcacaccatcgatgaaatgagagccgtcagacttaggcatatatacaaattcagaactcagattgcccattggactcttctcatagtacatgtcttgcactccgacagttgaagaaatagacaattggtctttggtttgaatcacgtggaagtcaccatttagcgttccggcaatattgggtacataaggaatggcactcaagatattttgcaaagtaactttatgtacagagaacgtaacatcttgcaacacatctgcatggtcatcgttagacaatatctgtatgccagtaccgtctttcgagcgtaggctcatttgcgcagagatacgcttattcttgccaataaatagatagttatcttgattgacgtcaaaatctttataacctaaaacttgcttggtgctatccaaatgggtgcgtattccattcggttctaactcagccgacagacctaatgcgatacccaaacgcccttgctcatcaaataattttgtacgaagacttgttcctttttcactcaagttgccttgtgctatggctttgaaaacatattggggattgaaagcattgttttcgattcgggcagcgtatgtagtaccttcttcattggaattcaacgttaggtttactgtatccaactggatgctatcaatcaatagcttttcaataagtaaccgtccatctaagccttcatgtggcgatgaaaagaagtctaccgaggcttgatttaattcgataccatactttcgcatgaagttgaccaatacatttttattacctgtatggaggtgaaaattagcattgggtaaatgagctcgcaattttggttcatcaatcaagctctcttttagctgtcgctgcacttccttcataaagccattactgtggctaagtaatcgttgataaccatacccactttgtaacatcaattgaaaatctcctgtttggaagttcgcatctgtcgtatctcgtcgcgtcaagacattcagattgataggttcagcatggtaacgacgcccattatcaaggatggtgaggtcatcaatatcgccagcaatacgatagttgtttttgaaatcagtggagatgtttaacttgcttttcagacctacaacaagagagtcgtccatcagtcgatgcaagtcaagatgccgcaagtctgtttgtagattcgcttgtacatgtctcgaacttgtcaatgcatcaaacttaacgtcgcctctcatgaaagaattattgctatgtatcaatcctttcgcatgcccattctttacagttacatcggcagttgtcgcatccaactgatatttatcatacgaaaatttatcaatttgagctttggcaatcagttgagtcttaggagacaagaaatcaaagccatgtcctttcaagtcaattttccccgtgaaaggatgcaaaccttggttgggcaggaaatgttgtaacggcaatcgacttgcattaagcttcgcttgataactctgtttcgacgcatccaactgtacattggcattcaagacgcccccaccctgttgcgccttaaaggtagaagcgtattgctgaccatttactgctacatgtcctttgaagtcgatgttctgcggaatggtgacacgcttgcgggttgctggactcagaaaggcttttacaaaatcaagctttcctgtgctcacattcaacatggcatcagccttcaagtggtcaatgtcgttgagattggcaacataacctgtcgcctttgctttgagagcagtgggtaaattcacccgtaaatcatggaaattcatgcgttgaaggttgccctgaaccttcccatctatcaccaaaggggagcgaggccattgctttcgaacatccacaggaatgcttcccatgaatcttaccaaatcgtttttgcccaaagacgcatgaagtgtcaaattcagcttacctggattctgattcgaaaagctattcaaatccatgtcagcatctgccaataaattggatgatgatgttctcatcttgacctgacgcatatacagcttcgtagaatctaatgccaatgcaccagacaacttctgtaaatcaaagccacttttctccttaaaagccatttggcggacattcaatttgagctttgacgcttgatattgaagtgcatctatacctacctcaatattacttaaagcaagatgattataatctatccctttcgttctgcccttccatttattatcataattcaactcgccatctgtccaatcgaaccgtcctacttgataatttccttctccaaggtcaaagaaacctttggaaacctttgcttttccaaggtatgttcgcacttgtagagtatctcctgggaaatgaacagtaacatccgtgtgacggacttgtaaatcatctacatttattttccaaattgatttggactgactggtatcttcgggaacggtatcgggcaaggtaaccactaactttgcatcttccaaagctaatttatcaacattgacaaccgaaccactgatgtctattccatgactgaccaatgccaactctccgatagtaccacgaacatgagctgcagcaataaaatcggatgagttgaggtgtaagccttcaaacttcagctcatcaatctccactttctttttgaacaaaggcaacaactgtacgtctgcaaccattcgttgcgcaaatccaatcgtgtccttcatctgtggtagggagtcattgggtctgataataagcacattctccatgcttaaatcaagtggaaatgccaacctcaccttgtctatcgacacctctaaacccaacttcttagaagcataacgggtcgtttgctgtaccaaccattgctgtacaggtggcatatagagcaggattgcaacgagggtaagtagcaatgctggaatacctatgatgcttacaatccagataagtgcttttttcataaatacattgtcaagtgagtcgtatcattcaacgggcacacgatattattgcaaagtaaacattttttaatgtaaaatccgaattttctatcctctttttatcctaaagttttgattttaacagcaaagatgaatgtacaaacaactttttctcataagaaatcgtctcccattgactatcattaaaagcttaaaaaggctctcgaaaaactatccgagaacctttttacctaacgaattcttacttaaatattcaacaatctgttaggtgcaaaagtagctaaaaaagttatttgctccaatccttatttatgatgaattatcaagtttggctctatgcgttatatgcaccacagtgagggcatctacctttgcttgggataggttgcccacaatgaccacaaacatattgagggcgggcatggtgaaggtattggcgaattgcaaacacaacgtacagtaggagtaatggataaccaatataatacaaagttgtcagtccaaagacaatataattgaccgcacacactgccaaaagcccacttaaatacatcacagcatcggtaaaaggaagtcgatgacgaacatcgtccacagctgccaatcccacgataagcattccccaaaccatacatagaaacaccattaacaatccaggaactgaaaatggattgagtgtgggatgatagtaaaaatgacgccacatgtcaggagcgaaattttgtatgctggcatacaaggtcgaagcaatagctaccatgatacaaagcaaggttggatagaacgaagggatgtccttaaaatgtacaatccatgctttttctttgaacaggcgacgcatccagtaggctatggctatcaaggaaatcacaatcaagaatatgagtaagtgcgtgtctgagaaggtagagatgaactgtgaaataggatcgtcagggacgacactcggtaagagttgcgtttcatgtatccatccaaaggtatgttggtcgctcgcaagttgcacccacactgaatctacgctgtctgtgggaagcatacgaatgtctgccaccaccacatgactatggcgttttaataccaatgtatccacaagcaagcctgacaacacttcttcgggctgttgttcaaacaagacaagcgaatcactcttcactataaaattatagttgttggtgtaatgatgcgatgagtagaagtgtaaagaatctacttgattttgactcaaaggtatcaatgcttccgatttttgtgcgggtcgatgataacacgaactcatcatgactatcccaagtagccctatgagtcccatttttcgcaagtaaaaacttggatgaaagatggcaaaaaatccgttcctcttattcatctgcataaacgttcatttgacattcgtcacacttaaactccaatctaaacacctttccgtctgccaatctaagtctgagtggctctttccatgtgggtttcttaccgcccttgcgtacacaatagcccaaactataacgtaaacagtggcggcactgcatgatcaacacagcgtgctgcgctgttggttgcggcttactttgtgggttcacctcgtatgcgtcttctatcgtcgtgagtccttgacgcttgtagaaggatttggcaaccgagttggagatgttataaatataaggaaacttttgatattcgggttgccaagtcaatcgtgccttcttgcgcacaatattctttgggactgcagaagaaaccgactgctctatttcaagttgtgcgataacccgtctgcgcaaggttgccaagacactcgaaggaataaaataacgcgctacctcttcatccaattcaatatgcgctgccacataagcggtatttcccaacttccccaattgacgtaaaatgttatcacgctgaggtttttgagcaaactgagcctctatttccaccacttcttttactgctcgaagccctttcccactcgcttttaacatcaaaccgtggtcagacatcgacagagataacgaaatgggaattttacgctctgccgtttttcctgatagaattttgttaaaagcctcatcattattgcgatacaacgacatgccagatttcaattggcttggcattttcaaaggataaagacgattgcctttcgctcgattcacacgaaatccctccaattctcccctttcattgatgaaacacaaaccgtcaccattagcgaaactcgctgtgcctgctacattaaaagagccatgcgacaactcttttaccttgccaacatactcgcccaatgccttaggtgtaagaggagagtaaatatctggttgccgctgatgcaagaaataattggtatatcctcggttaaaagtcttcttcaaattgggtgtaaacgtgtacgacacctcccctattgaggctcttcgatagtcgcccgagcgtcgttctatcatcttgttgagtcgctgagaatatgcagcaaccacattttttacgtagtcaatatcctttaacctaccttctatcttaaatgaacacacgcctgcgtccgccaagtcctccaactcatctatctgactcaaatctttgagtgacaaaagatgccgctgatgcacaatttcctgaccgttcgcatctattaaatcgaacttcattctacaaaattgtgcacacgttcctcggttcgcacttctgtgaaaacagtgctgcgatgcgtaacaaagccccgaatagctcacacacaaagccccatgtacaaaagcttcgagttgcatttcaggcacttgttggtgtatctcccttatttcttgcaatgaaagttcacgtgccaacactgctcgttcaaagcctatgctctgcaaccaagccactttttccgccgtgcggttgtctgtttgcgtgctggcgtgtagtgctggcacatacgacccatcgcttggcagcaactgcagtattgccatatcctgcactaacagcgcatctaccttggcttggcacaatgctcgcaagagatttttagtgtcgtccagctccgtttcatagataattgtattcaccgtcacatacacctttgcgccaaactggtgggcatacaagcataactcacggatgtcatcaatatcattgcccaccgatgcacgtgctccgaacttcattgcgccgatatacacggcatcggcaccatggtcaatggcagcctttccgcattccaagtttttggcaggagccaagagttctaacgttcgcatgatgctgctttttattgatacgtatgctgaaaattatctcaaatactcgttgatccaattcataaataacaaatgggcatgtgctcgccacgtaacaacaggacgctttgcagggtcatcgtccaagtaataatgcttgggctgctccacatcgttacgttttcctaagtctcgctggtattcttggtcgagtgtacggggggcatactccaaatgtcccgtgataaagaactcctttccgcccttcgtcatacacatactcacgccactctcttccgactctgccaacaacgtcagttcaggatgctggaggatatcctccttcctaatctcggtatggcgactgtgcggcatgcagaacacatcatcaaacccacggaaaatgcgtacttcgggatatagcacccgttgaggaaagatgccaaacattttcttcggaagcgcatacttattaatacgttcatgaaaatacaagcccgcttgcgccgcccaacatatatataaggtggatttgagcgaagtcctcgcccacgaaaatatctgcgtcagctcttcccaataatccacttcttcaaaattcaaatgctctacaggtgcgccagtcacgatgagtccatcgaacgactgcgatgacaattcgtcaaaataatgatagtaagcatccatgtgagcggctggtacatgcgttggcgtgtgcgaccgaagcctcatccatgccacttcaatatccaaaggagatgccgacagcaaccgcaaaatatcggtttcggtctgtaacttggtaggcatcaagttcaatacggctatcttgataggagcagtatgtaggcgctgctccctgaaatctgcgacatctaccgagatgttttcagttttcaagcgttcgatagctggaaaatgggatggaagatataacgacatgcacgcaatgataacagagtatgaacgattgacaaccatgtaaagtggttgcgatgcaaaggtacaaaaaaggggaaagaaagactcatttacgaccgttctttttcttaaaacagctaaatatcgcacaccatctctatcactctaccattgaagagtcatatttttacaacgaagaacacccgtaatacagcatttataatattatggatacgttgtattggaggataataaatgctgaattttctttacaaagtgcctctcaaaactcgcgtgaaaacatccaacagcaaagttggtcgcaaatatgcgaattatgcgaaagtttcataacctcttgttattgaacttgttacgtttaactctgttccttttcttcctattttcaccctcttttgtcgattaaagcattgagataaccctcttatttgcatgctttaatgctgctgaagcatgtgaataacacctctaatgtatgtttccaagaccgttaaatcaatgtttcaacttaaaaaggcatttattttgctcaaatcagcccatttttgcagttcgtttgcctattgattttttctattttgaagattttagatggtcgttttttggtaaaataacaggacaaaaacaataatttcctttaccaaaatatggcaagggataaaagacaagcccttttgcataaaaccccttatagtatgtaaataaacgtgttatctacatgctataaggggcttatctatatgtttgaatttcaatatcaagaataagtaggaaagacaagtgtgacacatcatcttatcatacttgctctctgatattgacaactgttacatacgctctttcaacaaggcaggaatttcacaggtttcgcgagccactggcacgcctgcggcttcaaaggcagcaatcttctcggcagccgttcccgaaccactggaaataatggcacctgcatgtcccatttgtttgcccttcggagcttcgcgtccagagatgaaagccaccactggtttggtaacatgttgcttgatatagtcggctgcacgctcttctgcatcgccaccaatctcaccgataagggcgatactgtctgtctctgggtcgttttggaacatctccaacaagtcttggaaatacaaacccacgatgggatcgccacctacacctactgcggtagactgtccaaagccagcagcagtgaggtcggcaaccacctggtaggtcaatgttccacttcgactaatcacacccgtgtgccccttcttaaagatattggttggcataatgcccaccatactttcttcaggagaaatcaatcccgggcagttaggacctatcaacttggctcctttgtcggagatgtaacgataagcctcaacaacatcgagcgttggtacgccctctgtaatacaaataatcaactgaatgccggcatcggcagcctcgagcatggcatctttggcaaaagctgctggcacaaaaatcaccgaagtgttggcatctgtagccttgactgcatcttttaccgtattaaaaacaggaatccctgcaacctcttgtccagctttgccaggcgaagttccacctaccacattggttccatactccttcattttcgtggcatggaaactgccatcgcgtcccgtaattccttggacaattaactttgtatcgtgattaattaatatactcatcgctttatagatttaacatggttagatatcttatttgttcatgcactgttgagccaactctacggcttttttaccagcctcgctcatggtcttagccacatggaacttggttcctttcaacagctcgcgaccctccgcttcattggtaccagtgagtcggatgacgattggcatgtcggtatcgagcatcttaaacgcttcgattaatccctttgccacatcgtcgcaacgtgtgataccaccaaagatgttaatgagaaccacccgtacatgactgtcactgagcaacagtttcatcgcctcgacaatcttcgtaggattagagctaccgccaatgtccaagaaattggcaggatttccgccatatagcttaatcatatccatggttgccattgccagtccggcaccgttgaccatgcatccaatctcaccaccaaggttgacataactaaaccctttgtctttggcatcttgctctttgcgctcttctgccgtaggctcaaagagttcgaaaacatcaggatgacgatacaaggcattgttatcgaaagtcatcttggcatcaatcgccttcacctccccactcttggtcactactaatggattgatttctgccaacgaagcgtctttctctttgaagagacggtacaggttttggaaaactggaacggcttgtttcactaacgctttgtcatcgaaaaggcaaaaagcagcttctcttgccaagtaatcaggcatgccaatgagcggatcaataggtatcttatgaattttttctggtgtatttttagcaaccgactcgatgtccataccaccctcacgacttaacatcagaatggcagactttacttttcggtcgatgacaatacttacataatactctgacgcaatatcaatagcctcgcctaccaagatacgatcgacggtaaagcctttgatatccatacctaaaatttgagaagcatattccctaagttgttcttctcctttagcaactttcacgccgccagcctttccacgaccacctgtatgcacttgtgcctttacaactgcacgctctgatcctaaggattggtaagctgatacggcctcattgaccgtccgacacaatacactcttgtctactggcaaatggtactgtgcaaacaaggctttcgcctgatattcatgaaccttcatggcaatttgttttgttagtaaatagttttgttaactttgcaaatataaatatattttctaagggacacaaaaaaaatcaaaataatcaaacatttttatatttcaattgcaattgggttaagattgcttatcgtcagtcagcccaagaattgatttttgaaacaagattaaacctttcgaagagaaatacatcaaaagaacataacgcatcaattattttttttgaagttacactgatgaagcgaacgctatttttactattgatattattcattatttccattgctgcaataggtcaagaacgaaaggttacaggaactctcaaggataaagacacgggaaatccgatgacacaaacgactattcaattattaaaattggatagtacttttgtccttggagcactgtcaaacgagcaagggaaatttatattaaccgtacccaaaaacggtaaatatatcctgaagatatcgagtgtcggtcacaaagtcctctttaagaatttccaactggcgcaagacaagaaccttgacttaggaatcatcaacatgcaaacagatgcagtcttgttaaaaggagccacaattacaggacaagccatgaaaattgtggtgaaggaggacacatttatctataatgcttctgcttaccggacacccgacggagcggttgcagaagaattagtgaagcgcattcccggtgcacaagtggatgatgatgggaagattaccatcaacgggaaagaggtaaaaaagattttagtcgacggaaaagaattcatgacgggcgatacaaaaacggcaatgaagaatcttccaaccagcgtcatagagcaaataaggactttcgacgagaagagtgatttgtctaaagtgacaggaattgatgacggtaacgaacaaacagttctggattttggattgaaaaagggagctaacaaaggttggatgagtaatgtagatttggcgttaggcacaaaaactcgctatgcggaacgtctcatggctgcttatttcaaagacaatctgcgcatcatgggatttggtaatgcaaacaattcaaacgatatgggctttggtggtcgtggtggaggatttggaagaaacaggaatggacttaatgcgaggaaaatgacaggcttcaatatcaattatgaagaaaaggacaaattgaaattaaatggaagcattcgttggaatcattcagacgatgacgttgccacccgctcatcaatagagaactttgtcagtaaaacaggagctttctccaataacatcaaccagagctataaccgtagtaatagctggaatgcaaatatgagattagagtggatgcctgacaccatgactaacatcatgtttagaccaagactgagttacacggagaacgatggtagaagttggagacattcggcatcgtttcaagacgatccgtacttgtatgtaaccgacccgcttgcgctggaatcattggacgagctggctgagaagaatttggttgtcaacaaacgtagccttcaagctgtgaattatggaaagaacaaacagttaggaggcgccttgcaaatcaatcggaagtttggtcagaaaggcagaaatgcaacccttcgcgctgatgcctattatacagaaaatgacaatacgaacctgtcgacgaacaatgtacacctatataaaataaaagatgcacagggaaacgattccacttatcaaaccaatcgatacaatctcacacctaccaaaaattggaattacagtttacaagcgacttacagtgaaccgctatggaaggcaacgttcttacaattgagttataaattcaactatagctattacaaaagcgaccgatcgacgtatgacttcagtaacttaggcgagtcgttctttcaagacatcacacccacgtatcgcaactgggacagctacttaagcagacttgaaaagccatacgaaacctacgagaatagagaactaagcagattttctgaatatcaaaactacacccatgatttagagttgatgttcagaatgattcgggaaaaatatcacttcaatataggtatgatgttgcagccccaaaaatcacatttcatacaacattatcaaagcatcaacgccgataccacacgtactgtcaacaacttgacaccaaccttgggatttagataccgattctccaaggtgagtaacttaaaggtagattatcgaggttatacgtcacaaccagcaatgactgatatgttggacatcacagatgatagtgatccgttgaacattacgaaaggaaatccaggactgaaaccgtctttcaccaataatcttcgagcaacctacaacaattatatgaaaaagtatcaacaaagtgtcatgacctttttgcactatcaaaccacgagcaatagcatcagtagcaaagtgacgtatgacgaaaccacaggcggacgaaccgtaagacctgagaatatcaatggaaattggaacatcaatggtggactgatatacaatcgttccatagacaccacaggtatctggaacatcaacacatggacacaagtgagatataataacagagtgggctaccttagcttgaacaacaaagccgattctgagaaaaacacgacacgcacattgggcttgactgaaagactcgctatgagctttcgcaatgactggttagaagtagaactcgacggaatggttaattacgaccacacaaggaatcaacttcaaagtaggaacaacttagacacgtggagatattcgtacggactcaatgtcaacataaccgctccttggggaaccaacttgtcgacagatattcatcaaaatagtagaagaagatataacgaccagtcgcttaacactaacgaactcgtatggaatgcccaaatatcacatagtttcttgaagaaacgaaacttgattttatctctccaattctatgatatgctgaacaatcagagcaactttacacgctccattgatgccattcgtcgcagtgatacggaatacaacagcataaacagttatgccatgttgcacgtcatataccgtctgaacttgtttggaggcaaacaagcacgccaagaaatgaatcggaacgaaccccgacatggcggactacagcatggaagaggaagttggagagaccaaagaagaggacacttgaatggaggaagatattgacaagaagtgaaacatcaaagcattaaaaggcttcagtaatcactttatcaatcaccgatgggaagtatttcatttccaactgatgctctttttcggcaatgtcttcaacagtatccgttaaatctaatggagttcgatactgcgcaataatttctccaccatcacaaacatcgctcacccagtgcaccgtaaagcctgtttctgtttctccagcagcctttacggcttcgtgaacatgatgcccatacattcctttcccaccgaatttaggtaaaagagctggatgaatattgatcatacgcttggagaaagcggctataagaaaattaggaatcatcaataaaaatcctgctaatacgataaaatcaatatcattactttgaagaattggtaataatatggaagcatcattgaagtcttttttgggcacaatgatagtaggaacgcctaaacgtttggctcgcgtcaaggcataagcatcacttttgttactcaaaaccagcgaaatttgaatggttgtcgattgagcgaagtgtcgaataatattctcacaattggtgccattaccagaaacaaaaatagcaactcgatgaggtcgagcatgtagagcatttaagaacgaggtagatttcatatttttattcattaaaagaaaataaacaacaggttattcatcatcatcttcatgatcccaatcatcgatatctccaaatccaaagagagcaggttcgatgaattcatccatctttcgacgatcctttttcgtgggtcttcctgtgcctcgagcacgattcacaaaaccactaatacgactcatttccagcaactcatattgttttggatcggtaacattctcataaatctctggaatgaatttagcccccacgcgttgttctatggtcttaagcaccttgaaagaataaacaacgggtggttttctcacatcaatttgcacaccgggcttgatgatatgacttggtttcacattcacaccattaatcgtaacgcgattattcttacacgcatcaacagcaatagagcgtgatttgaatatccgtgccgcccataaccatttatcaatgcgtgccgaaccagtatcctttactcgcaaagtcgatgccttagctgcattttctgtcatttgaaatgtcgttaatccgttttatcaatgggagattgtgaggacgatgtatgctttcccaactggttaaattggttcatggtgatgttgatacctgccaaaacaaaactttttatcagttcaagcgcaatatcaatggttggttggagtatcttctcttcttcacttgaaaagcgtcctaacacccaatcaacttgtcctccacgctgaaagtcactccctattcccatacgtagtcgtggataattttgaccaataagctgttgaatgtgccctaatccgttatgaccaccgttactaccacttgcctttaatctaaattcacctaatggaatcgagatatcatcagagataacaaggagattatgttgttctatattttccttgtttaaccaataacgaacggcattgccactgaggttcataaaggtagtcggcttcaataaaatgacttttcgtccttttattgaggtctctgcgacatagccataacgcttatcctcaaaaacaatattggacgctttagctaaagcgtccaatactatgaatcctgtattgtgtctggtatcggcatattcactgccaggattacccagtccacaaatcaagtatttattcattgaatctaattcattatatcaattggcatcaatattaagcctctgccttttcttctccttcagctgcaggctcttctccaccctcttcctctgcttcatcagaagtatcacttgaagcagtagccgaacgtgtcatcttaattgagcatacaacaacatccttagatgtagccatcgtcaatccgtcaaaattcaattgacccactttaatactcttaccgattctcaacttggtaacatcgatatcgagatgttctggaatttgttgataaggagcagtaacgttgattttacgaacagacaagttcatacgtccaccatcacgtacaccttgtgccaatccaactaatttaacaggaataccaatggtaataggcttctgatcgttcactgcataaaagtcaacgtgtagcaaagcatctgtaacaggatggaactgaagttctttcaggatagctgtatgatgctcaccatcaatattcagattgataacataaatgtgtggagtgtaaacaatcttgcgaagttcagacataggagcagcaaatgccaatgctactggcttaccatcctctttctgttcaccataaagattgcaaggtactaaaccttcttttctcaaatgttttgaagctttctttccaaggtcctcacgcttctgacctgaaacattaatctctttcataatgtgttactctaaattaagttgataaatttaatattgccttaattcgccatcacacagagaagtagaaaatctacttgccaagacttgtcaatgggtttgtaaaagacaacaacttgtaaatcttcaaaaccttcttggcgtcactgatgtgctcaaaaaagcggtgcaaagttacatgaattatttggaatatgcaaagtttctataaaaaaatgccataatacgcttggtttacttgcatataatggataaaatttctacatttgcaacaagaataaatcgagataacgattgaaacacaaatttaattagaggatgattaatcgcgaactaataaggataaagatagtccagttaacctacgcatactatcaaaacggaaacaaaaatatagacagtgccgaaaaggaactcctcttctgcttgtcgaaggcatacgatctttataactatctcttggaattgattgtagcgataacgcatgaagagcgtcacagagttgagatagctacacaaaaagcaaatcgtgaaggattagaagctccttcacaaaagtttgcttttaacaaatttgctgtacagcttgaggaaaacaaaatgctgaatacctttcttgaggagcaaaaattaagctgggacaacgatatcgaatttattcgaaagatgtgtacacagatagaaagctcatccatatatcaagaatatatggagaatcctgacgattcctatgaagcagatagggaggtttggcgcaagctctacaagcaacttatccaagagaatagcgacatcgatgcactccttgaagagaaaagtctgtactggaatgatgataaagaggtggtagatacgtttgttcttaaaacgattaaaagatttgatgctgcaaataagagtgagcaagaactactgccagaatacagagatgaagaagatcgcgaatttgcacgtaagctattccgtgccactatccttaatgcagacacttatcagcggtacatgagcgaaacgagtcgcaattgggacttctcccgattagcatacatggatgtggtcatcatgcaaatcgccattgccgaaatgcttacattcccaaacattcccatttctgtgaccatcaatgaatatgtaaatttggcaaaattgtacagcactccgaagagtggtggctacatcaatggaatgttagacgctattgctcgctatttagtagacacgggtaaactgctcaaggctttaccagaacccaaacagcgacgttctaccaacagagttcaaagaaactctgagtccaatcaaacaaatgacgaactttaatagattacattaaattatttattcagatatgacaacattagtattagctgcacaagcagcaggtggaggcgttggcggatcaggcatgcttatttttatggttgccatgttagccatcatgtggttattcatgatacgtccacaacagaaaaaacaaaaagaaattaagaagtttcaaaatgcgctccaagaaggctctaaagtcattgtgagtggcggcatttatggaactgttaagcgcattgaccttacaaccaacaaggttgatgttgagatagcacgcggtgttgttattcaggtagacaagaatttcctgtatgctgacactgcttctcaaaacactacgaacgcttaaagagacggatgtattcggaaattaaacgtataagctcacttatcagaaatttcctgttcagtatagtcaacaaggaatttctgatatttttatttttcttattgctcagtggatcgttttggttatccatgacacttgatgagacatacgaaaaagagattagtgtgcctatccggttagtcaatgtgccgaagaataccattattacaaccgagatgaacgatacggtcgtgatgactgtgcgcgataaaggatttgctttcataggctatttgaatagcaacagatttagaactatcaacttgaacttcagtacttatgccaacaacaagacggggcaaggaatggttcctatgacagatgtacagaacatcctctatcaacgactttccaattcatcaaagattgtaaacctaaaacccgaacaactgaagttttatttcaattttggacgctctaaacaagtgccagtacgaatggacgggaagattttacctgccaagaactactatctcgctcggataaagttttggcctgaaaaggtgaccgtctatgctcaaaagaatcttttggacagcatcagatacatcgaaacagagaagttgcactttacaaacttcgctgatacggttattgaagaggtgaatcttagcaaaatgattggcgttaaaactgttcccgccaaggtgaaaataggtctgtttccagatatcttgaccgaagagagcatggaggttcctattgtggctatcaatatgccgcccggaaagagacttagaacctttccttctaaagtgagagtactcttcaatattggttctcacgcctttagaaagcttcacgaagatcagttccaagtggtggtggattatcatgagttaagccaacacacctcggagaaaggtacactgcacttgcgcactttccctacagaagtcagacaagctcgattggaaataaaagaagtagattacctcattgaacagcaataaaaacaacttgcttgattagtcatgggaaagaagaagaaggttattgcgataacaggaggcattggctcgggtaaaagctacgtcgcacaacttttagccaaacgaggaataacggtctatgactgtgatgctgctgccaagcgtctcatgcaacaagatgctgtcttacaagaaggacttaaaaagctcattggtgctgatgtttaccaaggtaaccagcttcagaaatctgtcgtgacaaaattcttgttggcttcgaaagagcatcaacaagccattcagcagctcgtacatcctgctgtggcaaccgactttctgcactctccctacaattggattgagagcgctatcctctttgaagcacacttcgatcaattgattcatccaaacatcatcatcagcatcatcgctcccttgcagacacgtgtgcagcgtgtcatgcagcgtgaccagctcaccgaagcgcaagcgatggactggattgacaaacaatggcctcaagaagaacttgtgaagcgtagcacatttacgattaacaatgacgatgataccaatctcgaccaacaaatagattgcatattcaaccaaatagattatcacatataaaacaaaaacgttaaacaacaatggaaactatcctttctatcgcaggaaaaccaggactttataaaatggtttcacgaggaaaaacaaacttaatcgttgaatctcttgatgacaaacgtcgcagaatacccgctttcgcatcagaccgcgtaaccagcttgtcagacattgccatgtacaccgatgctgacgacgtggagttatggaaggttctcaagagtgtgggcgaaatagaaaacgctaaacctgtatcgtttaattataaaaaagcaaagggcaaagaattacgcgaatactttgcaaaggtattgccctcattcgatgaggaccgtgtgcacgatagcgacatcaaaaagctattgcagtggtacgacatccttgtacaaaatgagctgactgatttcgaggagttgctcgctcgcaaggagtctgacgaggaagaaaagtaaatcacaagcctgcacgaatggaactttgacttgacaaatcatcactcacaaagttctatcatcaacgggcaaattgttcaaaaacataaggtaagaatgcaagtcctgctacttcattcttaccttattttatattttattgtcttcttgtctatcgatgaacaatggtgacatttgctacagcacccccatcaccaaataactcatataccctataaacacgattgtgagcagcgcaccttcccatcgtgcaagcgtatatttggtaaatgagaacaaccacagcatcaccattgataccactaacatcgtcaaatccacggtagtaatgccttgaagcgtcatgggactcatcacacccgtaataccgagtatcaagaggatgttaaacacattcgagcctaacacgttacctatggcaatgccactctgtcccttgcgtgccgacaccacactcgttgccaattcaggaaacgacgtgcctcctgcaataatcgtcaaaccaatgaccgcatcgcttactcctaactgacgggcaatgacggtagccgcatctacgaacaaattactgccaagcaccaagcacaccaaccccacaaaaatccacactaccgacatgaaaggcttgccacctttgtcagacgtctgttgcatggattgttcattttctttagctccctttaaggtgaagtacatgaagactgcaaacagtcccaacagcaccaccgcatctatgcgagagatgtttccatctaagcacatgagcaataaagccaccgaagccaccatggcaaaaggaatatctttcttcaccgttgcaggcagtatcattatgggtgtcaccaaggctgcacagcccacaatcaataaggtattgaaaatgttagaaccaacaacattacccactgccatgtcgggcgtatctttcaaagccgacatgaaactcacaaaaaactcgggcatcgatgttcccattgccacaatcgtgagtcctatcaccatttgtgatatatgcatacgctcagctatcgccactgctccatcggtaagtctgtcggctccccacaacaccaaggcgatgcctgctatcatccaaataatatttaataacatcttctcaaattataaattgttcaactcgtcaacttgtcaactcgtttactcgtcaactcatttacttatgcactcgtcacctcgttcaattcctctctaattccttgcaaacttacaaaaaaatctaacaaagcaatcatcgtttttaagttttattgcgcatgcccatatatcgtaaccaagtgtgacgatacagcaacacagctgaaagtgataaatcaccaaccgaaaaacgaacatcaaaccactatgcaaatcaatctatatggcgcactattcaatccacacctccaccctctttttgtaaaaataaataaccaaaaaacagccattgaaaaatgatgaaatagaaaaagaaaaggtggaaacaaacatcaaacaccacattattttgcaaaaatagccctctttttttcttagagcattgagttaatgccactatcacatgcgaacaagcacactattcacatacaattgaaccgctaaagcattgtttcaacagcacttttttgcccattttcaccacaaattgagtgaaaaaatcgtcactacatttgctcaattcgcataacagattgtgttaaaagcagttatcaaactttctcaaaactcgcgtatttgcaaccaacggaacggttggttcaaaatacgcgagttatgaagcgccttttgttaaataatttgacagtttatttttgcatcacatgccgcatatattagtcatttcttcttgactgttattcttgttgatggattcaatttcagatcaccaaatgtgcgaatgaggacatatacatgcacgttttacgttgcgtgaacaacctttccttgttgtttgaactttcacatggcgaaacaaggaaaaatgtgtaactttgcaacatgatttatccgcacaactttgaaagcaaaattagcttcgaccaaataagggcaatgctcaaaaacgcatgtttatcgaccatgggacaggaacaggttgataagatgacttactccactcgcatagaagaaattagccaatggctgcaacaaatctgcgagttgcaaagagtaatggaagaagaggaacggtttccgctacaatatttcttcgatatgcgggcggctttggcacgcatacgattggagaacacacacttggaggaagaagaactgtttgacttgcgtcgctctttagacaccatctttcgcatggtgaacttgctcagacaaggcgaggatggagaaaacttgtccgatgagtcgccaaatgatgaggataccgacatggcacccatgccctatcgttatcctgttttatcgaaggtaacggagaaggtgacgttgtttcctcaaatccttcagcggattgaccagattttggataaattaggacatattcgtgacaacgccacacctgccttggcacaaatccgtatggaattgaaacgagccgaagggagcgtttcgcgcacactcaatagcatcttgcgcaccgcacagagtgacggacttgtcgaccaagacgtggctcccaccttacgtgacggcagattagtcatacctattgcccctggcatgaagcgcaaaataaaaggaattgtgcacgatgagtcggcaacagggcgcaccgtatttatcgaacctaccgaggtggtagaagccaacaatcgcatcagggaactcgaaaccgaagagcgcaaggaggtaatacgtattttgacagccgtgacgcaaagcatcagaccacgtattccgcaactgttgcaggcatatcgcatgttaggaaacatcgaatttatctacgctaaagcacaattggcaaagcaaatgaaagctatagcccccacgattgaagcacaaccactcatcgactggataggtacggtgcatcccttgttgcgccagtcgttagccaaacaaggcaagaaagtggtgccattggacattacactgactgccgagaaacgcattctcatcatctctggaccgaatgctggcggtaaatcggtgtgtctcaagactgcctgcctactgcaatacatgctacaatgcggactgtgcatacccgttggcgaacgttctaaggcaggggtgtttgagcatatcatgatagatattggcgatgaacaaagcattgagaacgatttgagtacctattcgagtcatcttctgaacatgaaaaacatgatgaaaacggcaaacgaccgcacgctattactgattgacgagttcggaacgggcaccgaaccgcagataggaggtgccattgccgaggcagtgctacaacagttttgcaacaaaaaggcgtgggcaatcatcaccacacactaccaaaacctgaaacattttgccgactcgcaccccatggtggtgaatggtgcgatgctatacgaccgccacgagatgcaagccttgttccaattggcgattggacagcctggaagtagctttgctatcgagataagtaggaagattggcttacctgaagaggtgattcgtcaggcatccgaaatcgttggaacagattacatccaaagcgataaatatttgcaagatatcgtgcgcgacaagcgatattgggagaataaacgccaaacagttcggctactcgagaaagaattagagagaaaaacggcacgatatgaacaggacatcaaagacttggagcaagaacgaaagttgattgtcaagcgtgccaagcagcaagcggacgaattgttgcaagaaagtaacaagcgcatagagaatgccattcgggaaataagggagcagcaggcagaaaaagaagctactaaaaagatacgccaagaactgaaaacctttgaaaaggggttgcaacaagagactacaaatgccaaaagtggcgtgatgagcgatgaggattttgccaaaaaggtagcacaaatgaaacagcgcaaggagcgaagagagaaacgaaaaaatgaccgtgaagcacaaaagcaaaaggaagagcaagccaacaaacaggttgctgcaactaagaagagtgctgacaacttttctgtgggcgatgaagtgcgcatgattggactgacaacggtaggaacaatagtgcaggtagaggggaaaatggctactgtcgtctttggcgatatgcgtaccaaggtacggagcacccgattggaacatgcgacacaaacatcaacttcgccctctcgtgaagaacgattaggggcggtgaaggtaagcaaaacgacacgtgacacgatagacacgcatcgaaaagcatttaagcaagagttagatgtgcgaggcatgagaggtgacgaggcgttgaatgccgtacagtattacattgatgatgccatcttaatgggagtgagtcaggtgcgcatcctacatgggaaaggcaacggtatcttgcgccaactcattcgtgactacctcgcaagcgtccccaacgtggtgcaatatcgggacgaacatgtacagtttggtggggctggcattacagttgtggaactttgagaatgatgtcgaacgagaacaggcgctcctttcttccgttagattaccgaaccgcacaggaagagtaattctccaagcaagcacacgtcaggccgttatgcgacatcaataagcactgttcagaaacagagcgacacttttcacggcttcgtgaaaagctgcaggttgtccgggtacggtaataaacagatgtgtggcagtaggatatacctcataaacaacagggcgatgaagttttttcagtcgacataccagttctttggtttgatcgaacaagatatcatgacctgccgaaataaagagagctggtggcaattggctcaacatctcgtcacttgccaatcctacggacgccagtggatgccgcacttgctgcccaccataggcttcattgaaggcttcaagtagttcggcatcattgccatagcctttcccatacgttttccatgaatcggtgtgctcggtaaaaagctttgtaacaggataaatgggtatcactttggaaattccttgtaccgacaaagccgttgccaaagccaagttgccaccagcactatcaccccctattgctatttgtgtagtatcgcatccccactctgcggcatgcttacgaagatattttatggctctttggcaatcttccaaaggggctgggaaaggatgtttgggggagagtttgtaatcgagtgctgccacaacacaattggcttctatagcgaccgctgcacaaaattgagcacaactgttaatacttccaaagcaccaaccaccaccatgtagataaagcaaaaggggacgcttttgacgcacagcgtttttgggcatatatatacaaatgttgggtgtaggataaaaagcatgcagcgaatctggtaacttgcttgcatggttcctactctgtcgtatttgctgtaattgtgtgtcatctccattgattgctgcacgtacagccaacatttgaagatgctgcaatctcggtttcatctgagctaaaaacgtttgttgttcttgcaacatcttttgctgtaacaccgaatcaacacttgcaccttgcacactttgaaaagataaaatcatttgtaataagaagaaaatgtaggtcaatcgtactttcatgaaacatggtattgatgatagatgacaggggaactctcccttgtaactgcaaagatacacattttttgaaaacaatggctctcatcctacaaataacacaccgaccttctacccttcactaaacatgattgtaaggcggaggaaatggaagaatgcaatggctatcaacaccaaacgaaaacaggaggcactgttagaacctcctgttgacgactattataatagtaaataagagatgaactattataaggtaagggcagcaccagccacaatccaaattcctggttgtggcacattgcctacgtccatgtaggtcttgttcaagatgttgttggcattaagatacgccttccagttactttcgttccacgtcagacgtgcgtccaccacgctataaggcttgtacgaatgggctactccctctctgtccatgtagcttcccatacggtcgagataacgacaagacacgcctaagtccaatttacccatgagatgcagctgtgcatcagccacaaacttgtgcttgagatattccaagacatatttgctgacaatgcctttttcctccttgtggtcttgattgataaacgaatatcccaaagacactttcttcaagaaacgctgtgatggcagtatgtgcaggaaattaaagtcgaaactgctttcaacacccaacgaattgataacaccaaagttgacacttttccacaccaattcatttttttcattgcgtgtaccgtcttgtatccagtctatcaggtttttgtgatgattgtaatacacggctgccttggcgttgatgtaagggttgccaaacttgatacctccttcgagggcggacagttcctctggtttgaggtgtttgtcagccttgtgaccacctacagaatagaacaattccgtcatggatggcatacgcagcgaggtattgtacgaggcataaagcttaaaggcatcaccgatgcgatagctcatatctatccctggatacacacgcatgttcatgttcgcctgactgtttttcacggcaatcaagcccgccgagagggtgaacctattgagcagcacgttatgttcaaatacaaattgcgtattggtgcgttgcaatccgttggtgtactgacggtcagtgccatgaatgggctgtgggttctcgagcttctccccaaggtttccactcatcaagtcttcgtgtctcagctcagcaccaaaggcagttctacctccaacccaatcaaagtaggcattcagattgacgccatacacgtcggttcggtggtagttgaacggatatttattaggctctccacgaaacaactcgaacctatccatgcctcggttccaataaacagacgggcgaagatgaaatttaccttgcttgttttcggcttgtatggctgtgaacgtcttgaaagtatgctcaaattggttgtcccatttcacgccatagaacgtgtttgagccaaaatctttcaagctcatgccggcatgccactttacatcaacccaactgtcttgatagcttccttgataaaacgacttgagcgtacggtaatcagcattcaggtttcctgccttgctgcgtaaataaccatcgcttcgaataactgagagggaaagctggttgttccacttgtcacgggcgatattaccccttagacctgtggagaaatagccatacgatccaccttccatgcgagctgtgagtgaagtgtgggctgccgccttggtgacaatgttgatggcacctaacaaagaagatgtgccataaaccctacctgcagggccttccaagacttctatgcgttcgatttcgctcaaatcgacaggaatgtcgaacgcattgtgcgcagtttgcgcatcgcagatattgataccattcaacagaatggtcacctgctccgagtttccgccacggatacccacatcggtcaatgctcccaagggacctttctgacggacatctacccctattgccaatttcaataggtcattaacactttgtaccggagccgattcaatatcctttcggctcagtacagttaccattctcgattgctgactaacggtcagcggagcgcgagagcctgtgacgactacttcgctcagtttcactgcttggcttgtaagtaggtcattgggcaagttacggcgtacacttacaccgtctgccttcgcgtaagtcaatgtgcttacgctgagaacactaattaaaacttctttaccaagagcagcgaagagcgaatatcctttgcggttaaaatgcttgaaccacagcggattgcgcttgttaaactgttcttttaccattgttatttattaaaaaatcgctgcaaaggtaaagatttttcacgattttttaagcctgcgtgactggattatttgggttcgtgagtgcgataaaccaaataatctccatcacattgaatgctgaacgatgcaccttctgcctcgttgagcgtgccttgccaccaactttgataggcgtacgattgccaacgcaagcccttattttcgatacggtggcatgagatattaaaaatacttacttgctgtttggcaaacgactcaaaggtgcaatcgccatggcaaggcacaaacgtgccgtaatcggtgaccatgacaggctgcacaccgtaggtttgaaaataacgcagcaagagggagatgtttcccatggtatgatcctcacgcttgcccgttgttcccaaataggcgatgcggctgtagttgcgactgacacaataacgggtggccttggtaaggtcgttgtctgcctgctcatgctcaacatgcagcacgtcatgaaattgtcgcttggcagcatcagacatcgaatcaccgtcgccaaccacggcttctaccttattatataacgatggatgcagcaactcgatggcactgtcgcaacacacaatgcgaggcgcttgctgcaagatttgagtgggaacggcatgctgcggataatcaccgcccgctaaaaccaccacgtcgaaataggttaatgagttgatgagctgatagttcatgacgctgcttgcttcatcatcgccttccacttaaaatatcctaacacggcaatgacgacataaagcccgtacaatgctgccttgaaaggaatgcctttgtacacatacagcgcggtgcaaaccacgtcgaccgcaatccaaaagagccattgctccacatacttgcgtgccaaagcccataagccaacgaagctgagtgcattggtgaagctgtcaagcagtggcacattgctgttggtaaagcgcaccaatacataataagtagccccccacgccaaggcgaagaacgcgaaaacaggcagatagtgattgccgggaatgtgcgtaatgggcagttcttgctttttttgattgaagagtttgctgccccacttccatgcaacataaccgtaaatggcagccaacgtgtaatacaccgccatgcccgcatcaccgtacaaaccgtgtctccaatacaaaaacacgtccatggcaggcatcacaatgcccactatccacagccaaatgctggctttatattccaaatagatatagacaagccccaaaatggtggtgactatatccaaccaatcaaatgtcatgttataaaaataagcccacctccttgtgcttgtctttgccaaagaggtgggtaagatttgatatttatcagaacgtcaatgacaagtttgccatgaagttgataggagcctgtggcgcaaagcctgcgttatactgtccttcaccaccatcggtagctacgacgttgccttgcgcatccttcttaaaaccaggtgctgcccagccgttattgtcgtatttggcactgaaaaggttgtagacggtacagccaacggtagcctctttcaagcccaacttgtgacaggcaaaagtgtaagccacgttgaggttggtggtaaagatgctgcccaacatcatgctcacgtcaatatcttgacctttggcgtctttggtttgatagtttttcagacctgtattggtgagatactgctcaccaatatactgcgtatgaacattagctgacaaacctttgtagttgaatgagaagatgttgttgaagataagttctggagaaaaactggtaggtgtgtcgcccaaagaagcgtgcttcccatcttccaacttcaccctccagtccttaacacggttcttgctgaaggtagcattgacgttccaagtgaaccagtcgacaggttgccaagccgattccaactcaatacccatacgatagctgcgacctgcattctttgtcttcatctcaccgatggcatccagttcgccagtgagcacaaattcgttgctataattcatataatataggttgacacctgcactgtacttggcactggcaaactgataacctatttccaaatcgcctaatttctctgcctccaacttggtgtcaaggttttgctcaaaactgttacgcgtaggctctttgtgcgcgatggcatacgatgcatacacgcggttgttggaatcagcctgataattgagtccaaacttaggattgaagaaattgaacttttggtcgagattgaagacaatctgctttttattgttgtcccatgcgtcggaaggacccgtcatcttaacgcccacatgacgatattgtaagtcggcaaaggcactcaaaccctttacgaactcccagtttacctttccgtaaacgttgccgtccaccttctttgtatcgttgttgtaatactcgttatcaggctccaatgtggagggtcccatttgatacaccttcttctttttgccgttggcatcttctatctgatagaaaggggcacccgtccaaatgacttttccaaagtgaccgcccacatatttgttccaaccgccaccgatgttggctgtcaaaccgctgttgttgtcatagttaatggaacctacagcaccataaaaatcgttgtccatcttcttttggcgaaccaagtcgcccaacaacttggtgtctttagacaaatgatattgataccacttgccttttcctttgtactgctcgtagtatccgtcgcccttggtatagtgcaaggcaacgttgagtttccattggtcaccaagcagttgactccaatgcagctggtagttttgctggtggtagttatccgtttgtccgtcataatatttcaccttgccctcggcatctttatacttaccggccgaattgtaggtgcgtccgtacaaactttgctcgtatttagaagcgtagtaccatgcgtgataagtacgttccacgccattgaaggtgacaaacttcaccatggtgttgtccgagaagtagcccgcttgaatgaaatacgaattgagtttggtggaagcacggtccagatagccgtcgctaccgatgttggaaaggcgtccttgtatgccccaatggccaccgatgagccctgttccgaagcgcaaagtctccttgtgcgaaccgtaactaccgcccgaaaggtcgatgccgaagaatggtttggtaccgatgttctcggtctgcatgttcaaggtagcaccaaaagcacccgcaccattggtagacgtaccagctccacgttgcagctgcatgctctgcacactcgaggcaaaatcgctcatgttcacccaaaagaggtttgcactctcggcatcgttctgcggaatgccattcaccgtgatgttgacgcgtgaggggtctacgccacgcacacgcagtgaggtgtacccaataccattacccgcatcggaagtaaaggtaattgatggcaaggtagacaacaagaacggaatatccttgccatggttcatctgcttgatttgcttttgtgtcaagtccgaatgcgccataggcgtcttcttgttggcacgagtagaaattacttgtacatcctgtaactcgtaagtatgcaaggtgtcaataggttgcaccgcatacacgttggcggcagtcattgcaaacactgcccataaaaactttttcattgataaaaataagtcatcaataaatacataaataagggagagagcaagtgcaaagtttagctgttaaagaacttcgcccacttggcttcttggtcgattcctacgctggtattatccagatcaggtcagaaggtttgttctcagcccacgaataaaagtgagcacccttagcttactgtttgtaaaccgacggcaaaggtatgacttttctgtaagatttgcaaaaaatagttgaaaaaacgaaggtgacaatcatttattcttcatgagcaagatacgctgtccatcaaaaaagcccatcagtaacttactgacaggctcttgcagaatgtggagctggagggagtcgaaccctcgtccaaacagggaaaccatacgctttctacacgcttattctggcctttagttttcgtgttatggcaagacccagaccaccaaccataaccttatcctctaaaaattcatttgccgagcgaggcatcaacaaactatttccgatttacctgcaccgctcaaccctcagattcggaaccacatccttggagcgatgtctcgtcccatcaactattgacgggataaagccagtaatctactgtacttcgattaggcagcgagagcgtaattgttttcgccaattaaattgttgcctgctaagatttaggagccaacaaaccatgctccgcgtgcttacataccatttcatcccgctgtcaaatccagtcaaccccaagatgatttcactacaccaacgtgatgaacgtgaaaaagtggtagtatcaagaacaaagtccacgaagctctacaactatttcttgtgaagagcgttcaagtctttgcccctgatttgcaaagatacaactttttcatggttttgcaaatagaatgcgaaaaatcttgcttttcaacccgcggctctttcatttaacgctcacctttgctgccataaatctttcatccttttgttgcttcgctctcaagtttaccgattaaatgaatataatatcttgcgtacctataaaaaagctgcatgatatctcatcttttaacaacgaaaaacacaaaagaatctaaaaaacattgccacaaaagccatttcacgaaagaacgtcccgttctgtctaaaataacgaaaaacatagttgcagcatttcacttttgacaaaaaacggagaaaaatcaccacgcatttcttttcgttgctttcgtcagaacgtctacgttctttggtttcttcatatcacttgcgcattttcgtgttttctgcttatttcgttgttgatttcttctacgttgtttacaacaacaaaatatacctttttcaaatgaaagagcccgtgttttcaccctcaatttataaggcttttttatcaccccaccccatctgattataaaaaaatatatacctttgtatggatgcaacaggcgttgggctactgacaaccattgcattctttagtcattgatacaacctacaaatagatataaattaaaacaatagtacaatgaaaaagctttttttattcgtctttctcttttggacaagctcgccattatgggctggcaaggtgattaccgacagtattcacagcaatgtactggatagtacgatgacctacaatgtctatttgcccacaggatatgaactgtcatcacaaaagtatcccattgtttacttgctgcatgggctgtatggcacttataaagattgggcttcgaaggcaaatgtgaaagaagtagccgacgaattgatagaaactcaggaggctgtgcccatggtgattattatgcccaatgctggaaatcctgatgtaagaaatcagtggaatggctatttcaatatgcctggttggaactatgaaacgttcttctttaccgaactgatgcctgccgtagagaaaaaatatcacacctacacagacaagaatcatcgtgccattatgggactctcgatgggtggaggcggtagcacggtgtattgccaacgccatcccgagcttttctcgtcatgctatgccatgagtgcttggttagacaacaaagaaccagaggttgccccacatgggaaggacaaattgtactatgtttctaaatcggtgcgcgaccattcggcaattgatttcatcacgaacgccgacgaaaccacaaaacaacagttgcgctctgttcgatggtttttcgactgcggagatgacgattatttggttgacctatcctttaagattcatcaactctatgccaaagctggcatcaagagcgagcttcgcattcgcaatggcgtgcacaattgggaatattggcacagctcattgcgacttgccctgccatttgcttcgataggctttagaaagtaacggtgtaaaaaggcggtaacatccgccttctcgacagctgaagaagaccaaaaggcacgctctatgagtgccttttggcttttcccggaatccattccacctccacatctttactgaaattttgctgaataacacccgtatgtgccagtctattgccggctggtagaaacttacatttaatgcgacggatatgctgatggatattgaagtcggcttgttgggctactaaatcgctttctaccgttagatgaaaacgaccgaagccatccaataccactgtctttccatcagacagttgctgttttagctcgtccaccaactcggtaatcaagccctgtacttcgcctcttttgaaggtagtgttcgattcaatgatggttgccaattcatctgtgtggatttcaccggtggacacgaccttggcataccatttactttgctgcactttgtttttgaattttgactgcatcagtctaatcaatattgacatggtttcatggttttaagtggttgatacatgatgataacagtagaaaacagactgttttggagtataaaacaaactgttttatctcacaaaacaaactattttgcacttttcatcctatgagatacaaagttaaaagcaaaaacattgatttgcaagcatcatctttcaatgcagggcgcattcttccttttttcagcggatatgcctatcatttaatgcaggtgaaactatattcagcgtttattgatttggttagtaatgtaaagctaatcaactattctctgattcgttgttgaaacaaaagaagaagattgtttttccacgacaaacccgtctttaatgtaaatgagcgtaaatacctccgcgattatgcaagattgtggcatgttatgcctatctttgtacgcaaactcacaaccaagcatggcaaacgaagagtcaaacaggttaaacaccgttcatgctgaaaagaaaaaacgctgcgatggcaaagagctggttgaagaattgccaaagagggttgaacaacgttaaatccttgctgacgagataaaggcatttagtgaggagaaagacaacaaagaaatatataacatggacattcaaagaataaatcagcatacatccgctttcaatgagataacgcattacattgagagcgataatggcaaagaaaaggttgaagtatggtttgcacgcgagcttcagtcggttcttggctatgcacgttgggagaattttacaatagctataggcagagccgtagaatcatgtaagtctcagaatatcaacgtggatgatcattttcgtgaggtcacgaaaatgataagcttggcaaaaggtgctaaacgtgaagtcaaggactatatgctcactcgctttgcctgttatcttatagctcagaatggtgatccaaagaaagaagaaatagcatttgcacaaggttattttgcattgcagacaaggcgagctgaacttatagccgagcatttgcagcaagtatcacgtttggaaacacgcgataggttgcgtacttcagaaaaacaattgtctcgcaatatttatgagcgtggtgttgatgaccgtggatttggccgtatacgttcaaaaggtgacacggctttgtttggcggacataccaccgaatacatgaaacttcgtctcggcatcaagtccacacgcccgttggcagattttcttcctacgctgactattgctgccaagaatctcgccacagaaatgacaaactacaatgtggagcagaaagacctttatggtgaaccgagcattactgccgaacacattcagaacaatgtaagcgtaaggcagatgctggggcaacgaggcataaaacccgaaaaccttcctcctgctgaggacatcaagaaggtggaacgcagagtggcaagcaacgagaagaaaatagaaaagacttcaagcaaattgccaaagaagattgaacaacgttgaatccttactgacgagataaaggcggttggtgagaggaggtatctcttcatctgtaaagagatatttatgataagatttggctaagaataagatggtaaagaaaaagacatatacatttatagatttgtttgctggcattggagggtttcatcaagcgatgcactctttcggcatgaagtgcgtatttgcaagcgaattagacaaaaatgctcgtatttcgtatgaagctaattataaagacatcgccccaaatctttttgagaacaacaacaaatattttaatgaagacataacgaaacaggatcctactgaaattccaccatttgatatttgctgtggaggatttccgtgtcaacctttttcgatagcaggacttagacgaggctttgaagatacaagaggtacattattttttaatattgccaatattgtaaaacaaaaaattagtataggttgtccgccaaaggtgttattccttgaaaatgtcaaagggttaaaaacacacatgaaaggagagactttaaaaacaattcttgcaacgctggaagagttggggtatgcttatagttttgaggttctaaacgccaaacattttggtttgccacaaaatagagagcgtttgttcattattgcatggtacaaagaccttataaaggcaagtacgttcaaatttccgtatggaatagatataaatggaaatacaatttacgacaagactaaagatttaagcgatagggttataaagactaaagtttctgatatctttgaaccagaagactctattgatgcatattatactataagtgacagattatgggaaggacatcaaagaagaaaggaaagaaataaagccaatggtaagggctttggttacagcctttttaattcagaaagcgtttattgtagtactatttctgctcgttattggaaagatggaagtgagatactaataaaccaatcagacaaaggattgaatccgcgacgtcttacgccagtagaagcgggaagattacagggatatagaattattggcaatggctggcaaaatcccgagtgtgcagaaaatgcaaattataatgcaagtaaccaagaatacaaaatcgcagtttcaagaaaagaagcatatcatcaattcgggaatagtgttgcattgccagtaataaaacgattggcaaaagagattgtggcacaattgttaaatgaataaatatggaagagttaaggaatttacaacaaatttataatcttgccgcagataaattcaatcagtatgaaggcaatgattttgtgttgccactcatttttaaggaacaggtcaaagaaattaatggcaactctattacatataataattattctgctgtcatccaaaccaaaggatatcaacggggttttttaaacattttcttgcctaatcaatggttctatatggcatcatattttacagatttctataatgaactgattagatacaaaaaatatgcacttaaggtagccacaaaagaacgcttaaaagtcttggataaaggtagtctttcggttgaagaggaaaactcgctgcaattacttgatttgaatgacgcatctaaaaacaatttgagactttttatcactgattattcttggtggcatggtgcaaaaaccatagacagaagtgatttctatgtttcacctatattagcttgtgcctgtttggttaatgcctctcagtcgtatgttgctgaattgtgcgattttcttgcagacaagcaagatttagttagaataataattgatggtgttgataaaatagccatagataagttaaaaccatcgaaacaatatcattcaacctatacccccttccttaccgccctccgtactaagcctttcatgcttcttgccggcatcagtggaacgggaaagagccgtatcgtgcgcaagctggcacaggctacggtgacggaagaattgcagagagccgaaggatatgttgggacggatttcgccaacgaccgatggacgctgcactcgccagccaactttgagttgatacaggtgaagcccaactggcacaactcgatggacgtaatcggctacctgtcgaacattccaagtccacactatgtgttcacgcccttcatcgagtttatcgtcaaggcgtggcagcatcccgaagtgcctttcttcttgtgccttgacgagatgaacctggcaccggtagaagaatacttcgcagagtttctgagcgccatcgagagccgcagtttcgagggcggagaatacttgaccgaccctatcatcaaacccttcaactcgtttggcatggctaagggcgagagaggcgaggacatcaacattggcgacatgatgaccaacacgctgttccctaacttcaaagccagcgacgccacttcatcagtggcaagggtggttgagcacttccgcacaagagggctcaccctgcccaagaacctcatcgtggtgggaacggtgaacatggacgagacaacattctcgttctcgcgcaaggtgctcgacagggcgatgtcggtggagatgaacgaggtggactacgacagctttcttaccgataccacggacgatgaccttaaagccatagtcaaggcatttgaggaaaacggtgacgccgacttgaacgccctgcttgttgaccgccatatcgaagcaagggaagtgatgggcgagctgggcgatgacgcgacgttcgtgataaactatctgaagcgaatcaacgctctgcttgaaggaacgcccttcaaacttggctatcgtgccgccaacgaagcgctgatttacctgcaagcgtcaaaagagttgggacaggccgaccgcatggctgcattagacagtttcaccttgatgaaaatactctcacgcatagagggcgacgagacgaaactgaaggtcaccgactcggaagccgacaaggaacgcattgccaatgccggagtaaacgtggatgaagccaaacggtatggcgacctgaacattctcacggcattgcgaaacatcatcacacagacgttgggcgaattggagaatgaccatgcggagagcagcgttacggaagaaaccgcgacggaaagtgacgaggagcctgcgaccgctgagcggaagaagaaagagctgctgtcggtcaagaagattgacagcatgctcagccaactcaggcgtgaccatttcgtatctttctggaactaaccatgtgtggaatgtaaaaaggctccctatgtcaaagaaatttgagataagaaacagtacctcagaattccttacctttgtagcagaaggtaaggaacaaggcatacaagtgctatacaaagatgaaacggtttgggctacgcaaaaggcgatggccgtgctctttgattgttctaccgacaatatcggtttgcatctaaagaacatatatgatacgaatgaattgaacaaggaggcaactaccgagaaaatctcggtagttcaacaggaaggtatgagagaggttcggcgcaacacgttgttctataatctcgatgccataatctccgtgggctatcgtgtcaattccatacgtgccacacagttccgccaatggtgtacctatgtaattcgtcagttctctttacgcggttatatcatagataagaaacgcatggaaaatggttcgttcattggcgaggattactttgaacatttattggcagaaattcgtgagatacgtttgagcgaacgacgtttttaccaaaaactcacggacatatatgcgacagcgatagattataacaaggctgcaccgaccacacgattattttataaaaaggtacagaacaaaatgcaccatgctgtgcatggacacacggcagcagagcttatagtagaaagagccaatgcggaaaaagaacatatgggactaacgacttgggaaaacgctcccgagggcaaaattgttaagccagatgtaagtgtcgcaaaaaactacttgaaacaggtggaacttgaagatatgggaagacttgtcaactctgtgcttgatttggcagaacgtatggcaagccgtcacatacctatgacaatggaagattgggcaaaacgcattgacattattctcgaagcaggaggcgatgcagtgctgcaagatgcaggaaaggtatcggcagagtttgctaaaaattatgcagaatcagagtttgaaaaatatcgtgtcatacaagacagattgtttcattccgacttcgacaaattcaacgaactgccatttgaggacatagatataagttgaaatgatgacaagcgtattcaactttgaggtggcgaacgaggacttgttggtaagattctcttgcccgaaccacaagcggagaatagtcgagacggtacgcaatctcgacatcgacaccgtatgtccagacagtgccgcgaagttgttgtgccgctacacgtcagaggcgacggacgtgaagttctcgtttgacggaaacgcacgggagggaaacgacatccgccacgaagccgttttctttgagaacacggaatatcagctcatcgtgcgcggcaagggaaaagacttgcaggaactgcagcttgccgtcaacgaccacctgcgcacagacggcaaggacaaaagcaccatcatcagcacgggcgacgaactctatggctcgctgaactttcacaaccaagtgggcatgaccgacttctgcttcgcctataaagtgaaaggagaagagcaaaccaaggaactgaagttcatgaccgaggtgttgagctacaagttggactatcgctctgacctgaagactatcatctctgacatagaacatgagtatgccatgctgagcacatcgtttctgaaggacacctatctcagcatgcgccaaggtgcaggtgaaagcaatgctttgatatggtggcagatattcaagtcgtgccatgccgacatcatgacggcggcacgccagattatagaccgccccaagcgacgactgcgcagcgtagccaaatatgaaagagcggaacgcatggcgtatgttccaagagacttggaaaacgaataccaaacgcacaagggcaatcctgcccatctgtaccggaccgaagaactgacgctgagccatgacacgatagagaaccgcttcttgaaatatgccatcagggaaatgacacgccgcttcgccgtggtgaaagaacacatcatgacggcaatgcaccttgacgaccccaagcgcgtggacacttcgctcgacgacatggagaacgaactcatgcaactctcaaacaacgctttcttccgaggcgtgggacagttcaagggctttacgcaagacaacctcgtgatgaaacaggcacaaggctacaaaaccatcatggaaaaatgggtggagctgcaacagggttacgaactggaggaaggcatgcggaaactggaggtgaaggatgtctgcgacctttatgagatatggtgcttcatcaaggtgaagaacatcgtgcaggacgtgatgaacgagttgggcaagagtgcgtatccaaaagtgaacggcagagacatcaccaacgactttattccacagctcgtgtatggtggttcggtgagtttcatcaaccaagccggcattgagttggcaagcgtgtgctacaatgccgaggtgcgcaaaggcaaagcagcgtcggccatcagcggcaccaacaccatgacaacggtgcagcgtccggacatcgtgctgaggttgagcaaacagacggaaggcggcatgaagttcacctatctttttgatgccaaataccgcatagccgacacggatgagaacggcaacggatatgacagtcgttatgacgtgccacctgcggatgccatcgaccagatgcatcgctatcgtgacgccatatactacacggaggaaggatgcgagcgagaacacctgaagaaagaaatcatcgccggttacgtgctgtttcccggtcgcataccattagaagctctcgatgccgagaagggtgagtattgctatcagcagtcgaaccgcttgattggcatcggtgcctttccccttcgccccgaccaagagcagcatgccaacgacggaagcatcgttgtaaatgctaacagttctgagcaagccttgtaccgacagatacgccactggcttgaaaatgacaatgggcgtgagcgcttgctcgaggaaagcattccgcagaaaggattggaatactcggatgagcctgttaataaaggtacgttttacatcgcatcagtagatggacatgtgaacgctgacaagcaattggtgctgaatggtctgggcgagacgttcttttcgggatacaaatccattctctcgggtgttgatttccagaagataaagtattttgcccctgtggacaaccattgggtaaaaggatattatcaggtgctggcagtggaagcaaaggatatgggagaaatgctggcgaaggagaaagccaacgccaaaggcacggcattgaactacggtggttatgacaagcccatccgcatttgtttgaaattagggaaacatacgctgctgcccacgccttttatatatgggctcgacagcaacgcgtccaaaggagttgccataacaagaaaggaatttaaggagttttgcaacaaagccatgaaatagacaagacggaggaagagctgtacgcatgacggactaatagtctgagaacataaccatacaaaaaataaatatcactatctttgcaacaaattaacaaaaaaagagttcataaaataaagaggaaaagatattttatacacaatatgaaaaaagtcattctatatattctactactcatacagtgcccgcttacagtgacggcacaatcttccatgacagatgagcaaattcttgaatttgtcttaaaggaaaatgccgctggcacatcacaagcacaaatcgttaccaagctgatgcagaaaggtgtgaacatacagcagatacgaagggtgagagacaaatatgaacgacagcgcaagcaaagcggactgggcaatgtggctgaccaaactgttgctcgggcagagagcaggatgcgagaagccaatggcaactcacatcaagcagcaaaacgatttaataccatcaagaataaaacagacaatagggagcaacagtctgtgcaacgcattcaaggacaaccatcatggaaagcagagtatgacgaaaatagcgaagattttctgcggatgcaagatgaattgcagtatatcacgcccaccgactccattgaatggctcaaacagattttgaaaaagcgcgaagaagagaggcgcaaagtttttggtcgtgacattttcaacaacgaagagctgacctttgagcccagtatgaacatcgctacaccgcaaaactatcgcttaggtcctggcgatgctgtttatattgacatctatggggcatcgcaaaaatcgatacaaagcacggtatcgccagatggcgatgtgaacattgagggctttggacctgttcaagtcagcggactgaccattgcgcaagccaatcagcgcctgcgtacacaattgggtgcaagatacagtagcagcaaagtgcggttgacattaggacagagtcgcaccattactatcaatgtcatgggcgaggtaatgacgccaggaacttacaccgtgtcagcctttgcttcggttttccatgcgctgtacatggctggaggaaccaataacttgggaaccctacgtaacatcaaaatctatcgcaacaacaagttggtgtctactgccgatgtttacgactatatcttgaacggcaaaatgagaggcaacgtacgcttggcagacggtgatgtaatctatgtgggaccgtacgactgtttggtgaacatcacaggtaaggtgaaacgccccatgttctatgaaatgaagagcaacgaaagcatgggtaccctattgaaatatgcaggaggatttactggagatgcctacaaaaaggcggtacgtgtgttgcgaaagacgggccgtgaatacgctgttttcaatgtggctgagtttgatatgaactcttttcatgtagcagacggcgactcagtatcggttgattccatcattcagcgttatagcaacacggtagaaatcaaaggagcagtattccgccctggcatgtatcaattgagtaacgacatcaacagcgtgcgtacactgatacaacatgccgaaggactgcgcgaggaggctttcaccaaccgtgccattatccaccgtttgaaaacagatcgcacgctgaaagtactgtcagtagacgtggcgggcatcatgaacggcaccgcagccgatgtgccccttcaggaaaatgacgtgctgtttattcccaccaaagaagaacaaatgaaccagcgcactatcaccattcatggcgaagtgcaatatcctggtatctacaattatgccgacaacgagactttagaggatttcgtgttacaagcaggaggtctaaaagaaacggcatctaccgtgaaagtggatgtggcacgtcgcatcatcaaccccaaagcacttaccaccgactcgctcattgccaagacatatacctttgccctgaaggatgggtttgtgattgacggtgaacccggttttgttttacaaccctatgatgaggtttatgttcgtaagagtccgggttatagtgaccagaagaacgtaagtgtggaaggcgaagtgatgtttaatggtgtctacaccttgaacaaacgcaacatgcgactcaccgatttgctggaagcagcaggaggtgtaaccgatttggcatacgtcaaaggcgcacgactggaacgaatacccaacgatatggaacgctccagaatggagacagccttgaagatgcaagaagaagaactacaacgacagctgttacaaatggcagcaagcaacaataatccaactggaatccaacaattaggaaaaaacacctccaatactcagcttaggaagtttgagattccacgctcgttccctgtaggcatcgaattagataaggctattgctaatcccaacagcgatgctaatattgtgctgcgagagggtgaccgattaattcttccccaatacagtgcaacggtgaagataaatggtgctgtgatgtatcctaacacggtagcctaccaaaaaggaaagaaagccaagtactatatcaatgcagcaggaggatttgcccaaaatgcccgtaagagcaacgcttatatcatctacatgaacggtatggtaaacaaggtttcacaaggagcaaaaatagaaccgggttgcgaaattgtagttcccagcaagctatctcgcaagatgagcattgcagaaacaatgagccttggtagtggcatcaccggcatagccgccatgatagcaacaattgcaaatatgagtaaataatatagatattatgggagaaagcaagaaaaagggaccagaccaacctgagataatagacctaagggcggtctatcgaaaggtcattcaacacaaaaggctgtttctcatcatactgccaatagtttttgttctgtcatcgctattgatcataagcgttcccagaacatacacatcaagtatacgcttggcaccggaaatggaacaatcatccatcgctggaggcacattcaactccatcgcatcctcatttggtatcgacctgtctaacatgcagacctccgatgcgatttcgccagcactctatccagacctgttagatgacaatggattcgtggcaggactgtttgacatgaaagtccagacggcggacaagacactctccacaacatactatgactacctgaaaaacaatcagcaacatgcatggtgggaaaagctctcacaatggataaaaagcctgttgcctcgcccggcagacaacattgcggcaaaaaacaacccaaaccgcccatacgatgcatacaacgtttcgaagaaagacaacgacctgatggacgccattagagacaaaatcacaattgatgttgacaaaaaatatgggattatcagtatttccgtaagggaccaagatcccttgatatgcaaaacagtggcagactctcttatgagccatctacaaacattcatcacaaaataccgaacgaacaaagcacaccttgacgaggtgtactatagaaaactcatgacagaggcaaggcaggcctacacgcgcacacgacaagcatacggccgctacgccgatgccaacgaggaagttgtgctggcaagtttcaaggcgaaggaaaacgatttggaaaacgagatgcagcttcagtacaacacgtattcaatgctaaatacacaatggaaggctgccaaagcccgcatacaggacgcaacgcccgccttcacgatattgaaaggagctacggtgcctatcaagccgacaggccccaaacgaatggtttttgtcttgggaatgcttttgcttgcgacatttcttatcataggatatattatcaaagacgagattttcaacaaggcgtcccagaccgaataggaatacacaaacaagatggattcatccaagagaataatagtcaacacatttgcccaatacggtaaatcaatcatcaatatatgcctgtccttgtattcgacaagacttgtgctggcagccttgaatgtcaacgactatggtatctattcggttgttgccggcgccgtcggtgtgctaggctatctgacaaattctcttgtagtgaccacgcaaagacatctttccttttaccatgggacaggtgacatgagacttgtaaaaaccatgttcgccaacagtcttttaatacattttatcatcggaatattgacgtgtgcggtacttttcgttctgaaagactttttcatcaaccacttcctgaacattgcaaaaaaccgtcttgatgaagcgggtacggtgtattctgtaatgacacttatgctcttcatcacaattctgacctcacccttcaaagcactgctcattgcaagagaaaacattgtctacatctcggtcgttgaaattgcagacggggtgctgaaatggttgcttgccgtaagcctgaccataatcggtctcgatagactattgttctatgccactggcatgatgatggtgctattgttgaattttgcagcatttgccatttataccttttcccgatatgaggaaagccatgtaggaaagtccatgcgtattctggattggaacagcgcacgccaattgttaggatttgccgggtggacaacttacggaatggtggcaggcatgtgccaaacccaaggactcgccattgtcctgaataagtttttcggaaccgccatcaatgcggcattcggtatcgcttcacaggtaaacggagcaatcagattcgtgtcgacgtcgattctgaatgccatgaatccccaaatcatgaaggcagaaggcaatcaggaccgggggaagatgctggcactggcaagcaaagaaagcaaatattcaacagccctgatgatgattgtatccattcctattatggctgaaatgcccgccatattggaattttggttgaaagacgtgccgcaccacacagcgactttctgccagacactcatgcttgctttcctgatagaccagacaacattaggactgcatgcagccaaccaggcaacggggaagattaaagtatactcgttgattatgttcacgcccaaaataatgattgtgcctttggcatggattctcttgcagtaccaccacaatatcacaacaaccatgctaatgtatgtggcaattgagctgatggttgccgcagctcgtctgcccttcatgaaattctcggcaggactgcacattgggcgctatctgcaacaagtagttttacccctcatcccattgttggtcgctgagctgtctgttagctatttcactatttcatacatacatgctccttaccgatttttaatgacaaccgtatgctgtgtcttaataggtgccttcacccttttcctgtttggcatggacagccatgaaagaaagtatatttacaacacgcttagaaccaagaatgaacagcatgaagattgacctggatgattacatgaggataaatctgaccaaattttatctcatagataagaacagcctggcaaaatatctattttacataggtgttttactggctttttatgcctccatgagtccatggttcttatggagattgtcatcatcatatgtactggtctccagcatccttattttcttgagcatagccatataccgttctggaggaaagacaagatttaccaacggccagtttatcaggccaacatttgcatttttgatcctggcatattatcaagtcatagtcaacggcataaatctgaatggctacatagcccgtctgttttttgcctttatatttttcagcattttccgctatggcaaggagttcattccaaagttagcaaccatattggctaaatcactggctctcatattgtcggtatcaattcccttcttcttattgtacctgattggatttcctttgccatctcaagatttaacattcggtgataatttctactcttttaccaattactttttcttcttgattgatgaccgccaattgttcgccatcgtgcctcggttccagtccgtgtttcttgagccaggctatttaggcagcgccacagcattgttgctgcagacacagagggggaaatggaagaaatggtattgtatcgttttgatatgcggccttttactgtcgttctccttggctggatatgtgtacctcgtagttgtttcattcctgaacctgtggagcagcggaaaacgaatctttatgaaagccatatttgcggtttgcctctttgcaggggttattggtctatcctttgtctataacggtggagacaacttgatacataatttaatattattgcggttagagataacagatggagaaatggtcggaaacaacagagtctctgagagctttgaaacagaatacaataactttcttggatcctccgacatcctgttcggacgctataaaagcaacgattttggagattcaggctataaagtgttcttttatgactatggactggtcggcgttgttttgctatttatcttctatggaacattcctacaaggtgcccgaaacaagcgggcaatgatctccgccgcagtcttggcgcttctcatatttatagtagatgggtttatgctctggtactggcgtgtcatcccactatactgcacggcccatagtgacgacctccctcaacgtgcagaagaagaccctgttaactcaaaataactactcagcaaaaaatgaacatacttcttgattttattcccttgcaagatataggaaatggcggaataggtggtgctgccacttttacgtattccgtttacgagagcctactgtccagaacagaagagaagccgattctgttcgctgcttatgacaagaggtatcccgttggaaaacagtatgattatcatgacttcgccaaacaaaacaacatcacactcattgatatctctacaagacgcatggccgacatcatcgcagagaaacagattgatgtgttttttatcgccatcgggcaattctatgctccatacgatttaaagaacatctcatgcaagaccatcatgtttatacatgacattttcaatgtggagagttatgacaacaaaatagacctttcactgtggggtcccctctccatccataaatggaactattgcaaacgaattatcaatacactatcaggaaggaacaggcgacgactcaaacgtatttataaaaacatcatccccttattcaactcgcctctgacacgggcatacacggtatccaactactcacgggaggctctttattattacttcccagaaatcaacaaacccatagatgtatgttattcacccaaaaaagaggtgttgggttgccctgacatagagaacgaacaacttaacgacatcatagaaagccagaagaaatacctgctgctaatagccgctaacagaatttacaaaaatgcacaagtcgttatgaaagcatttagccggctgcaggcagagtacaacgacttataccttgtgacactaaactatgggcaatcagtcaacgaccaccatatagacatcgcattcctgaatgaaaatgacctggaaaaggcatatcaacatgcgtacgccctactgttcccgtcactatttgagggatttggctacccgcctattgaagccatgaaatatggaacccccatcattgcatccaacgtgacaagcattccagagattttaggtaacgctggcatatacttctctcctctctatcccgcagatctctatcgggccattaaggtagtaattggcaatcgtgatatcaataagactgaaatggaaaaaagatacaaagaaattaccaacaaacagcaaaacgatctaaataacctaatcgcagaaatactctctaaaaaatgaacccacgtatactagcattttatctaccacaatactacccaatccctgaaaatgacgaatggtggggaaaaggttttacagaatggaccaacgtcgcgaaggccaagcccctttttcgtggccattaccaaccacgcatccccgcagacctgggcttttacgacctccgtcttcaagaagtccgggaagcgcaagcagcgatggcacgcgatgcaggtgttgaaggcttttgttattatcattattggtttggcaacgggcgccagctcttggaacgtccctttaatgaagtcctgaacagtggtaagccagactaccctttttgcttgtgctgggcaaaccatgactggaccaacaaaacgtggaaaaaagggagcagcctgaaaacagattccatcatcatgaaaatggaatactctatcgatgatgatattcgtcactttaaacatctgcttcctgcatttcgagacaaaagatacatcactgtagacgggaaacctctttttggcatctgggcgccaaacagcattccagacctaagggggttcatacagcgatggagaggattggctcttgagaacggcctgcctgggctgcatcttgttggctatactgcaaatgccacggggcgctctatacgtgggaacagattgtcactatgggctaccgacaaagcagcagaacactatcaggcacttcttgaccaagggcttgacgctgtcatatcatctggcctgtcaagagggcaagccatgtgccaaggcagaatgaaaatgcttgcctattttctttctaaacataccatttttcccataaacaaccgcactgactacaaaaaaaccatggagaactattacgttgaggaagatagatgggagaatgtctatccaacattgatgccacaatgggaccgcacccctcgggctggcatcaagacaaatcctcttacgaacagcactcctgagaaattcgagaagacaatagatactgctctatctctcatcaaagacaaacagcctgagcatcaaattctttttctgaaatcttggaatgaatggggagaaggaaactatgtggaacccgacctcaagtttggtcatgggtatttggatgcgattcgaaatgccattaataaagcaagaaaggaatgataaaaaactgtcacatcttgttcattggagactgtgctcttggacgtaaaacgacaaacggcgtttccgcaaagaactactttctgctgaaacggctcaggagtttgtgtccagatgtaataaatatagacacagcacgctggaggaaaagaccctttgtactcttgaagttgctaatctgtttgatcacatatagaaaccatgacctgataatctcattaaacacccatagtgcatatttattccttaaaaccatcaagatacttttctctcataagaaagtctcctacttcgtcattggcggagttcttggacattggctcaaagaaggaaaagttcaaaaagcaccataccacatcgtcaagaacttcatcgttgagaccaaagacatggaaaaagacctcaaagaaatggggttcgcaagcgtcatttcccttcccaacttcaaagatataccgcaacctctacctgaaagacacggcaaagagggacatatgcgttttatctttctctcgcgaatcattccagaaaaagggtgtggagaaatcttagaggccataaagattttgaatgaaaagggattaagagataatttctgcgtacacttctatggcaagatagactcacggtaccaagcacgtttcgagactgagataaaacggctgcctaacgcattttacctcggctttcttgatttacaggaaagtaagaattatgacacattagcagggtacgaccttatgctcttccctaccttctggccaggagaaggctttccaggtgtcataattgacgcttttatagcaggacttcctgttattgccaccaaatgggcgcacaacgaggagattattaaggatggaataacagggacgttgatacccgttcatgacaccgctgccctggctgactgcatgcacatggcaatattgaatcctgagaagataaagacaatgagtcgcctgtgtcagcaggaagctgtaaaatacgatacagtcaacgtactcaatgaaaataccatgaaaagaatccttagtgactaatcaggaatatccggaagtgagacctgatttcccatctccttcagatacgctggtgtatagtaattcatcattccacctaacgatgtgaatgtcaactcaccaaaccatacctggccctctgcctcgtacaaatcaactctcacctggggaaaaggacgcgaaaccatctgtgccacatgaatcatcctctcaagctgtcttggccgtggcaatggttccttctctgccgagaaatgtcctgacattctcatgttttcaggatggtagttccactccaaatcgtagcaacctaaatttacatgcttacccttacggtttgagcaaaccaagaaagaatatggacgcccattaaaacaccatatcttataatcggtcaatgacgctgcgccagactctttctctataactttttctgcaatgattcgtggttggatgtgtttgtattgtggctctccagacaaagcccctgtatttttcgtcaagacccattgtgccattcttctgtatatctgctgatagtcccagtcagtcaacaatgtcttgtcaacaagtatatttgttccttttccatcaccattggtagctttcaacataaaccttgaaggtaattcgtcaaacctaacctcagagggattttcccagacgccatagacaggaacaagaatagaacccaatccacatgaagatatataatctctcacggcatacttatcagcaagacgggaccactgggatgtgtcactgaacaatttgagatacaaaatcttctcattcaggtcctcgggcttgtgtaaatcaggaaaatggccaaaccgaaaaaaataccggacatacacaaccagccttggaaagtggcctgccacgtccaatgctgtatccttgagtatagaaaagatgttatagaagatgttgcctatcatttgctctcgttttctggtacacccgtatccaatcaaaatgggtttcataagtttttgtcgtgtctggtacaagttcatggcttccatcgcccacgctctgattcagtaagaggtagaatgggcggtcaaatgtccactgtcccttggacaataacagttcgtcagcagacttgaggtactctcccacttttatgcggtcaacataccacacgactttgctagcgctccactctatgccatagatgtgccaacggtcaatgcttacagacttgcggaaactgtttcgttgctgatgattacgattcttgaccgtcaactcagaatgaatgttgtgattggattcccgcttttggccgaaagactcaaaaatatcaatctcgccatataaatttgccggcaactgtggcatgcctcccatccataccgcagggaaattgccaggatacagattggtgcgcagccgaacctccactttcccatattgaaatgcaaatttgttttttgaatagacagcacctgtaagcatcaccgctgtatctttttctaattccctgttgggaattgccctgcagacaagatgtccattataaataaaagctacatctggacttgttgagatccatctggaccaggtgctgttggctctcggtggaacactccattttgatgagtctggcctactatagtcttcttgattgaattcatcggaaaagaccagctgatagtcatcgccagaatttgggactgcaagggtcagcatcgagtcggatgcgagagtcgcaaagaggaaaacacaaccaaagtatttcattactgtaaaattcatcaacctacttcaataaaattttatgctgcatccatgtcgttcaagtatacccatgcaaataaggaaacgatatttgcgatagatccctacattgtaggaatgcaaacaatcaaaattgaatgatagacctcagtgtggacaattgagatacctgtcatgccaggatatcactgtcggcctcatacaattaatttgcttacaaatatagataaaagtcctgaataatgagtctattacatcaagaaaagtcgccttttcccttgagaaaggataaatatctgcccatgttgtttataaaacccgtgctggcaaattcaattgttcacacgggctaccagttggtacatatgcaataatttcacgttaactgcttcttcttgtaaaaaaaaccttacctttgtggcagacagccggacaaagtggacaagtctccgtgctgaagagtatttcaagtcaatttccaccaaaacgtggagtatcctgcaataagagtacaacaaggctgtgacaactaaaaacttactgctcagagaaaacctccagaactataggtaatacaacaaccatgtctcaagatttagtttccgtcatcatcccttgctacaacgctggcagatacttgcgagcgtgtgtagagagtgtgctacggcaaacttatcaaaacatagagatcctaattattgacgactgttccacacaggaagaaactcacaaagtacttaacgagttagagcaaacagatagcagaattaagatattctacttagacaaaaactctggaccagccgtagctcgaaatgaagggataattcgtgctcaaggacgttacattgcattttgcgatagtgatgacatgtggcaccccaccaaattagagcgacaaattgcttacatgcaagaaaaacaatgcgcactttgtagcacctcttactacattgttgatgagagcaattctattattggcattgtacgttctccaagcaaaataacctaccaaatgtacaaacgcgacaataagatagggtgcctcacagctatatatgatacaaaactgttagggaaaaaatactacatgcctctcctccgtaaacgtcaagactgggggctatttatgaaaattctgaaggatatcaaggtttgttaccctgtcacgctaccattggcttactatcgaagacgccaaaactctatttcaagtgacaaaacctcactcataaaatataatgtcaatatctacaaacagatattaggctaccctacgctcaaggcttatctatatttcttcttcagtttcttaccaacgtatttattgaaagttgttaagataaaatgggatagctatctgctacggaagaaataataagctaactgttcacaactctcgctctacttttatttcagttgcatcactgtgattgaacagtagcaatgcaagcaagtttgaacgtaagcatagtaagattagccgctctgtgcattaaaaatggtgtgcccatttggacacaccattttgtttgttagtggttggttctaaaaattaccaccgtatgtattcctttgagtagggcttcaaaagttggaaaggggaacaacaaactacttgtttgcttatttctcctttccaacttgtttacaggttcgcctgtggcggatgacctcagatgaagcactatcgtcccatgtgcacagtgtggctgacctttgtgtcgagctgcgtaatgatatatacgccttgcggtagctggctgttggcctgagctatggttatatggcgtgccacacatacgccgtcaagggtgtgcacgtctatcattgcgttggctggcaagttgcgaatggcatcaatgccagaaggaatttccgttgttaccagcgcgtcaagtccgctggcttgggcgaccttaatcacaggctgttctcctcccagcttgtttactacggaggagggcaattgtacacggtcggtgttggcaatgaacaacaggttacccttagtatcgtagaacttgtaccccatggtgccgggcagcacgtggtcaaaggctatgctcatggtgccatcgttattcttcacgcactgtagcagacgggcgccaccaggttgttgggcgttgggcttaaagtcttcccactgtccatgatcacccatcttaccaatggctacccagtcgtcgtagtcgcgacgcatggtgccggctggtgcaccttcataggtggctggcgagcgtcgtatgtggtcgtcaatgaacacgatgttacctaacttcttgggataggcgtgcatttttgccaatactgcgtcgatttgtgcctgggtagcggtgagacgtttctcactgtagtcacccaccaccttttggtgtactgggacaaagaatccgtacatctggaaaaactcagataagtcggcgttggctgcctcacagcacttgagcgcaaacttaagccattcgtcgggaccgttgatatcgtagggcttcttcatcgggtcgtcgttgagtagctggaagagcttttggtagaagtcgggctggttaccagctgcgtggaaatacagccacagcttgaaatacagttgtgttttacaccaaatattatagtcggcaaaatgattacccgctacatattgctcggagatgtactggctgctaccgttaccgcgcgaagtcataacgccttgattgaacacggctacgttggagaataggttgttagaaacctctgtgcatccgtgcatgttgatgaggttttgatgacagtgtcccatttcgtgtgcgggtccccaaatgcttcctcccaagcgcattctctcgtagttcataacactcgacagtgttccctcctcgtagtaggagccgaaagtggtggcatacatgtacgagctttgtacgctggtggcgttgagcacgttgttgcatcggtcagccaccttagcttgtagtcctttgaggtcgacctccatctgcacaatgccgtcccaaatcttaagtagattggccatgggaccaggacaggcggcctttaccttggcagcgttcatgtggaacaccacgtttttagtcttcaggttcacagcctgtgcctgcaacagtccatcgcttatcatatccttccatacttggttgtcgtcacccttggtcaggtcgaagtatccgttgacgcttccgccctcgatatgtattttgatgtctgggaactgggcgagtttcattcccgtgttgtgggtgtttactatgtagcgaatgaacaggttggcctgtttctccacggcaatgacgttgagtcccttcttcagcctgatgcggttgccctctacactgcacagctccaccgtctcggcctcaaggctggcacatcgctgtccacgaacaacaaaagggtattcttggggtaagccgtaatacccgtaggattggtaaggttaccaaacttataactcatgcccaccttccatgcccagtggtcgttgtcggagtagggcttgtaagaagcgatgcggaaacgctcttcccaattattgccactagcataggttgcccatgcctggtctttaatcttcagtacgacattctgcaaaataacaggaatgccatcgttttgcatctctgccttcaggttgtcgttcgttttatcagcatatacaggagctatcttcgtggcagcagcgtcttcaaaatacttggacaacttctgccaatgtacattggcattgtctttcaggttgtggaatgcttgatattcttcttgagcttttcgtaatttttcctcgtcaaccttcacctcatatagcacccagttgttggcggatgctgaggtatgccagcccacagcctgataaccttgcgactgtgcgcaatgaatgcccacaccgaagacatcgtccatggtgaacatcagattgaaaggatcgttcacctcgttgaacttgaaccctccgttggaacgggctgccgtacgatatggctggctcaaggctccgttttgtcgctgtatcatttgattggtgtaggcgttcaccaagtcgaaccggtcgccattggcaatcaatttccatacttgcgcgtagtcattggcaatggtagtgttctctgtggtgacggtgccgtttgcatagtctatcttgagcggtcgtttgtaatcaacacacacgatgcgatagtatttgccatcttcggggcgtttcgctcctgatagttgtgtgaggcgttgctttacctgatcgttgctgatacctgcttctctaataacccactcggaaggtgtgatttgtccaccaggtgctgcggggcgccatggcaccactctcaggtcaccgtcaccatgcaggccttcattgttgtcattggtgttggcgatgtcccaataggtattgccgttgacaaatccgaaacgcttgaaccaaaaagcgtaaggattggcgccagtataatagtttgtgtacttggtggactgtttctgtacgtaacgtcccgtaccaaggttttgcaaaaccgactgaccgtttatcaccctcatcacccacacgtcgtcaaacttagtggaagatggtttggtgctgcggatattcaacttgtggtcggaatcttcatacatatatagctcggtgccaggcttgcgctgggtgttgatgatgtagtaagcagctggtatgagctgttgcttttctttcaagcgttgctgcatctctgcggtgagggtcacttcctcgaactgccactctgaagggcggttggattcggaagtagtggtggggaaccagcgtaccactcgctgtccctgtgcctcatgcatacagaatctgccagtagagtgcatcagattgtagcattctacatcggtacgtgcagtatttctttttatattaaaggtaaaggggttgttacctgtagtgtacatagtctcattttcgtacacggttcccacgtaggctcccgaacccacgttgcgcagggtgtagccctcaccgctcttggtcagcacaaacacttggtaaaagtcgttgtcgttgacagtggcggtagtcttaagctgacttgtcgcttggtcttcgtacatcaggtgtcctgcgtagttggtattccacagtcgatatgcctttccgtctgctggtgcgctataattggtggcactaactggcaggaagccaaatattgtgcaacatagcatgaacaaccagcttgttatttttcttgttttcattgacttatgtagttgagaatgtttgtaaaaaaaagacatgcactaactatgtagaaagcgcatgtctttcgctaagggtatagtaccagcttgtggcactattccatattagaacctttttgctccaagtatggtttcaaggtttttctgtgcccatgcctcatcatgcacctcgaagagacgcagttcagacatgttgaaccagtcgttcttagttccttgagttcccaatggatctttgttgcggcgtgccaaaggtacgaacctcaggtactcatagctctcggcagatttgatgtgattttgtgctacgccctgctgcgcacgtccttcaggcagtttgtaggtgatgacgcccaggctggtccatgcaccatcggcatcggcacccgagttgcttccgaatacttcggcacgcttcacgtcaccacctccgtcaccatttccacgtcccatgtagtcgaagtagaactcgccagccgatgggttcgcaaggtgtatctgtatgcggtgtggctttccatcggatgaattcttttcccattgagagtgatagtatgtgcttgtattattgtcaatcaaaccagggataccttttccatctgttggatgtgtagcattggcagtaatcatgtcttcggtgagctttaactgaacactctcagaccattcgtcagatattcctttgacagttacaggttgtttggtctccataccagtaggaccgtatgtcttgatggtgaactcatattcgccagcgaacttgaaggtattcttgaaggtgacggagttgttgttcatgtcagtgagggtcttcttcaccgtcttgcctaccttggcgttgtacatggtgatgaccaacttggtatagttcactacttcaggttgatcccaagtaagggtaatctgtcccttctcagccttagtcttggcattgacaacattgaacggtggcacaggtgtaaacttgttctgcttgatagtaacaacgtataacctgtcgttgttttcgctcttcaaggtaacagtacctgttcgtggctggtcacttaggttcatatcaacctttccagacagttcaccatcggtgttactcagcaactgtttatctgcatgcaaccacgaagcagcattgtcggacacagtgacagtccacttgccatctttctcgttttgcacataagggatgcgtatcttgccacccaagtcgccgatttcgtaactcgtattaccgtagcaagggattaccttgtatcctacgcggctctgtatcaagacaaattcttgtgtagcatcccagttttgagacgattgcaaggtcatggtgcagtaacggtcagccttagttttgttggggtcgaggcgcagcttgatgagttttcgtccttgtgcatcttcttccaacttttcattagcgtcgaagtgtacccatgacgtggtgtctggtacaaggatatggtcaatgttgaggttggtggaaacgggagcaataaactcagtctcatttccctctacgtatgccatgaatccattctttcgcataatgaaaccaccatcttcaacgagattcagtgtggcttcgtgtcctacctgtatcacctgaacgttatactcttggtgtccgtacttgacggtgaccacagccttgcgtggctggtatccatcgtatgtaccagcctttacaagtaccttgtcgttggctttttccaccgtacaccaatcagcgttcgcttcggcgttccagttctctttcgccacgttggttaccacatcgatagtccgctcaccaccttcgcgctggaaggtgatgagtgcctggctcttgtgaggaacctcaagcagagacttgtcaaagttcgtctcatagtcgggcgagcaggctgtgaacgtcgcagtaagtgttgcgaccagcattgccgaagcaatgattatcttatttttcttcatttttctaaatgtttaaggtttttacagttgctctgcccttgggttatattgatggcgaagctttgccttcacttccttgaaaggacctggcttgttggtgccatctttctgtgggttgagcaagcgatacttgtaatgtacacggaactctttataataggtggagttgccaccgcccaatgcaacgagttcgttgaggtagaaagtgttgtcatattcacctatgggggtgagcatcaccacttccatttcattggcgttgtagggggttactaccacctcacgcttctttgggtcggtttgcagttgtttgcccacagtaaagaccacgctcttctgcttgatttgtggggcagcctttttgtagtctccataatcctcattacctgccaacatgcgtacggagttcaccgcaagcgggaaagctctgagcgtattggttggacgaaaagtctgactgctgctcaagtcaaccacataggagctgttgtagccgtatgttatttgcgttttggtagaagcaaactcgttcttccaatgaatgcgcagcaacacctctttcttcttcttattgaacggtgtggtggattttggatccagcttatagtccaagaagtagatgctatctggcgacagcttgtcaaggttcttgagcttgatggggaactttacctgtgactcgccagcctttattacaccattgagtgcaggttcttcatagcactctttgggcaacagcttagcaaagcgtgtggagtcgatgtcatagttcgatttattgaacactttgaacagtgagtcggagggtacgatactcacaggtacgctttccgaaagtagctgtgaaccactgacacctaccaccaatttgatgctggcgccattagcggatgtctctgcctccatggctacacactgcctgtcgtacacgccatcggagttttgcagtaagttgatttcctttttatattgctcctggtcgaagtcgtatgtctcgcacgagaagagcgtaatgccgacagccagcagcaacagtttattgatcttattgttcatcatcattttgtttgtctatggtttatgattatctttcccatccccagttttgatccatcttgggcagcttgagcaactcgtaatggttgagcggcaagaatatcatcttaggtttggcaatacggtctctatagttctgttcgtctatctgcacgatgttccagaagcctccgttggagttggtatcatcgcgatctttacttacgtctaatcctcgccagttgctactattagcatcttcgtcgagataggttccccaacgacgagtatcaaagcaccggtagccctcattgaaaagttctacttgtcgttcattcctaatcactttctcaaaggcttctctgtcattgagagtgttgttgtcaacaccggggagtcctactcggtagcgtatcatattgaaatacttcgccatgaattcagcatcacgactgatgcttacgtctaccagctctccactgcgattccatgtcttcaccgttgggttgccttcaatgttattcatagcctcacacagttcgagcagaacttcagcatagcggatgataggatatggcttcatcgttctcatcacaccattcgtgttgggtgcccatgaatcgtctgggtgtacatacttcactgaggtatatcctgtgatgtttacgtcattagggttattctgcgctcctgcctttcctgcaattccgtcactgttgtcgtaccagaattgctttttagttttggaaccgtcggcactggcagagttcatttcccaaacacgtccagggaaacctatgctggcatagaaacgtgccgatcggttagcatacatatttggaatgcccgacttgagtacaaaggtagagaggttttgtgccttctcggtggtgttctcaaaatcagcgtcatacaagctggaattagctggtaactttccgtctgccatcaagaagcagtctatcacgcgttgtggaacgctcagaccaccccagccaccaagtccgccgcccactgggaagcagtgttgtgtgtattcaataacgctacccgaagctgcatgagcccatataaactcgcggttcaccattggcaatccctcaccgttgaacatgtcggcaaacgagtggtaagggtctatacctcccacaccctctggaaattccttgtttcgcaacgattcgtctacgttgtcaagtggataggggaattccttatcagccttcaccgtgtagagctcgtagtagttcatgtctaccacttgcttagctgctgcggctgccactgcccaacgattgggatcatacttttggttgatgtaatcggcaccatcgctcttgcgcttccaaccactgaaacagcgatgcgcactgtcaccaccgttaaaggtaggcgatgcttgtaataaacgaaggcgagcaatcaatgccaatgcagcacccttggtaggacgtgagaaataagcgagcgactgatcttgcggttcagagataccctttaatgacagggcaaactcgttacagatatagtctattgactcatcgaacgtagaacgctcacggttgtagaactcgctgtctttgtcggtggggataatctcatcgcccacgatgagcagcggtccccagttcatcagcaagtggtagtaggcccagccacgcataaagtgtacataggctttgtattcacgacggtctccatcattcatgtctgccactttgtctacgttagcgagcatcttgttgcaacgctgtataatcacatacatgtctttccacaagtaccagttggggatgttggtttcgttgatttttccaacagagaactgcgctccccaaaactctgaggtctgccacttcacggctatctcgtcggaagcggtctcaccaggattccacgagtgtccccaaatatttccttcgtgtggaaattcttgtggggtattccacaaatatccttctgcgttctgcttgctgtggaagacagagtcctccttgaacgtagcttggaaataattgtccacgtccagaaagtcgcaggatgtaagcatgccgctggcagccatgaggcctgcaccagctatggtcatgatgatttttttcatattgtaatatcgtttgtatttcttagaagtttaggtaaagctgcaaagcgtatgtcattggcaacggatatacggcgccattagccccagcctgctcggggtcgaagtatttcacgttgtcgatagtgaagatattattcatgacgaattcgcagtctaaagaagataatccacatgcggtaatccatttcttgtggtgcagcttgtagcgcacgctcaactcttggaatcggaggaacgatccgtcacgcttccagaatgatgacagttgagcattgttgctattgcctccgtacgagagtcttgggaactctgcgttgggattttctgtagcagtagttccagagtaccaagctggcgtccagcggttctttgggttgttggcgtgcttgagcacatttcctatctcaccgttataaaatggaatccatccagagtcattatagaggcctgaacgatagtattccaccttggcagaacccttgaacaggaatccaatggtcaggtctttccatgtataatcggcaccgaatccatacattaaccgtggcagctgattgccgtaactcaatggcacgcggtcgtcgttgttcaccacgccgtcaccgtttacgtcacgatacttgatatcaccaggacgtaccttaccgaacatctgttcggggctggtttctatctcctccttgctcttaaagagtccttcagcaataagaccacgcaagatatacaatggctttccgttcgaactctggtaaccgtatgcgtagagaggttcctcaaaattgtcaacgatgttctcagagaacgtgtagttggcacgtacagtgaaactcatgtccttgttgatagggtgatgatatgagatgtttccatcagatccgtagctgtgcatcttacccacgttagagaatggaatggtaatcatacctgcatattctggtaaggtgacgcgctggcggtagatgttgtcacgaacatcgtagaagaagtctacggtgaaggcgagtctatccttgaagaatttgccttcaatacccacgtcgctctttcttgatacctcccatttcaggttgtcggctccaatctgtttctctcgaatacctaatccttgatagccccagtaggtgggtgccgtatggttgatgagtgtgaggtaagggaagcgtgtacctgtaatttggtcgttacctgacaatccgtagctaccacgtatcttcaagaacgagaaccaaggcatcgcatccttgaaccactggtagttggatggaatccaacctgcagcgatagatgggaagaatccgaaacgctcgcccttcttgaactgtgccgaacccgtgtaaccaaagttggcatcaatgaagtaggtgtctttatagccgtagtgtaaacgtcccgaaagattctgtctacgagcgggaatggcattgatgcccatggcatcgttaccccaatcggtacctttggtgtcttccatgtagtagaaaatcaaagcacccatgttatggtcgccgaaggtgcggttccagttggcttttgcctcaagatagtatttgcgccatccactgttgctactgccgtaaaccatgtctagcgcacgactgttcagactcttgatgagtgcaccctgcgcgctacgacccgtggcgtgatacaagtcgggagcgatgatacgtcgctcgttgaagtctgtggtgtggtccatcatggcttgtaccgatgcctccagtccctgcaacacaccattaaacttttgcgtgagcttcagcgttgtcatgttgcgggttgagttctggtctttgtaaccatagtagttgagtgcagcgtagggtgaaatcaagttgtctcgcccgaaagtaggtatggtgccatcggaatattccacgggcatcatcagcggattcatcacgcgtatgttgttccatactgcactggtacccataccgcctggcgtggtgtagttcacgatgtttccatcaacaccaaagtacaaggtggtgagcttggtgaggttcatgtcgatgttggcacgatacgtcatcttacggtatgtcaacggcttcttgaacacgttgcctttttgattgtaagctgcaccttcgtcttggtaacccaatgacaggaagtagcgtgcgatgtcgccaccgccgcgtgcgctcatgtagtagttttgctgcaacgacgtcttcttcataatctcgtcggtccagttcacatcaggatataaatccctgtccagtccgtgcttaatcaagtcgagctggagcggtgtgtacaagtccgattcacctgacatggcacgtgcctcgttagccaacagtgcatagtcgtaagcaccgagatactgtggtatgcgtttgatttgcgacagctttactgaggcacgccccgtaatgctgagtttacccatggcaccacgtttggtcgtcacgatgactacaccgtttgcaccacgcacaccgtaaacggcggtcgctgatgcgtctttcagaatagagaacgactctacgtcgtctacgtcgatgtcatcgagttttccttcaataccgtcaatcaacaccaaggctgagccgttggcaccgaaggtgctgataccacgaatccagaattgcgaaaggttacgacctggctctcctgaggtttgcatggtgatgacacctgccacacgtccaccgagcatgttgctcagcgacatacctggagctttcaattccttggggtcgatagtagagatagctcctaccactgacactttcttttgcgagctcaagcccgttaccaccacctcgtcaacagtgctggcatcttctttgagcacaaacttttggtcagcaagatctttggtcactaatttttctatggttttcatacccacagcctgtatcacgagggtggcgtttgggtctaccttaatggtgaactttccgtccaagtcggaaaccactcctcgtcccggaacgtttttgatgatgatggtggcgcctgggtacggttcgtcctgttcgtcaaccacaactcccgacacggtgaatgtcttgctcttggttttgtcgttggcattctgcgcaaagccgtttgtaaccacggcgagcaacagagccagcatatagataatttgtttcatattggtttgatatactattatttcatggatttattcaatcgtcagcttgcggatgcagcggttgccagtgtcggcaacgtacacgatgctgccatcagcgttcactgccacaccacgtggatagcggaactgtgccacgtctggacctccttccttaaacccagccgatcctggcagacctatgacggtggtcacagtggctttattgtcaggttggttggtatcaatacagcgtatacagctgttcatgctgtcagcgatgtacatcttgccatcggcagtgaaacatatctgtcgtggatatttaaacttggcattcttcagcaaaccatcctcccagccgctaccagcactggttccttcccagcatgcacgtccagcatatttctcaccatggtattcgttagggtcttttccctccaactggtcaatgtccacataccatatctcgttgttgtcggtctggcaaatgaacagacggttgggcataacaggactgaaagcgaagtatgagtcgctaccattgctgcttgctccatgaataccaatcttcttgagcaagatagtcgccttacgtgtcttaggattgatttttaccaactgtccttggtgcatgacagtataaagattgtggtctgttttgttgactacgaagcaaaacttccagttgtgctcatcaagtgtctttgtatcctctgacttgatgacacgcaatttctgttgtgcgaaattggtggctttttggtaacggtaaaagtccataccaccgtctaaaggtgcatacatagcctccatccccgactcatttgagaaggcaggagcgtttaccataccgcagtcttcgccaagaaacctcacattgttacgttttagcgaggctatcagcacgtttccgtccttattctcatttttactattccttgcctgacacccgtcagctcgacccgtgtgatgagttcgttcacagatgaaaatattgtcttcattgtccaagcaaatgtatgctggtgccgacagcgtagtagaagtcagcgtacctggcacggtagcttggttttccgagttaggttgtccaatgacggtagtcactgccgtctgtgtacgatagataaacttgttgggagcttcgccagaaatggctttctctccttctcctcgcatcaccttgatggcgatattgcgcttgtaggtgagtcctttaggcacggtgcaatagattttctcaccgttcgaggataccaatccgccacggtgttcgatgccgtcctcgtctacatacatcacgcgtagtccagcggtgtcggtaccgaagttactacccgagataatcatcgatgtggcaacaccacccgagtcgggatagaaatcgtccactacgatgggctttgatggatcgaaggctgcaccagccgtactggtgtctttgtcactgcatgcggcaaatatggcacatgcaagtacgcctaccattaaaattttatttttcttcatcttgttataaaaatagttatttagttgttttggttattcttaagagtatatgctcctcatattcttttatttttacatgcttatatataataaggtataaagagcatttgtttggtatagcattctggttgtaatagtttagatagattttcagaaaattatacagtttataacctcttttttctgttgtttgcaaaagtaatccttttttttgaaataaatggctttttgcaaaaaaaattgtttttcgaacacacaaggctttcatttaagcgatattattgtaacaactaataaaatatttttgtttttgcaacggaatggcacggagaagcacggaggtactataaacaactgttgcaagaataaaaaaattggcacaccgcaaaaacggactaaaagccccacaagcgtgtagttcaggacattgctccgtcattgttcatcagcccaactactgtacaacacggcttttttataaaagtacagcattgcatacaatatgtttaacaaagcagcgttatattataaaacattttaacgaggtgaagcaaatacccgcctatatcaaatataacaatgacattcagaacaaacgattcattccagacgggatgaatgagtttgaacgcaatatcaaacgttgcatcgatttcctgatagcactcgttgccatcattattttctcaccagctttcttgttgtgctacatccttgttaaacgcgaagatggcggtcctgctatctttaagcaagaacgcatcgggcgtttcggcagacctttcaccatttataagtttcgaagtatgtgcatagatgccgagaaagacggaccacaattgtatggacatgaacatgaacacaggatgaccaaaataggaagatatctgcgcacacatcacttagacgaactgccacaactgtggaacgtggttaaaggtgacatggctttcatcggtccacgcccagaacggaaattttatattgaccagattatcaaacgtgacccacgatatgtttacctttaccaaatccgtcctggtgttacctcgtatgccacgttgtacaatggctacacggacaccatggaaaagatgctcaaacgattggatttagatttgtattatttggaacatcggtcgtggtggtttgacttcaagattctcaccaagacgtttatcaacatcctctttggcaaaattttttagatttttgcaacttcgtcgtatttaatcaataagcaaagaagtactgaattgtaccgccacagagaagagccaagaaaatcaactcatggagtgaatcgacagcaaagaaacagatggtataacaaactgttatacagcctcatctcatggcattagcatgaaacttcaactaaaaggctcatttcgattgaactcagaatttgataaagacaagtcgataccgctgacttcgaagtatcattttgcggttactcaatgtttctacttcaaaacgttcatctaactgatgaatgccatacggtgctaacacctttacgtcctttatacgagggtcgccttttgtgcggtcggacaccaagggattgacaatgagcagttgctggtcgtggtgtgtgaaggtcatgacacattctggatgttgataatccatgtcattgagcatcagtatttttccttgaaatgaccaaaatattcgatgcaaagttaaatctttcgaaccactattctgtaaggtatctattcgctctaagtgccaaaagccatctaactccccgttgcctgatgtctccacttcgcaggaggttatcccgcataaagacaagcacagcaccactacataggcaaaatgccgcatgcgtacgctcttttgaaaactataaattgaaaatcccatgcttactaactgttaactgaaaaccttgattatttcctaagattccaccaaaatcagctccgaaggaagccatgaaacgccagccatatcgccagcggtaagcggtctctaaaaacaaacttacgttgtgatgtttcttgaaaaagggggtgttataggttccgaaaccttcttgataagttgccaagaatcggtaattgagccgctctgcgggttcgcccgacagtcccaagtgaaatgccttgaatcgattgttttgaatttcaatagttccatcttcgttgtaaagcggtgagcggtacagcggattgccgagtacctcgccccaatgctgccaccccggataaatatagtggttgtagaaattgtctcgccctgaaatatgatgactcatgttctgcgtatggtcatggtacactggtccactttggtatttcgtgtacaaatattcaaatacgaggctctgtaaccaatggttgtattttaggttcagttccaatcccaacatcatatccttgaagtcgtagagaaaaaactttcttttcgtcttgacgttccactcctctcccgttccatagccatcgtagtcgagttggagcatggaagaatggtcctcaaaatatttttctccgtataatcttagacaccaactgtcgccttcgtaattcatacggaagagccaacttcccaattggttgccttctacattctgatatacaattccctcttcgggcgcatcgtgtcctccgggcataaacgcattccaaaaagccctcatattggtgttgcctttgacaaccttggtttcgccattgctgcggggttgatagcttgttcctccaaagagtgttgccatctccaagcctaattccagagaccaagggcaaaatcggtcttcattgccaattttcaaaaatcctgctttgctgtgatacaacacccgatcgacgtatttcgactgtcgttgcgtaaaatcatgttgccaattgtcatccgtcatccgcccataagcaatatggcctttgatatgcagccacctatttccgaagggcaacatccaataatcaggcaatgccaatcgtacttgtggcacgggtcgggcattgataccaaaggtttgggaaccactactcaaggcattgttcttgagttccatagggtattccttgcttccaacggagagcgagccatgcaaccaacgcacttcagcaaaggcttgctgcacaatggctttactcgtaaaatgataaggtatcgccacatcaactccatatccaacgccccaacgacgaagtgagtctgtgcgcaatggtctgatgatgctggaacgaaggtagccgttaaccgattccaacgaacctaagccgtgtcgattggaatgcatccataaaggtgtgtgcccatgggcaaaagaactttggaactcaacatgatagttcatgttgcttccaagattcaatttttctgtttgttcttcttgataattcaattgcgcgcacacactttgcgccaagaaaagcagacaataaaatattatttggcgtttcattgtttttctatatgcacagataacggagttttttccacattattatatagaatacaatttcattttctcacatgccacgtttctctctttgcaggcaatgtagttgaacaacgaaagcacaaaacaagacaaagaacgcaggcattcgtcaaaagcgaatttggcaaagacacaaacatgttgatgttacgaacaaggtctggacgaagccatatagaatgatagcccaagttattatacagcaattgacgtcacgagcaaaaacggggcgaagcccatatagaatgatggtccaagatattatacagcagttgatggcacgagcaaagacggggcgaagcctcaataggatgttagccttagttattatacaccagttgatgttatgaacaaagaagttgcgaagcccatacagaatgatagtccaagatattatacagcaattgacgtcacgagcaaaggcggggcgaagcctcaataggatgttagccttagttattatacaccagttgatgttatgaacaaagaagttgcgaagcccatacagaatgatagtccaagatattatacagcaattgacgttacgaacaaaggcggggcgaagccccaaaaggaatacagcccagggtaacaccctgggagagcgttcgttagctcattggcgcgctgtaagcgcaaaaggagccagtgaagtatcctttctcacaaattccttttgcgcttacagcgcgccagtatgttggaatatccatacccagggtgttaccctgggctatattccgattgggctttcagcccgtctttgcggcgtgcaaacccttcatacctaattgtgagggcagattcatcatcgtgatgccaccgctcgactatttagaaatgatgtatcttgttgttgaaaacagcgtaaatgaaaacaacaacgaaatcaacagaaaacacgaaaatgtgcatttgatataaagaaatcaaaaaatacaagcgttctgacaaaaaaaaacgaaagaaaatgagttgcaacccctctcctacctttcatcaaaagtaaaagaatgtaacgatgtttttcgttgttttagatagaacggtatgttgctatctggtaaagacaaaaatggtttttgtcctgttattttaccaaaaatcggccatctaaaatcttcaaaatagaaaaaattaataggcaaacgaactgcaaaaatgggctgattttaacaaaaaagacgctttttacagctgaaacaatgattttacggtcttggaaacatacatttgagctgttattcacatgcttcagcagcattaaagcatgcaaataggaggcttaactcaatgctttaatcgaaaagaaatggtaaaaataggcagaaaaagaagcattacaagcgtaacatattcaataacaacgaattatgaaacttgctcataactcacatatttgcgaccaactttgctgttggttgttttcacgcgagttatgagaggcactttgtaaagaaaattcagcattaataatttgtccgagtagtgtacccccaatcttacagatgctacatcgttggtgttgttcgttgcataaatatgattcttcaataaaaaagctgtgggtacattcaccaaccgctaacattcgtaaatgatagggaatttcctcaatgatgtagggaaaagccctttcgacactaaaaacgaatcattatatttgcaatgtgatgaaaggaaaaaggtgctgtcaaaccagcagactccttcaccaatggtcattaaagacagcacaatgacgtcacaaccatatttacgaatcaacaaaaccctattatgatgaaaaagcttatatttaccctcgcagcactcttctttatttccgtctcggcaagtgccatgagttacaggcaagctcgtcagcaggcactcttcctaacagacaaaatggcttatgaactcaaccttaccgacgaccaatatgaggcggcttacgagattaacctcgactatctgatgaggatagacgattacgatgacctatatggcgtttattggaacaggcgcaacatggacttgagctacatcctcttcgattggcaatatcggttgtactgcgatgctacttacttctatcgtcccttatattggaatgcaggctattggcatttttccgtttatgcacgctatcctcggcgagactacttctactttggaacgccacgattttacaccgtctaccgtggcggtcatagctggcaccgcaacggcaaccgctcatggtactatggacgaagctacggaaacgactaccgtaacaatggcattggcatgcgtgacagattccacagcggatattacaacaatggcagtcgctcctttggcaatggaccgcaaagaagaatctctatctatggaagaggtagcggtaatggcgacatgtacaatcgctcgggtagcattcgtgattatcaaaacgtacctgaccaaaattccaatacggtgtttggacgcaggcgcagtagtacacgtaccactgttacacagcctgcacccaacttcaacggaagcaggagtgggagtttcggtggtagcagatcgtatcaaattcctgataacagaccctctgtcccaaatcgaacattcaccccgagcgaatcaacccgtccaagtaggcaatatgctccacaacgttccaatgtgatgcgcaacccctcaacgcctccatcacgcaactttggtgctgcatcaagaggtgggcggagttcgataggcacgtcagtaccgagaggaaatgccaacaataacaatggttctacggttcactttgggggaagaaggtagatactatcggtaagaaataaaataggtgaaatccaaaatgatggattcttttataggcattaaagatgtttcaggaaacagacagtgccaatgactgacgccagtcattagcacacaacgcaaaacttcagaaggtgcgaatgttacagttgtagctttcgcacctctgcattactcatccttgcgatttcagacatgggcaaacgataaaacacactttgaatagctttgttaatgatgccatgccccaccgcaagaacagtacctgaggggcaacgccgcctcacctcttcgaggaaagccgctgctcgttgcttgagtgcttcgatgctttctacattgtcaggaaaaggcttgtctttcaaatcaggaatataacaacccgtaaagtcgccccaatcgcgctcacgaaggagtggcgtttggtgtaccacagcttgatgcggagaggcaatacacgcacaagtctgcacagcacgctgcaagtcactggagaaaaacatatctatcgcttcagaacgaaactgctcacaaaggcgttccgcctgttgctcacccaacgcactgagcgttccaggcgtttgtccctgcatcactttttgcacattctctaccgtttcgccgtgtctcaccaaatataaagttgtcatatcttcatgatttggcgcaaaaataataaaaaagaattggaattatgagagatagtttgtacatttgtcacgtatataaagatttttatgaaaacagtacaaaattcattcatccgctcattgtgtgctatcatcattggtgttctcttaattcgatatcgtgaagaaaccgtgacatggctcaccattctgattggtgtcttattctttctatcgggtttgatttcatgtatcacctattttattgataagaaacatcaagacgaaaccgtggtacttgatgccaatgggcgacagatttcgggcttccgtcccacgtttcctatcgttgggttgggtagcatggtgttgggagccatattggcactgatgccaaccgtgtttatgacgggcttggtatatatccttgctgctatcttaatattaggagctatcaaccaatttgtcatcttggcaacaatcaatcgtattctacgagtaggcattatcttttggcttttgccctgttttgtattagctatcggagttatcgctatcgtggcaccaaggtggattgcttctgcaccgctcttcgtgttgggttggaccctcgtactgtacggtgtcatcgagtgtatcgacgccttcaaagtgatgtcggtgaacaaaaaatacaagcaaaaccctaccttagaagaaactgctattgaaactacggagatagaaccttcggtaacagaacccacagaggtggtggatatgaccaatgaagagacaaatcccacgcctaaagaataagccctaaacgtcaattgaatgaacggtaagagttacaaagacaacgtcttatgttcttattatatattgtaaacttacccgttcattgaatgtataaacatcatctgtaaaagaacataccaaaaatgaacctaaattctacaacttctcccaataagaagctgaatcccattgcgtggatacccacgctatactttgctatggggatgccgtttgtggtgctcaacatggtgacttctctcatgtacaaagggttaggaatctctgatacgcaaatcaccttttggacaggactgattatgttgccttggacattgaagcccatatggagtccttttcttgaaatctacaagaccaagaagttttttgtggtgcttacccaattgctttgtggcgtgatgtttgccttattggctttcgctttgaacctttctaacttctttgccatcaccattggcattttggcagtgattgccatcagcggtgccacacacgacattgctgccgacggaacatacatgtcggtactatccaccgaagaacaagcacgctggataggttggcaaggtgcgttttacaacgtggcgaagatatttgcaacaggaggattagtgtacttagcaggaatattcatcaagagttacggtgtgaccaaagcatggatgttcatcatgttgattactggtacaaccatgctcgttttgggatgctatcactttttcatgcttccaacagacgaaaaaactgataagcaaagaaagagtgctcgtgagatatggacagaactatggatggtgtttgcagagttcttcaaaaagaaacacattacttattatatatgcttcatcattctctatcggtttgccgaaggatttgtaatgaagatagtgccactcttccttaaagcacctgtttcggagcaaggattgggcatgacagagcaagagattggactgtgctatggcactgttggagctgctgccttcgtcattggttctatcttgggtggctactatatcgcacatcgtggattgaaaaagacacttttctctttggcattggtgttcaatgtgccatttgtggcgtataacctattggcgatttatcaaccacaagaccttatctttatagggagtgccattggactggagtacttcggctatggctttggattcgtgggactgacgctcttcatgatgcaacaaattgcaccgggcaagcacaagatgtcacactatgcctttgccagtggcattatgaaccttggtgtgatgttgccgggcatgcttagtggtgcggtgagcgacgcattgggctaccgacacttcttcgtgttcgttttgctatgtaccattcccgccttactcatcacttggtttgtaccgtttggagcctcccctaacccctcccaaggaggggaataattagctgagagcattgaacgttgaggtttgaacttttggttatcaatgctatcagctggtgaactcgtcaatgatgaactcatcaactcaataactaaaaactcaaaaactatcaactcgtcaacttgtaaacttgtcaactcgtcaactaaaactgtcaactcgtcaactaaaactatcaactcgttaacttgtaaactaaaaactcgtcaactaaataatatttctatgtccaaattaatcattcaagggcagcctttgcccaacatgccgtgggaagaccgtgcggcagattgtaaagaagtcatgtggcgttgttcagcgaatcccattattccaaggaatttgctacccacctccaacagtattttcaatagtgccgtagttcctttcaaagacggttatgctggtgtattccgctgtgatgacaccaaccgacgtatggtattacacgtcggtttcagtgacgacggtgtgaaatggaacatcaacgaagaaccgctccgttttgagtgtgacaataaagagattggtgaatgggtgtacggttacgacccacgtgtgtgctttatcgatgaccgctactacgttacatggtgtaacggctatcatggacctaccattggtgtggcatacacgtttgatttcaagaccttccaccaattggaaaatgctttcctgccctacaaccgcaacggtgtgatgttcccaaagaagattaatggcaacttcgccatgctcagtcgcccaagtgatacaggacatactccttttggagacatcttctacagcgaatcgcccgacttggtgtactggggcaagcatcgccatgtcatgtcacctgccgcctttgaagtaagtgcatggcagtgcatgaagataggtgctggtcctatccccattgagacatccgagggttggctaatgttttaccatggtgtactacgctcgtgcaatggctacgtgtacagctttggctctgccctactcgacttggaacagccatggaagcctatctatcgctcaggtccttatctcatctcgccacaaacacagtatgaactgactggcgacgtacctaatgtttgtttcccctgtgccgaggtgcatgatcccaatacaggtcgcgtagccgtttattacggttgtgccgacaccgtcacaggtttggcattcggttatatacccgagattattgaatttacgaaacgaacaagtatcatttaagttgtagcgttgacaacgcaaatgatggacggttctaagaattaccgccatgtatgtattacttagaacctatagacatactttttgttgcccttgacttcttttgacacaagaagttcaaagtctggcaaagcaatttttagaaccgtccttacacatcacttatcatcaagcagttaaaacagacattccacatgaaacacattctttgcctggtcatggcattcgtgacagccaccttctttgaacaaaacatacaagcacagtcgatgaatgaatgggacgaaccatccatcacccatctgaagcgtgaagaggctggcgcactaaccattccacaagagaattctatacaagacgattgtgttcctatggaaaaatctccctactaccaaagcctgaatggtacatggaagttcatgtgggtaccagatccttcaaagcgacctgcccgtttcttcgccgctaattatgacgatagtgggtgggacgatatcgacgttccctcgacatggcaaatctacggagtacgacacgggaagcaatgggacaagccactgtacaccaatgtcacctatccgtttacttatgattggtggacattcagcgtaatggctgatcgtccctctggctggacgtataacaacaacatgaaaaacccagtgggaagctatcgacgcacgttctccctaccatctacatggaatgggcgtgacgtgcatttgcgactaaacggtgctggtcacggctattatgtttggatcaatggaaactttgctggctatgccgaagactcttatttgccctctgactttaacattacctcactgctcaaagctggcacgaatgaaattgccatacaagtgtaccggtttacaagcggttctttcctcgaagatcaagactattggcgtctgacgggtattacacgtgatatctttttgtggtcaacaccaaagacatgcgtcaaagatttcttctttaagacaacgaatttgtcacctgatggaacatctgctaaaagccaaataagcctcaccattgcagggaaaactacacaaaacacattagtagaagcgaagttattggacggaaagaaagtcctcgcaacaaccaacaagcaggtcacgacgggcaagacaacgctgaaccttcctacagtgaatggcattgaagcatggagtgcagagcgtcccacattatacaaccttgtactcacgttgaaagaaaacggtaaaaccatagataccagagcttgcaaaattggatttagaaccataagtattggtcaggatggcgcatttttggtaaatggaaagtcagtgatattccatggtgtgaaccgtcacgagttcagtgaagagaatggaagaactgtatccaaacaagagatggaacaggacgtcaagcagatgaaaaagctcaacatcaatgcagtacgaacctcacactatcccaacagtccctacttctacgaattgtgtgataaatacggtctttatgtattggcagaagccaacgttgaatgtcatggcaacaccagtctgtcaggcaacgaacttttcagagccgctatggtagagcgcaacacccgccatgtactgtcgcttcgaaatcacccatccattgtcatttggtcgggtggcaacgagagtggtggaggagataacttcagatcggtcatggaagccattaaacaacttgacgatacacggctcacccactatcaaggcaacagccaatggagcgatatgaccagcacaatgtatgaaagctacgaccatatcaagaatattggtgagcagcgactggcagaatacaaggcaggatggcgtcccaagccccacgttcaatgcgagaacacccatgccatgggaaactccatgggcaaccaacgagaaatgttcaacctgtacgaacgctatcctgccttaataggtgaatttatttgggactggaaagatcaaggcattaagatgcctgttcctggcaagcccaaccaatattactgggcgtacggcggagactttggcgacatgccaaacgacaacaacttctgctgcaacggcattgtcttgccagacaacaccccaacagccaagaccttcaacgtcaagaaaatctaccaacccatggacttcaggatgaaagacagcctgcaatatacatttttcgtcaaaagcaagctcaaccaacgtcgactaaacgatgtagacctcacctaccagctactgaaagacggcattgccattgcgcaaggcaccgttaacaacatcgacatcgcacccaacgacagcatggaaatcaagctcaatggacttccaacacttaacgacaaggcagcagaatactttattcgcttcactgccaagctgcgccaagccaccctgtgggcagatgcaggatatgaagttgcgagcgaacaattcaggataagaaacgccattcacaagaaaccgcacatctcatccaacagcaacccactgcaactcacccaaaacgaaggaactgtgactatcacaggttccgacttctcggctgttttcaccaatggcatcctctctgcctactatcaccaagaaaagcaactcatcagcagcgacatcttactaaatgctttcagacttccgacagacaacgacaagaaacagacaggcaactgggacaacatgggactgcgtatgctcaactattcgttgggcaacacagatgcgactcttgacattgacggcaagcgtgccagcgtcaagacagaatgcacctatactggcactaatggcactgccttcaacgtaaaccagcaatataccatattgaacgatggcaccattattgtcaacaatatcatcgaccctgcacaaaaaggcgttgtattacccaagttgggcttccgccttggcatgccacaaagcttcaacaagatgcaatggttcggtcgtggtccttgggacagctacaaagaccgcagggaatcagctttcgaaggagtgtatggcagcaccgtcgagcaacagtttaccccctatgtgaagccccaggaatgtggcaataaggaaaatgtaagatggttggcattgacagacaaccaaggaagtggactgatgttcgtggctcctgcacagatggcaaccacggtagccaactggaaagccgaggacaactatataaacagaaacaaccgatcggcacacccataccaactggtgacaacgtccgaaaccgttatatgccttgatgcggcacaaagagggttaggaaatgccagctgcggtacagatgtcatgcccaaatacgagcttacagctcacaagacttccttcaacttcatcatcctacctttggcacatcgacatactgaaaaagagttagctcaactggcacaaatagacaatcctctttgccaacctgtacatattgaacgaaacaaagacggatgggtatccatctcctcgccacaacccaatgttgtgattcattatagtattgacggcaagcccgaacaagtttactcaaagccattctacttgaagtcacgcggtgtcatcaaggcttacgcatcgtcacccgaccatgaaaatagcatggtaacaaccgtggagcttggcatcatgatagacaaaagcgcatggagagttgtcagttacgacagtgagcaaggtggcacagaacaagctgcctatgccattgacgataacgagaacaccatttggcacacccaatatcaaccgtcaaagcccacattccctcacgaaatcgtggtagacatggggaaaagctaccgtgtttccgctttctactatcatggaaggaaagaccttgtcaatggtaggattggcgattatgaaatattctttagcaacgacttatacaaatggggagcaccagcagcagtgggcaggtgggaaaacacctcggcacaacaaaccgtacctattattagcaagcctattgcccgttacatgaagctgatagcctacaacgctgtagacaaaaatgaatttgcctctgccgctgaaataggaatcaacgcagacgaggagattggcgacggacaagtaactgccaaagatgagttggacggccgcacattctacctccgagaaaaagagtcgggactatacttgcattaccaacaagaccaaagcagtagttatcaaggagattattgtttaggacagctcgacacaaacgacgaagcatacaagttcaccttctcaagaagtgaaggttttaccaacatctactcggtgcgcaatagcggtctttacatggcaggtgtaacaggcaactggcaatgcgttgcaatgcaatatccgtcctctaaccagcaactcattcaagccgaatgggtaggcggaaacgaatataagctgaggggaatgtggcaaatacaccgctacctcaactttgacgagaaaagaataaatgcttacgtatatcccgacaagaacactggtgcttcgtttatcatggaacttccaacaggtatcgagaccctgtcacacaaacaatcgctgaatgtacacccaaccctatcaaaaggtactatttacatcgaaggacaaaacgccacacgcgtggaggtatacaacaccatgggcaagcagatacaaaatgtcatcggcaacaatacgttcagtctaacccttcaagcacccaatggactttacttcgtgaagttgtacaatatggcaacgggagagcaacgatgtgtcaaaatcgtgctggcacgccactaatggcaaccatcttctcatagtatcacgtatttccaaccaatcaaagctacccaccatctccaccactgcacacagacgtttttgggaaatgtcctcatgccccctgaatttctatgaaagaaaagtctctatcaacacagagacacaatattaagcctatcatcaagagcaaggacagcataccaaacaactggtgaggaaataacaatggagcagatagtagggcttagatcttgtaaatagccaaaatgttagagttcacaaagcgtcaattactatctatctgattattaaatagagacaaagacaccattagcaaacttacgcaaaggatttattcaatacgaaataaatatattttttctgcttgcccttcaaatgaaaaccctgtttcttcagataggaaaagaagtgttgcagactttgtggttgcttttcaatacctctcgcatagcgaaaaacagccttggcaaaagcctcttcatccacctgactatttactgctaattgatgcagcagaacaggcaagaggtcataatacacccatgcagtgttggctgtctcatcgctaccatctgctccaacgctgatactatgattggattgtatgctacgttttgctttctttatcatcgtcagattaatgggactatgttctattgaatctgtaaacatcttctcatgtgtgatatacttaccaaagagatatttggctaaatactctgtggttgattccgcaaagaagtttgtttcttgagcaggtaagtttttttggcgtatttgttgtttaccaatcacaaaatgtagcatttcatgcaataatgtatgctgataatacattttttgatccattagcaacacgctgtctaatgtcaaagaaaaatgggcagaaaggttgtccaaattctctgctttccccatcttcactttaaagttgagacctgttttcacaattgcaatgtgctgtcgcatatcattagaaagatttgcaagacaatcaattgctttcaatgcacgatatatgacgctgtcatcagaaactgacgctgttgtggacaaagagcttttgtcaaaggatttgcgaatggtatcaggtgatagcttatgatacaactgtgtcgccagcttttcgttttcggcaaccaatgtgatatcaaaccccttgtattcaatggttttatgttcatatacgggacgatagaacaagaacaatgaggggaacttttcgtgtggtggcactgtaatgctttcggtgttatataaatctatcaatcctttgtctgtaagtagataaaagagagaaggatttacgtgtaaaatgtaagtggtggtgtccgtcctttgtgtgtttgtaggaaataaagttccccatccttcatagtgaatatatgaaaatgaggggatgccattgctattaaacagattgccagctataaacgaacagtcgttatatgataatgagaatcgccctcgctctgttttcatgtattgaagttcctgcttctctatctcaggggtgttccagttcgttaaattcagattgttccacctcaattttccgtattgtagcgtgacaggaataaatggtcgtaaaacggcactgaagtatgaactgttctcaaattgatattgttgcagtgaagatagcgtcgtttgttgcggaaactccacctttactcccaattgaatataaggtgacaaagaccaaccgctgggaagagaatcggtcaataatgcgtagtctgagtaaaaaggagagatgacgacacgctgttgtccccatgcggataacggtagtagaaatatacatatctctacgaatagtatgtgcaaataattgattgatttcttcattgttgagcttattttaacaatatatgtagacttataaataaaactcagataacactttctatcactcacaactcacatcaggcaaagattgcgtagccatgcactgctttatcccatcaacaccaatctctctacatatttcgagagaatatctattcctttgatgttgtcgcctccttgcggtatgatgacatcggcaaaacgcttggtaggctcgataaattgctcgtgcataggcttcagtacctctaaatagcggttcaccaccatactgacatcacgacctcgctcaacgatgtctcgctgaatgttgcgaatcagtcgttcgtcagaatcgcaatccacaaacactttcaagtccatcatctctcgcaaccgcttattgagcagcgtcataattccttcgataatgataacaggcttagggtctacatgaatggtctctggcaaccggttgcacttgagatatgaataagtaggctgctctatcgattctccactacgtaagaggttgacctgcttgatgagcaatttccaatcgaaagcatcggggtggtcaaagttaatggcatgccgttcttcttcggtcatctcagaggtgtcgttataataagaatcgagcggaaccacagccacatacgcaggaggaagtgcctccactaactttctcaccacggtggtcttacccgaccccgtaccaccagcaataccaataacagtgattttattgttaaattctaaaggaaacatgataaaattatttatgctaaaatatcttggaacatcacttgataatatttcgccttctcctctatcttcataggataagcacgcgagctactcggcatgcgatacaagcgcaagagtctaccttcaaattgaaacgtatggtattgccccatttggggtgcagaaacaccataatgctgcgtaaaaaccttagtagccaacctacctgccgtgagtactcccctacattggggcagacttcgcaacaaggcatccaagtctacaggttctacaatctccaaatctttgtccgatgccgtattcttggttcgtcgcacacgcaaggctgtgtcatacagtgccacccctttctcttgtaaaaacgctttcaactcgtctaacttaaaacttttctctccctcattgacaaaatgattcttatcattaaaaaacaaataaccaaagatacgccacatatcattttggaaattgggataaaagaatggcatactccaacgtttaggagctggaggaaacgttcccaacatcagcagccttgcatgcttgggcaagaaaggctcaaagggatgcgtctctatggtgggcaaatcattgttcatatctcgttgtttcttcgtacgttcacatggtgggttagacactcttcaatgccaaactgcaaccgccctcattccgtgctcgttgtctatgtgcctgttcagcgtatcgctccgatgcaatcatccgcttgaaacagcacaacaaattgttaaaacagattgttttcggagggaaaatagactgttttggtgagcaatacagtctattttgatagattactgtctatgtgtaagcggcttatctaccactacgactgctttttcactaagtagactaccacaggcaagtggtcgctatatccattgagccacacgcctcctgctgtggttcgcttaggtgcgcccttatatttgcctgtagactggatgagataatcgtaacgtacaatctgacatttccaatatttcaacgacgaatagtcgcgttttccattttgattgagcatgttgggcgagagtactatttggtcaaagagattccatcctccttggtacattaatgttcctctaccctgttttgccaaaatgttataccatggattgtacatatcgtccttcccaacttcatccacctctgctttggcagacaacacctttgccatactgcgactcgtggggtcgtcgttcatgtcgcccatcaccatcactttgatagcaggatgttgacgtaaaagcgaatccttgaccgctttcacctgcgcagctgccacctctctataataagacccactgtaacggctcggccagtgacacacaatgaccgcaacatgctcgccacctaacgttcctgtcacggtgaggtagccacgggtatggaaagcactgtctttgggaagttgcggaacatacggtaccaatttcaccgtttgaggcgtgaaaagttggggattgtacaacaaagcacaatcaataccacgcctgtctggtccttccacatgaatgtatcgatatcctcgtgcagcaagaggcggctgggcaaccaacgcatcaagaacgcgcgcattctctacttcgctgagtccaatcatggcacaacccacctttggcaacacatctgtacccatatctgccaatgcacgtgccatattgcgtaacttgttggtatatttgagtttgtcccacttatacgaacccgtaggtaggaagtcataatcattctttccttcatcgtgacaggtgtcaaaaagattctcttgattgtaaaaacctacgccataaacagaataatttgtttgtgcattgagcctcaaaagtcctaagaccaagaggagtgaaagcatgatttgttttttcattgtcgaactataaatttggtaaagaggagtttttcaatcattcctttgatagcgcatcagttcaactgatataaaccgacagcatcaactctcctgctatgtgatgcaaagataattgttttctgctaattaaataacgtggcaggcaaaaaatacgtttattctcttccaacattgaaatttattttgttactttgcaatacatattatcatacttaagaaaaatcttttatgatgcaacaaaagctcaaattagcacttcttgccctttgttatgcgtcgttaacctttgctcaaaacgacaagacaaagactaacaagaatcctatgatggatgagtcggcgtttacttttacggaagcacaattgggcgaagatgaaaacatgacccaaaatgtcattatcctcaactcaagcaccaatgcttatgcctcgggagttggctatcgattctcacccgtacgtttccgctatcgtgccttgccacaagagtataacgatgtatatatcaacggtgtaccgatgaacgacatggagagtgggcagtttagatattccatgataggcggactgaaccagcaaacccgcaacgttgactttgcactgccctttgaaagcaacaactttgctatgaatggattggctggcagcaacaattatgacttccgtgcagggatcatggcagcaggaaatagactgtcgttaggagttgccaaccgtagttactcggcacgtggcatgtacacttatgcctccggattcaatgccaatgggtgggcaatagctgccaaccttacttatcgctgggcgaacaaaggatacgtagagggaactttttataactcgctttcctatttcttagcgatacaaaaacgatggacgaatgggcattcgctgtcactctctacatggggaaaccctactgagcgtgcatcgcagggcgcatccacagacgaagcctactggttggctaacaattacctctacaatccctattggggctaccaaaatggaaagataagaaactcacgagtagtgaacgattttgctccatctgcccttctcacgtgggactgggatatagctaaagacacgaaactcaccacatcactctttggtaaatatagcaaatataagagcactaagctgaactataacaacgcagagaacccacaacccgactattggaaaaatcttcccagtagctattatgaggtttggggcgatgaagccaaccgcaatgctaaaagtcatgctgctttcttagaatggaatgaggcgtacaactactggacagccgcaaaagaaaaccgccaagtgaaatgggaccgactgtactgggcaaatcaacaagcagccaagacaggcagtgatgcgctgtattatgtgcaagccaagcacaatgacaactttgtgatgaatttagcgtcaacgcttaccacaaaattaagtaagaaccagacatggaacattggagctgtattaggtcgaaatcaaggtgggcattatcagacaatggaagatttgttgggtgccaatagtttccacaacatcaacacttatgccgtaggctattatcctaaaagtagcgatgccgtgcaatacgaccttaacacaatgggagcagataggacaggacgtttgataggcaaaggcgacaagtttggctacgattacgatatcctgattcacaaagcacttgtttggaccaattacttagccaatatgggtcgctttcatctcatggttgcaggaaaagtaggcggcacagacatgcaacgtcaaggctatatgcgcaacggattgttcccagaaaattcgtatggcaagagtggacacgccaaattcttagatggtggcggcaaagccagtatcacatgggatgctggactgggcaacattgtatctgtaggagcaggatatgagtggcgcgctccaacggcacgcacagcctttgcatcgcccgaaatgaacaacgactttgtgttgaatctcaagaatcaacaagttttcagtagtgagttgggttatcaataccaaaatgcatgggtacacgccaacatcaacgcctactacaataggatgaatcatgttaccgaatggcaaaacttctatttggatgacatcaattccttctcttatgtttcgatgactggcattgaaaaagaagcgtacggtgtagaattgggggcacgctttaagctcgcatcttatttagatcttaccacactcggcacatggagtgaagctaaaaacatcaacaatgccaaggtgcgctacctcaactcaacagaagcgaaatacgtgaacgagactgtgtacaacaaaggtatgcgcgaaggagggacaccgcttactgctgcaagtcttggattgagtttccatcaaggcggatggtttgtagatttgaacggaaactattacgatcgcatctatttattctattctccaagttatcggtatgagagtacgttacgtataaagaataagcgtgataatgaaggaaataacatcatacccgaacaagccaaaggcaaaggcggtttcatgttagacggtagcattggcaagagcattcggttgaagaaaggacagctgaacttgaacctcatggtaaccaaccttctcaacaatcaacgcatcgtaacgggaggctatgaacaaagccgaagcgactacatagtgaaggatgatgggacgacagatccacgtacatacaagtttccacgcaatccgaagaaatattatgcttacggcatcaacggaatgttccaagtatcttacagattctaataaatctcaacgacatgaagaaaataaaatatatagtcattgcacttgcttgtgtatgcctgactggttgcatggctgacgattacgatgcaccgcagttgaaccagtcgccctacggtaacaacgaactcacagaaacgaaggtgctaagcattgcccaattgaaacagcaataccaaggagtaattgccgcaagtggcatagaagaaattacagaagacatccaaatcaagggttggataactggaaatgatgtggaaggcaacatctacaatcagtttgcaatgcaagacgaaacgggtgctatacttatctctgttgcacaaggtggtctctaccgttaccttcctgtgggtcaagaggtgctgatatcactcaaaggactcaacataggaggatatggcagtcaggcacaagtaggaggtatatacatcaataagcgtgacggttcaccacaagtgggacgcatgaataggtttgtgtggatgagccatttcaaattattgggcacacctcaacctgaaaaagtgaaacctactgtctttgatcaaagtaaaatgagcaatcagcaatatctaacgaacaatagtggcatgctgatgacgctaaagaatgtgcagttagaaggagccgacggcaaagctgtatttgccccaaaggacgggagcatcgcccttactgccaatgcagccaaccgcacactaaagggtatcaatagcaaaacaatggtagttcgtaccagcacctttgcagattttgcaaatcaacccatgcccacaggagcggtagacattacaggcgtctttacaagattccgcaatacatggcaaatcttattgcgctcggctgatgacatcaagcccgcaaaataggacaacgctactacaagatacggaaactcaatgacattcctaaatgaaggtctgaaaccaaaactaaacagaacaattatcaataaaagaaataatgatgaaaaagctattttattcattcctatcgctggccatcgcggcactgagccttaccagttgtgaagacgttcccgcaccctacgaatacccagaggacaatggcggtggagagattgtcgccccaaccgaccccaagggaacaggaacacaggaagacccatacaatgtagccggtgctatcaaaatgatcaaaggtctggaaagcggcgccaactcggcagaggtctacgtcaagggaaagattgtctctatcaaagaaatcaacacaaccaacttcggcaatgccacttattatatatctgacgatggcacaagcaaaggacagctctacatcttccgcagcttaggactggaaaacaagaagttcacctcggagaatatcaaggtgggtgacgaggttgtagtttgcggacagttcacaaactacttggggaaaacaccagaaaccgttaccaacaagagctatctctactctgtcaatggcaagacgagcgacaactcgcaaccacaggagcctggaaccaacgtgaatccaactggtgagggcacagaagcatcacccttcaacgtagcagcagccatgaaaaaggaaaaggttgccaaagttttcgtcaagggatacatcgtgggattcattcctggaaaggacaaaaacgaggcaaagttcacagccgagagttgcgaaacagagaccaacctccttgttgccgataaagctgacgagacaaacattgccaactgcatgcccatacaactaccctttggcaacattagagctggactgaacctgaagaaaaacaaggacgtatacaagaaagagataacgctctatggaaacatagagaagtactttggtatcacgggactgaaaaacgtgtcgtatgccttggtcggcacaaagagtttcgggacaaaacctggtcagccagtaacgccttcaaccgacatcttgaacgaaacgttcgccgagagcataggctccttcaccattgccaacgagaaagacatgccacaaggtcttaaatacgtatggtttgtggacaagaaacaccaacaggtgaaagccagcgcctttttccaaaacaagaaattcgagacggaaagttggctcatctcacctgccctcgacctgagcggcaagacaaccatcacgctgtctgttgagcaaactgcaaaccgcttcaactccctgaaagatgagatcttcatcaagatatctacgaactacaagagcggcaagccctcgacagccacttgggaggttcttacgcccagtaaatggccgtcgaacaaggactggatctccgttaactcaactattgacctcagcgcctacgcaggcaaaaaagacgtaagaatcgcctttcagtacaaaagctcatcacagtcggctggcacatgggaactgaagaacttagtcgtaaaatgacaaaaaagcagtgatacgtttggctgtttgcaaaattatttgtacttttgcagcccatacagcaaagaaaataaataacattcaatagattataaaaatgaaaaaaggtattcatccagaaaactatcgccccgtcgtattcaaagatatgtccaacggcgatatgttccttacaaaatctacctgcaagagtaatgagacagtagagtttgaaggcgaaacttacccagtggtaaaagtagaaatttcaagtagttcacatccattctatacgggtaagagcaaacttgtcgacacagcaggtcgcgtagaccgtttcatgaaccgttacggtaagattcaaaaataacatacaaccctatttttcttataaagaaagtgcgttcgggcgtagttgcatatacggtcggtcgcactttttttcattgaagcgaatctcatgaaacaactccattcattatttttcgttgcatgctgctccctatttctcttcggatgtgattctgataacaattcaaccaacggagagacggaatcgaatactaacgcaaatcggttagtgggcgtatctaccattggtaacccaaccatgccacccgagatttgtcgcttggaatttccaaaaataaaaggcggtaacagcatgattattgtgcacaaagccgagctcaacgcacgaacccatgagtacggagtgaattactcggtagaatgggacacgcagaaaaagtcccaaagatggagttgttatcagatgtacagaagcattgccgaagcgcataccaagcgctatcgctccaaaaaaaaccaatatccacaagattcaaacctgccagaagcttttcagtttgcatcagatccatattggcgaacgggctatgaccacggacatatctgcccttcagccgaccgattgggttcggcagaagctaactaccaaacgtttttcctgaccaatatgcaaccacaagtaaacggattcaacgcttacgtttgggcaaatatggaaaaacaattacgcatctgggatagagatgatttcagagacaccttatacgtttgcaaaggtggcaccattgacaaacaaaatcaaatactcacaataacatccaaaggcttgattgtaccgaaatacttttatatggcgattctttgtaaaaacaaatcaggctataaagcgcttggcttttggatagaacacgaagcaaatgacgacaccgacttaggtaaatacgttgtttctatacaagacttggaacggaaaacaggtattgatttcttctgcaacttgcctgataacatcgaaagacgcgtggaatcgttacctaaagaaaagataaaattagcatggggactacgataaacgttcatcatgggtatatgcccaacctcttagaacatcaaagtgaacgctgaatacgtttcaacgttcactgcacatagatgcccacgaaaggacattttgtactttaatgatgagatatcaagctatcgcaatcggacaaaactcctttgtttggcttgagaacctatcagtccatgctgaatgatactttctttgcataagtataacgattgtaggcaaactcatcagtctcaccatttcccctctgaacaccagagaaagagcggtcggttagatttaagtcatcgtaatcaatcaccatttggaaattctgtccattctcaccattgtatatcataatgatatctccagtactgcgatcgatacgccacgaaaagactctatcgtaaaccaattcacctctaatataatccaactgtcgtccacgacctgaaagactgttcgaatcatattggtcaaactcaatatctgtatcgtacacttcttccacaagctgctgttgtgcgttgtaaaatcttgcagctgtctttcctgtccaatgtcctcgcaaggtttgtgccatgagagttaaatctacatactcagaatcatagtcatcatcataatagtaatcgtcgtcgacagtacatgatacaaacccgaaggagaatagagccatcaaggctatcggtaatagttgcgtaatctttttcatgtctttatatttttgttattcattctatgtaacactgcaaatatacgcattctctgaaacttggtacgcataatttcactattcttaggtagggattctcctactgttaaggaggaaaaacctaaattaatatttattggcacgtacacatcttatatattcaaataaaatccatatctttgtaattagtataggacgtatccgttaggttcaacaatgattcctaaaattaaaggaaaatcatcttgattgagccaaactaaaacgttcatttataaatcacattatatatcttaaataaaatgaaaacaatttacgattttacagtcaaagacagaaaaggtaatgacgtatgtttaaaagaatacgctaacgaagtactcctcattgtaaatacagctaccaaatgcggatttacgcctcagtacgaagaactggagaaaatatataaaaaatatcatgccaaaggcttcgagattcttgattttccttgcaatcagtttgggcaacaagccccaggaaccgatgagagcatccatgaattttgcaaacttaactatggtacagaattccctcgcttcaagaagataaaagtaaacggtgaagatgctgaacctctttacaaatatctgaaagagcaaaaagggtttgctggctttgacatgagtcatcctattgcaccagtcttggttgacatattatcaaaggaagacgaaaactacgacaagaatccagacatcaaatggaacttcaccaaattccttatcaacaaacagggacaagttgtagcacgctttgaaccaacagagaatcttgacaacgtagctaaaaaaattgaagagctattataaatttatagaatactaactccattgtaaagtgtgatatgaattgtaaatacctgccgtaaaagcaaagtagaatagaaaaggcaacagttcacagaacatctgttagacttagggcttttcttcacttctttcactttgtttgcggactggtttcacaattcatcttacactttttttattttacatcaattcaatatggaatcaaaagaatatacccgttgtcttatcataggtagcggacctgctggttacactgcggctatctacgcagcacgtgccgacatgaatcccattttgtactgcggtctacagacgggtgggcagcttacgcaaacgaccgaagttgaaaacttccctggctaccctactggtattgatggcaatcaaatgatggttgacctacgtgagcaggcagaacgttatggtacagaggtgagagacggcgagattgtcaaagcagatcttagcaaagcgccctatttgctaaccaccgaaaaggggcagcagattgaggcagaaaccgtgattatcgcaactggagcctctgccaaatatctcggactcgatgatgaggagaaatataaaggcaaaggtgttagtgcctgcgctacctgcgacggattcttctaccgcaaaaaggttgttgcagtggttggaggtggtgataccgcctgtgaagaagccacttacttagcaggactttgcagtaaggtgtacatgattgtacgcaaagattacttacgtgcctctgaggtaatgaagcaacgtgtagaagaaaacgaaaagattgaaatactctacgagcacaacgcagtgggcttgtatggtaaagacggcgttgagggagttcatttggtaaaacgcttgggacagtctgatgaagaacgatacgacctccccattgatggtttcttcttgggaattggacacaagcctaactctgatatattcaaagaatttttagaaacagacaaaattggctatataaagacaattgctggcactccaaagaccaatattcctggtgtttatgcggcaggagatgtagccgaccctgtgtaccgtcaagcagtggttgccgctggttctggctgcaaagccgcacttgaagcagagcgttaccttactgaaattaacaaataagcatccaatctttgacaaaattagactgaagactgtcgatgctaaacgccctcaatacaaccatttgtattgagggcgtttgatggatgatgtcattgttttgatggacatcgctctcttataattcaaaaaactgatatacaggggaaatcaatcattgtatccagcggttatctcacatatttttacaatcacatctaccgccttttccatgacttgaatggagacaaattcataaggtccatggaagttgactcctcctgcgaagatgtttggacaaggaagtcctttgaaactcagctgtgcaccatccgttccgccacgaattggctctacctttggaggcacacccgtctcttgcatcgcctgtagaacaatatctatcacgtgcatgtttggatcaattttctctttcatattgtaatattgatccttaatggtaatcttcaccgtgtcctcaccatatttttcgttcatctttgttgcacaagcttccataaaatccttgcgcttttcaaagatttcacggtcgtgatcacgaatcagataactcatctttgcctcttctgtgcgtgtctccatgcccaaaagatgataaaatccttggtagccttctgttgtttcgggcagttctgtatcaggaatcatggcattaaattcacacgccaatctgcttgcattcaacatcttgccttttgcataacctgtatgtacactcacacccttgatgtgaattttagcacttgcggcgttaaaattttcatattccaagtctcctaaatcgcccccatccatggtataagcccattcacaaccgaatttttcgacatcaaagtgatgagcacccataccaatttcctcatcaggattgaatgcaatgcgaatatcgccatgcttaatctcatcatggtcgcgcaaataacacatggcttgaactatttcagcaataccagccttgtcgtctgctcccaaaagagtatgaccgtctgtcactattaaatcctctccaatgtgtgccttcagttcaggaaacttagacggagaagagatgattccttcggaaagtacgatatccttaccatcataattctttactattcgagccttgatattagctccgcttgcatcaggactggtatcataatgcgaaatgaagccaatggtaggaatctccttcttcacgttagccttgagagttgcataaatataacccttctcatccatttctacgtcttcaagcccctcatgttccaactcttctttcagatatttggcaaatatcaactgctttgaggtactcggcacagtttgcgaatcttcagccgactgtgtatcaaatttcgtgtaattaataaatctttcaacgatgttcatatgcttttctttacaatttttagttatatgattgattgtctcacttttggagaattgttacacatagttataacgatgccaacgctgctccaacataccatgacaagcaaacacatttcatccgtcttgcacttctttcatgatatataagcaaagataaaaatattttctgaaaaatcaatattataactgatttttctttgaaaaagtaaacggctctttgtttcaagaagggttggttatgctgaacaaccatttttgtgctcttacttcaacaacaaatctatcaaattaaatctaatcgcattccttgcctcatacattggctgaaactcctgtcacaatggaatttcacaaagtttcacggcttgtctttatcgttccttgtgattccattgcaatgacgacacatctcacttccgtatcatcgcagctgcgggtcaggtctctacgttccttcaaagtgaatctgttgatttgattcatccgccagaacgcttgcgttcattgtattgtgcttttcgtttacattcatttgctttctgttgtttcatttgttgtagcaacacgaacgcttcaattagagaactgcgtcttttatcttatctttttaggtgaaacaatttgtagtatttgtcctatcattttaccaaaaatcgaccattgaaaatcttcaaaatagaaaaaaataataggcaaacgatatacaaaaatgggctgattttaccaaaaaagatgtcttttcaagcccgaacattgacttaacggtcttgaaaacatgtattagtgcctctatttacatgcaatagcagcattaaagcatgcaaatagtaagcttatctcaatgcttcaatcgaaaaaaatggaaaaactacgaatgaaaagagaaggattaaacataacaatctcaataacaaaaggttatgaacatcgctcaaaattggcgtatttgcgaccaactttgtcgttggttgttttcacgcgaattatgagaggcactttgtaaagaaaattcagcatttattatcctcctatgtagcgtaccatcaattttacatttgctgttttgttggtgtttttggttgttacaatatcattctaaaatgaatgagccgtctaaaaaaggaagatatacagacaacatttatggaatagcggggagatgcttaccgatgagaacaaatacggaatactgtcaaagtatacgcatttttaacataactttccataaggtaattcattgaaatagaaaccagtaacagcgctcacgactgccatgttgcttcatacattgattctacatcaatccacaactccatacaataacgcatacaagatgcagatgagcaaagcaaaaagtatgaaacaagacggatggaagaaacgcaaaaaatgagattttctttcaataaataccaacaagcaaaatcaacagtcgttacctgttattctctttgatttgctcgcaaacccatgcagagatattcgcggggttcgcctgttgtaacagcttttctgtttctgcatcaaacattattgttcgtctaatcatcttttgcccactgtgaagaggtatgttgtgctcagacaaaataccgtacaccctgttgatggaaacgcctgttgtagcgacaattcgggtaatgggtgttttcttacggtaaagttcaataacgttttcttctgtatttgtcatcattacttttttaatggcacccaccatgcgacaggtgccgttgtttcttttaattttaattcaacacgcttcatattttgattctacatcaaaccacaacttactttgaaggtggaacggctttgtttcagttgcttcatattttgattctacatcaaaccacaactattccgaagcgatatagtaacggatttttgttgcttcatattttgattctacatcaaaccacaactattagactgtatagttctaagtttctctagttgcttcatattttgattctacatcaaaccacaacactccgtccgcattaccacggtgtgttgcttcatattttgattctacatcaaaccacaactgtcagctgaaaactgttgatagttctcgcgttgcttcatattttgattctacatcaaaccacaaccgaaattcatgtaccttaatatctttggggttgcttcatattttgattctacatcaaaccacaactatgactttgatatagtagaagatgaagacgttgcttcatattttgattctacatcaaaccacaacctgtactatttaaaatattgaatataagcatattatacaaatattttcatacaagaagtggcttgaatatttcagcattattgcaaatatactaaaaaaattctaactgaataggtacttctggagctttttgtttaatttctccccacatattgataatctttgaatactgtttgtctgttactgttaaaatactaactttaccacttggtgttaagattgatttaacccttttgatatgaacgtttgcgctttcctgcgaaccgcaatatctaatatagatgctatattgatacatcgtaaatccatctttctctaattctttgcgaaaacgtgcagcctccttcttatctttctttgtaacagtgggtaaatcgaacattacaaacaaccacataacatgataagcatttagtcggttctcactcatttcaaaagaggcaaactgattttctttacttctttggcataatatttcacaagagaagccattgtcatggttagtcccacgcttaaaggacgagttacgtttataaaatatgtatcacaataaagtaattttatcaatattcctttcacttcagtggtaagtgtcgtttgtccattttgggtaagatgatacactatttcatcaacgaatgggcggtaaggctccatcatatcatctgctaaaggaaaagcgttactgcggttatgatgaaagatgcccaatgcgggaaatagtcctgctgacatgattgcgcgcgttactgccgcacgtaaaatggtataaccatagttgagcagcgcatttgtgccagactgagttctatctcttatgaaatcttttccaaatagttgtgtccaatatagtttagcggcagccccttctcggttggtactatccccactctttacattattataatatgggaacaaacattttccttctttacctaatttttcaagaagttgtgcttgattttttatcttacattctattatttgtttccaaagctgtttattgaaagactgacttgcagaaagttgatttcttaaagtttcaccttgtgtgttgttattatctaaattaaacaacatggatgttggcatgcctttttgattgcaaaatactaccgacacgttattttctgtcaatgcatttagaagtggtacacttattgagaccataggattgtcaaccattaagaaacctatatcttctataggaatggttcgtcgctcatcaggcaagtctttcatggtaataaccagttggttatacctcaatgaaagacttgctggatgagaaaagacaacgcttcgtttcaacatatcggcttactctttaagcgttactttaccaagaatgtcgatagtaaaatctataccatctactaatatgttgatattgtttatactctgtctgaaaataggagcataatcatcattatttttataaggagtgctaaaaatagtcaacccttctttacgagcttcttgatgatatttaaattttatacgtccatctttttcaatgccaaccaccttgtagagtcttttaactaaatctttggtattatccacttgtatttcgtcaggattttcttcaaacattaacaccagctgccccattaaaagttttgtcttaagtggcaatccatatttggcgctgtgagtaggcactatagacgagaatatatttcggtcttgacttcgtttataatatttagctgcctcgatatagcttactatttcaaattctctaaccactttatttttcaccaaaccctcataaatagccaacatgtaattattttcattcactacatgatattgctgtttatattcttttttggacaaatctcgatgttgtctgatattgatgggttgcttcaccgatttagcaaaacatcttaccttttttataagtatgcctttatcctcattcatatagattggttccgctatagcctgcttgaattttttgtccgctattgcttctttaatggttcgcttcacggtttcatcgacaatattttcaagctcttctggttttgtaaacgaactgagtggtcgccgaacaacatatcttatttctccatctcgctcaattgcgccataatatgtatcaagatgtaagctacctcttgccgtgtcaccttgagccaacacctttcctttagatgtctgcacatacttttttgtatgcttcggcatgttgttaggagtatcgtgtactaccaataagtttttatatatgttgagaacatcctctgtaaatgtagcccaaggttttgagaatttaggtttggaacctctgccttgcttaaatgtttcttccatgcgataatattcagccgtgagatcgtactctctctttccgatacatgcaatggtgatagcatccatacaatgatgagaatgattatctctacatttcttttcatactcactttgcagcccccacattttacgaaactctgctgttgccacaccttttaccacatagacattcgacttattgcgactgtctgcttgatggaataacgacttgagatacaaccccgcataacgagaaacaagtccgatgccagttccctgtctcctgctgaacccttcgggcacttcggtcatagtaaatcgttcatactttcctcgccaataatctatctccatttgtagcttatggcgtttttgtatccttatatctttcaccgctttatccattccagcaaatgtacgttgcttatcacgttcttttaccagctgttcatatttgtttttccatggttcaattcttgccaatatctcctcgtgattcgccaattctgtaggtagtttggctttctttatctctctgttaaaccgattgtcacacaatgtaaggttcatctgtgtgctgtctccaccaacactctgtggaatagtgtgctctatatcaaatttcggattactccctataaagtcggtgatacctatttgttcacctgtatataagcaatggcggttttgttcctcccaaagttgaaactttaacacatctgtttgagttggttcaatctcttttcccgtttcttctttgtataacttccttatttcatcaccatattttttgtgttgtttgtcttgctctttttgccaatctgcaattgctcttcgcttattggcatcattcaattctcgggcgtactcaacatgtacttccgtattttcgtcaataatactttctttcaataactgatttaccacccgtctcaagatatgtagagagcgcatagccataggatttcttatggcattggttcgtggcgagcccaattgcagtatgccaaattcgttgcgttgcgcattagggtaggtttctatcatagaaggatgatatagtttgtctgttgctcctgctggtaactcgaagttgtttgcaagaaaatctttgatcaacatttcaatagttccttgtacttcgcgatgtttaggttgataattgaaaaccagttcaccaacattctccatgatatactttctgttctgctcgttgttccatatctctttacctacaatggtaggaatgtttgcaaagaacgaagcatgcgtataatacattcccttgcgcaagaacggtaagaatttgcgtatagcttttaggcttaacgctgcaaaactgtgacttagttttatttttgcaaacttctctgcactctcctcatccaactgcaacttgtgatgagcaaactcttttagcttttcaaccgatgaaaaagaatacaacacattccaaacatcgtccaccatttcttgcaaactcttactcccattcttcttttgaataagtgtatatgtttcggctatacccgtcttccaatcgtcaccaaatatgcttttcaactgtgctatagtcggacatcctggcacgccctgtgtcattctataattaaacttgtaagctctttcttctttgtcatgtatccaagcgtagtttttcttgcctgccaatgccttggctatgtcttcaaagtcgaaattaggttttgatttacggaaaaacaaaggctcaattttctctcgctcctcgtaagttaagggacgtagttctaaatcgtgaggtccttttacttgaatgttgttgacaaaacaaagcattctaaattcttcataatcaggatgcgagtcggcacaacgcggtttacctctttcaaaggtacacctgcctacaccatgcctttgcgatttaagcggtagttgaaagaagatggctcgttgcaaatcttctattaactcactgcttagttcttgcttttcacaaatagcatcaaactcatgctggtaatgtttattacggtctgtgtacctttgtctgatgcgtaccttgttaccttgttcatcatagagtttataaaaataatctccaagatattcgcatcccgcttcttccatttctgtcgacagctgcgaaattcccgatttcaccactccgttttctttattatctgcactggtatccagtcgactactcaaaaagccacgccgttgcgttaaatgatataaagcacgacctaaggtatatctatcagcctcaactgttaaatctaatttttcgtgcagacatctatgtctatcataataaggatttttcccttcttcatcgcttgtgcgctgccacaacatcaactcatcgctcttaggatattgcttctgtaagtgccactgtcgtaaatcatcatcactcaaataaggacaaagatgatatttcaccagcaccttcaacacttgtatttttcgtaagcgacgtcgaaaatattgtttccgtatagccttataccccgaacgctcggcagccttagaagattctatccccttttcaatttttacaccttcttgaaagataacatcaccatatttaataagctcgtaattctgggcatgctcgtcccaatcaactactgcccaccctaaactgttggtgccagtatccaatcctaatatgcgtttgttcataataaataaatttatttctgtaaaattagaaaaaatatttgtcagtaacaaatattttgtttacatttgccacataagatattctacatcttatcacaataaggctatatgccgaaggatgcaagtcctacagcccctcttcggaggggcttattgttttatggtcttatacagcaatcgtttgacattttatctaactcgtaaaaagataaaataaccaatcaaataatttcagtataagacacatctattgcttctaaatcaatgattacgctttcgtactacccttttttattgtaaatttgcaagactaaccaaataaaccattaaatgatatgaagatgctgaaaacctgtctatctgtcttagcattcactttggcatggaatgttagcgcagccgacaaattagaacccgttgactatgtgagccctttggtaggaacattgtccaaacatgccttatccacaggaaatacttatcctgctattgcgcttccatggggaatgaatttctggatgccacaaacaggaaaaatgggagatggctgggcttacgtctatactgaggacaaattgcgtggcttcaagcaaacacatcagcccagtccttggattaacgactatggacagtttgccattatgcccatcacgggcaagcctgtttttaacgaagacgagcgtgccagttggttctctcataaggcagaggtggcaaaaccttattactatcgtgtctacttagccgatcatgacatcgttaccgagttcactcctaccgagcgagccgtgatgtttaggttcacatttcccgaaaacagtcattcgtatgtcgtggtagatgcgttggataaaggctcatcgatacaaattatccctactgaaaacaagattattggctacactacacgcaacagcggtggcgttcctgacaactttaagaattactttgtcatccaattcgacaagccttttacgtatcgtgcaacagtggtagacggcaaaattgataaaagcaagaccgctgcaacggtaaatcatgcaggggctatcattggttttaagacacagcgtggcgagaaagtgcatgcgcgcattgcttcctcgtttatcagtccgcagcaagccgaactaaatttgcaggagttaggcgcacgaagttttgaggaaatcaagcagcaaggtcgagagatatggaacaaggtgttgggacgtatcgaagtagaagataacaacatcgaccatcttcgcacgttctattcctgtttgtatcgctcagtgttgttcccaagaagtttctttgagaaagatgctacgggaaaaattgtacattacagtccgtataatgggcaggtgttgccaggctatatgttcaccgacacaggcttctgggacacgttccgttgcttgttccccttgctcaacctgatgtatccttccatgaatgtaaagatgcaagaaggtttggtgaacgcctatctcgaaagtggcttccttcccgagtgggcaagtccgggacatcgagactgtatggtgggcaacaattctgcctctgtggtagcagatgcttacctcaagggcttacgtggctacgatgcggaaacgctatggaaggctgttacgcacggagcgaatgccgttcatcctaccgttagctctacaggtcgattgggttttgatgagtataacaaaatgggatatgtgccctacgatgtggatatcgacgaaaatgtggctcgcacgttggagtatgcttatgacgactggtgcatctatcagtttggtaaagccttgggtaagtctaaaaaggagttggctccctatctcaagcatgccatgaactataagaatgtctttgatcgtgaaaccaatctcatgcgtggtcgcaacaaggacggcaagttccagtcgccattcagtccgctgaaatggggtgacgcctttaccgaaggcaacgcttggcattacacttggtcggtatttcacgacccgcaaggactcatcaacctcatgggagggaaacaaacctttaatcacatgctcgattctgtgttcaatgttccacctctcttcgacgatagttattacggaagtgttatccacgaaatacgtgaaatgcaaattatgaatatgggtaactacgctcatggcaaccaacccatacagcacatgatttatctgtacggctattcagggcaaccttggaaaacacagtattggatcagagaggtgatggacaaactctacaatgccaatcccgatggctattgtggtgatgaggacaacggacagacttcggcatggtatgtattctccgccatgggtttctatcctgtttgccctggtagcaaccaatatgtgataggtacgccctactttcgaaagatgaccttgcacttagagaacggaaagacgttgacgctccaagccaatcagtgcagcaccgcgaataagtatatccagtcgttgcgcatcaatggcgtgccttctacccgaaactacttcactcaccaagagctgatgcaaggcggtactattgtttatgacatggacaacgtgcctaacaagcatcgtggcatccaaggcgccgatgctccttattcgttcactacagcgctaaggcggtaacaggcgagcaggtatcagacacgaagtgggagggaaaccattggttccctcccactttatttcatgtcatgagtagttgcagggctactctcggcacgcatgccgagggttaccacccgcttccccagttcttttcatagttgccgtcctcttcgtcccacgagtccaagtcgtcgccctgccactgctttccataggcttcctttgtatcttcatccgtccttggaattcctaaactttccgctaaggggttagttgtttccattttgatgatttggacgcatggcgacaggtaggtgtgcctgtcgccagcagcgttgcttatatttttatctttagtgttcatctttatttcgtctttaatgttttcttacccttcatgatatacatgcccgctggcagactgtcgaagttggtgcctacatagcgcccgtccatggtgtatatgcgctgtgcaccttgctgtgcctcggcatcatttgccacattgctgatgcccgttgtttgattgtcttcatcaagtaacacaaactgcttggcatcatatacagaagttacaaccgtctttggcaaaataaccccacggaaaggtggtataaaattttctcgttttctccccttattagtcagcgctcttttccactgatcttccccagttgttctatcacgacccagcgtccaagggttgtttaccttatcaatatctgttatccaacgtgacaaacattcggtgctgccagtgaacacaaagcttttgtcaggttcaccttcaacatagcgcattggcctgatcctaccaataaaattatctttgtcgttgcctgacgcagcgattgtcacaggattgccggttgctttgaactcttcttgagagctgtggacctgaccatcggtgatgcgcagcaaataggctctgttcgcctcaagcgtgctgccgtcggggattgacttgaacatatataactcctggtctaaatatttttgaccaaaatcattccaaactttctttgttcccactgatttcagattgtatgcgcgtatgcctggcttcaatgtcacggcgtacggcaggaagatggtgaaacagtgcttgccatcagcaaaggaagaaatatcacggtcgtaaaccacttcacttgctttgatctcataggggaactcatattccaccccatccaccaagagaagtttggtgcattcaccattgctcttaacaaagtttacatcctgaccatccgcaatgctaatgtttggtacatcgggcaggtaaacgatgacgttcgctggcaaacctgctactaatgtcttcgctgatcctgtgcctgaattagcgtcgcgcgacaaattcgtcagatggttcttaacacccgggctattcacgttcctcaggtcaaggtattctaagggacatccttcgagaatacctgcacctaccttgcagttggcactgcctatcaatgtaaaaccggtcaaattaacatttcccttaaacgcaccgtcgccaatttcctcgacattgacacgaataacaaagtcgcctgacaaagctccattctcaaaagcccttgcacctatttttgttactgtagacaattcgttaaaacttttgatgccagcatttgcgaaagctctttcctctatggaagtcactgtagaaggaataacaaattgagctaagtctttaaaagcattctcaaacatccctttcgggatagttgttataccttctttcaaagttacaacgcccttattatattgagaaaaagcttctgctcccgactccatgtccacacctggcaggttggcatacatcgctataatttcagggtctgtgggttgtttcccaagctttgccgatacaggatcctctattgtcaacccagattttttgaatgcctgataacccaagtacttgatgtttggacatgacaacttcgcacctttggtcgaacattcctcaaaggcttgggggcctatggctgtttgaccgggtatagtaattgttccggtagattttgccctaggaccacctcctcttcttagggtaggtttagaataaataaaataataacccacaatgctcttataaaaagcttgccttccgatggtttccagtccttctgggaaattgatagcacatgcgtaagcttgatagaacgcagcctcttcaatgtgcttaatggttggaggaagaacaaaatctaattgaactttcttttcagaattattatcataaaaacctctttcattgatgaatgcacaggtaccgatggctaccaccttccactgcgtaccagcgtcatccttgactgtctcaggtatggttattgtaccattcagtgttccgctgtagcctttataagtattatcagcatttgtatcagcaccattatcaccattatttaaatagtcggccttaaatacctgctgccttgctttcggcagtgccgctttttcgtttgcgtatgtcactttcacgaaatggttcgtggcatctaccacctcataccataagtcacccgatttgaacctttcgcctacggtctgcgcggtgataggcagagccgttagcattagcagcacaagcgcaaaccatgcgctgcggtgctttgtcttgtttttgtaattttgtttcatgattcaaaatgatatttaattgttattttatcttgttagatgaatactcgtgtgggatgttttaatacctgcttttaataaaactccacattttgttgcaaagatatataaaattattggttgtaacaagtacaatgcgaactttttccatacatttaaagaaaatgtcatagtggcaacggattcacacggaataacacggttctttcactgaggggtgttaacaacgaatttaacaaattacacgaatcaactcagcaagacaatgaacgcaagcgttctgcgaatggaacaaaagaagttgtagaacaacgaatttaacaaattacacaaatcaactcagcaagacaatgaacgcaagcgttctgcgaatggaacaaatctgacgacatcaacttatcgcatatctgtactaaattcgtttcatttggtgaacgccggcgttcattgatttcagcaatcggatttgttttattggttcaattcgttgttaaaataaaagaaaatgattgttgttgaacagcgaatgaagcaaacgattttctacagttttgtcaaaataaattgccggaatttaacacttcagaagtgggtaaaatagctcgtgaacatgggtgaatttgcgtgttagaaagtcacaatttggttgttccatgtctttaaggcgactatctcaatgactttgcacgactaaagcatgctttcaagccccttgatcacatggagtaagggcgttattttgcgcttataagagtgggttacgaggcgattttcaccgttacgaaatcttatttttggcaaagtgttggctttcaacgaattgcaaacttgctcaaaactcgcgtattttcaaccgatgctctccttgctcgcaaatattcaaattttggaagtgctgttgtcctattttttcaaaacgcaattaacacttttaacaatcagttatctgtaaaaatcaaagcgcagcggagaggcacggatgtgcacggatattcgtggcaaggcgatggggaaatatcctcataatataggattttacatgtaatgacattattgtaaatttgcaaccaaacattatacaaacgattacgttgagtactcctgtccgttgttgttgggaaacaccctgttgctatgagcgagacaacgtgttggacacaacgcccttacgcttccgagccattattgtggagcatggggagagcagcactcacaccgcaaagaaaacaagataattaaaaagatgaatcagcgattgctcgataaatataacgtcccggtgcctcggtacaccagttatccccccgcaaactattttcacgaactgaccacagaccagtatctctctgccatagaagcctccaaccaccatgcgcaccagccgttggtgtccttttatctgcatattccgttttgtagacatttatgccattactgcggttgtaactcctaccccatggcgaaccaagacatgatgagaagatatgttgaagcattgcaccaagaaatagacctcattgccagtcatttagacacccaaaaccgccaaatctcgcagatacattatggcggtggaagtcctacggcattgcccattgcagacttaaagtcgctcaacgaacacttacgctcgttgatgcccaccatagcacatccagaaatcgccatagagtgtcatcccggttacttggcagaaggagattgggaggcattggcacaatgtggctttaacagatatagcttgggtattcaagattttgacgagcaggtgttgaaggcagtcaaccgccgtccgtcactccttgctgtggaagagattatgcacctactgcggcagcagggtgcaacggtgaatatggatttgctgtttggcttgccttatcaaacaccagactcgtttgctcgagccgctgaacaggcagctcatctacacccagacaggatagtgaccttcagttatggccacgtgccatgggtgcacaaacgccagctgatactcgaaaaattgggattgccacaagacgatgacaaacaagagatgtatcgacgggcagcagaagtgttacatacggcaggttatcgtagcattggcatggaccactttgtgttacctaccgacgaactgagtgtggcattggaaacaaaacagctgcatcgtaattttcaaggctattgtacacgccgcaccacagggcaggtgtatgcgtttggcgtgacagctatcagtcagctacaaacggcatacgcacaaaatgggcgtgacattgaagcgtatatccgctgcatagaagcaggaaagccttacacctatcgtggctacgagcttacaacacaagagcaaatggtgcgtgaggtgatagagcaaatgatgtgtaactaccatttctcttggtcggaaattgcggcgcgccttgggtgtacaccagcagaggtgaaggcagccaccaactatgatgagcagaaattgaaagagatggaggcggacggcttgatacagctcagcgaggacagcatcagtatgactcagacagggtcgccctttgtacgcaatgtggttgccaccctcgacccactcatggcgcacaccgataaaaagttttccaaacctatataaagatggattggtgagatttgaattttaggatcgctgacccacaagaaaaataactgtaaatgagcgcagcagcgcaatttagggcggttctataaattagctttgtcagattgcgaggctgtttttgtggtcaatttgtttgtaagtgaaggagtatagcgggctatacgactgaacgaacaagcaaattgaaccaaaaagagactgcaagatgacaaaaacgtaaactgactgatatactaaaactttacggcggtaatttatagaaccgccctataatgataaaaagaatggcagaaaataaagacaaggtctccgtagagagcaaacccacttatgagcatcagcctgcccaagaagccacacgacacgtcgatgtgtgtgtgataggtgcagggttaacaggactcaccaccgcttttctgttgaagcggaaaggcaaagaagtggtagtgatagagaaacaactccgaataggcggacagatacacacccaacaggtgggcgactttatcatggagagcggtcctaacacgggttcggtatcttttccagaggtggcagagctatttgaggcattaaaccaagagtgtagcatggagaccgcatgcgaatcgtcgaaaaggcgttggatatggaaaggagggcgttttcacgatttaccagcaggaccgataggagggttgcgcacaccattgtttacgtggtacgacaaattccgcatcttgggagagccttttcgtgccaaaggaaccaatcctgatgagaccgttggcgcattggcagcgcgcagattggggaagtcgtatctcgattatgcggtagatccctttgtatcgggcgtgtatgctggtaatccgatgacattggttacccgatttgcgttaccaaaattatacctattagaacaagaacacggtagttttattcgtggagccattgccaaagccaaagcgccgaaaacagaaagagaccgacgggcaacgaagaaagtgttttctgcacgtggcggtttgagtcatttggtcaacgccttgggcgatgctattggtgcagcgcatctcattactggtgctgacggggtggaaatcaatcctacggacggtgggtatgtggtgaagtacaccactggtttgggacaagcgcatactgtttactgtcatgaagtggttactacttgtggggcgtatgcgctgcccgctctgctgcctttcatccaacaatcgttgatgtccaagatatcgaatttgttttatgcgcccatcgtacaagtgggggtaggcatcaaagacacgcaaggggtatcgctaaacgcctttggtgggttggtaccgtcgtgcgagaagcaacaagtgttgggcatactgttcccctccagttgtttcgaaaatcgtgctcctctcggcggtgctactctctcgttcttcttgggaggggtgcgacatccagatttcttatcgaagacagacgaagaactgacagccatagtagaagatgccttgcaccgtatgttgaagttgcctgcgtctgtgcagccagatgccattcgtatcttcaggcacgagcgtgccattccgcagtacgtggcatcgagtggcgaacgctacgctgccattgaacaaatacagcagcaatatccgggcttgattttggcaggaaatatcagagacggcatcggtatggcgcatcgaatacgtcaggcttttgaggtggcaaggcagtaatccacgcacgaagcgcagcctcttctctcatattgtgttattaacaaaattattagagcaacggattaacacggttttttcattgaaaggaaatattgttaacaacaaatttaacaaatgaaacaaatcaactaagcaagacaatgaacgcaagcgttctacgaatgaaacaaatctgacgacagcaacatgtcgcatatctgtgctaaattcgtttaatttggtgaacgctggcgttcattgataccagcaattaaatttgtttttttcgtttaatttgttgttaaaacaaaaaacatgattgttgttgaacaacgaatttaaccaattaaacgaatccactcaacaagacaatgaacgcaagtgttctgcgaataaaacaaatctaccggcatcaacatgtcgcatatctgtgctaaattcgctttcatttgttgaacgccggcgttcattaattgcagcaattaaatttgtttttttcgtttaattcgttgttaaaataaaaaaaaatgattgttgttgaacaacattgcccataattgaaagagccgtgtccgctaaagaacttgtgccaattagcaatatgacggtagattttacgttatttcaacatgaagaagacagtgctttgtacaattctatttgttgcctcatgggttcagtgccttgcacagatagaccgtgtcgtccaaaatcgtccctacgcagatttacgcccactgcactttggcgtattattggggactcatgtacaagatgttgaattaaataatgtaggtattcaacatctcacacacgaagacgggagtgtgtcagaacgtctcattaccgttgaccaagatagatgggatgctggactcactgtgggagtactcgcagaaatgaggctcagtgagtactttcagtttcgcattgctcctgccatgtactttggaaatcgacacttaactttccgcgactatggcatgttggataaagaaggaaagccaacagagcagcgacaagacatgaaaaccgcttacatctccaccgctttggatgtcatcttcgctgcaccaagatttaataaccaccgaccttatttagtaacaggggtgaaccctatgattaacctcaatgggaaaaacgatcagtttgtagccttgaagcgttacgatgtatttgcagaggtaggcgtggggtgtgatttttatctacagtactttaagttaagacctgaactgaaatttatgtttggactcaccaacagttatgataagaatcatgtcaaaggtattaaagacaagaacatgataccttacaccaacgctaccaatgaagcacgctccaagatgatagtcttgacgttctattttgaataaagatgaacacaccaacaaatagggtgagttttataaattaatctcttcatgcccttaaacgtatgctacaatggtaatttataaaactcacccaaagtgaaagttctttaggctggttctataaattaccaccgcacatagtcatcaaatgtttatgaaatacgttttgttatcttttggcttctttttggttcaaaatgtaagctcgttcagtcgtgtagctcgctacactccttcactctcttgcattttgatcgcaaaaataagctcaaaatctaacaaagctaatttatagagccagcctttatttctatgccaaatgttctgtcatttcttcttgaattgcaatagcaactttcctacataaatagcatgtttcccattttgatcaacaggaatctcttttccatctaaattcttaacatatcttagagactggaaatatgtatgagagtgtccacctaacagcagatctatgcctcgggtatgtgcaattatacgttgttcgctcatcccctttttcaaccaacccatgtgcgataaacaaatcactaaatcacacttatatttatcttttaagagagaagccatttgttgccctactttgatagggtctaaatacttcactccctcacatttctgcaaatctacgagacctttcatttcgggtgaaagaccaaacacacctatcttaatccctttgcgcttcagtataatatatggttttaccaaaccttcacaaacagtccccgtaaagtcataattgctgcacactataggataattaaattgcttgataagacgagccagattgtccattccaaaatcaaactcgtgattgccaagtacacctgcatcatacctcatttcattcatcaactttacctcgacctctccttgatataaggtataataaggcgacccctgactgaaatcgccactatcgaaaagtaacagttgggggtctttcttcctttcctctttcagcatctttattcttcgaataaatccccctcgccctgcaagcatggtatctgctaagttcgggtttaacggatatatacaactgtgggtgtcgtttgtgtggagaatggtaagactcttattttgagccacaagtgttgtccctaaacataagagcacactaactaatatataacgataattcttcatttctaactttggtaattctgattaaacttactcaacaacaattcttccttcaatagcagcatcaacctcaagcccctgtgcgttggcttgttgaaaatagtccataataataaatcgcacattgttttgcttatcttgaggcgacaacacctgcgttttcttcttaaaggcaacaagtttgtcattcccctgcgccaagtaatcaagggttgctatacggtacaaacgctgtggctcaatgggctttccgtgaaccaaagccgacttcaactgtccgtctttcgtaattcttagttctactccatgactcacaccttcgccaccaaccgaggctatttgcttaaaaagctcaagcacttgttcacctgttagtgttaagaagcaaagtttgttttcaaagggtgccacatcgaccacatcacccttcgtcacatcccctttcaccaacgctgcacggatacctcccatattataaacagcgaaatcgggtgtctcatgaaatgctcttccaccccaaatcaagatgtccgccaacagattagaaagcgtactttcaggtcggctcacagacatgtcatgcttaactcgcccaacaacaggactcatcaaactatctacctcgtgtttgtagggtcgcatcatggcgtctactttctcattacgaatgccatcataccgatgatctacgagtattcgagttcgctgaacgttcgttaactgatagtgcgatgcacacgatgttgccatcaacgatatgaaagcaagctcaaacagcaattttgtttttctcatttcaattcttatttaccaatatttataccctacaaatgtataagactcattactcttagtcgtttttttatctcaccactactgagtagttaccaagcacatcgctacatctgaggctgaaaacgatttaatgataatgcaaagatagattattttgtaagatttcaaaaatagtttgaagacaatattctctatgtaaaagcgatttcttctcatcaaggtaattttataggttcctctttacaccgttcttaagtctaagggtaattgtattacaacaattccgttgcaatcgtcatcacagatgatgaatgaagcttggagactttgtcctctttacgaaaccgcaatagtaatgtatttaaggctggttctataaattaccaccgcatatagtcattaaaattttatgaaatacgttttgttatcttttggcttctttttggttcaaaatgtaagattgttcagtcgtgtagctcgctacactccttcacgctcttgcatcttgacctcaaaaataagctcaaaatctaacaaagctaatttatagaaccagccttaactacgctgtgtgcgtttgaaaaaacgcgtcactgcgacagatttgctgttgtaacaaaagaaaaaaggataaacttatattatttcaaaaaattgttgtaactttgcaccgcttttcggcataacctctggaagtagaagagttgctgttcatgttgtgttggaacgacaaacaatatttaatgaccaaattaaaaatggatttaattaaagttgctgaagaagcatttgcaaccgacaaaaagttccctgaattcaaagcaggtgatactattactgtcgcttacaaaatcgtcgagggtaccaaagagcgtatccagctgtatcgcggtgtcgtaataaagatttctggacacggtgataagaagcgttttactgtacgcaaaatgtctggaacagtgggtgtagagcgtattttccctattgagtcgcccaacattgactcgatagaagtgaacaagcgtggtaaagtacgtcgcgctaagttgtactacttacgtggtcttactggtaagaaagcacgtatccaagaaagaagaactgtctccaacaaataagattcaggtcaaaagtatttttaagataaaagaggtcgcaatagttgttgcgaccttttttatttcacttcgtcatcatcgtcgtagttgaggtctgccctattctcaccatgcaaagcggcttttaaatctttccaattttgaaagcctgcaaggagagccaatttatccaaagtagctacagacagtttctcttttctttgaagacaatcccatagtttctgtacgccgcttaaatttgcacacaaaccatgtttcgccaatacatgaacgattttctcatcttctgtcaacagattacctgctgtttctccgacctttgcctccatttcttctaacagacgctttatatcttgcaacattttgtgaatcaattaattcataacaaccatgtatataaacctcatccataagttcattggaagacaggaacttgaactttctacctttctcgtctatcgaacaatgagcaagcaaaattactaaaaagattgaacatacaaccctttcttaaggaaaaacaatgaacgtcgtttcttttcaatataacgaatgtgaatcttacaatgctctcttgatgtcgtcatcccgcaatggatgcgctcaaaacgataagaataaatctcgaaccgaaagtcactgaaactttttaagaaagctaaaaatcagcaagtaacgtaacagaacagtttatttttttatatctttgtaaaccattagaacattttccgatatgaaagaattagcattaaagtacggttgcaatcccaatcagaagccttcacgcatttatatggaagaaggggaattaccaatagaagtattaaatggtcgtccaggctatatcaacttccttgacgcactcaatagttggcaattagtaaaagagctgaaggctgcgacaagtcttcctgctgctgcctcttttaaacatgtctcaccagctggagctgccattggactaccactaagcgacaccttaaaaaagatttattttgtcgacgatgtagactttgaactttcaccccttgcctgtgcttatgcaagagcccgaggagccgatcgcatgtgttcgtatggcgattttgttgcattgagtgacacctgcgatgcagcaacggcattgctcatcaaacgtgaagtgagcgatggcgtcattgcacctgattttacacctgaagcattggagattttgagagaaaagcgcaaaggaacttacaatgttattaagatagacccaaactatcagccgaatcctattgaacacaaacaggtttttggcattacctttgaacaagggcgcaatgaagttaaacttaatgacaatcgattatttgagaacatccccacagaacagcaatctttgccagaaaatgccaagcgagatcttatcatagcacttatcactctcaaatatacccagagcaacagcgtttgttatgttaaagatggacaggcaattggaataggagctgggcaacagagtagaattcattgcacccgcttggcaggcgacaaagcagacacgtggtggctccgccaatgtcccaaggtcatgaacttgccattcaaggagcatatccgtcgtgcagatagagacaacgccattgacttatacattggcaacgaggcggatgacctgttgaaagacggtgcttgggaacctatctttacgaaaaagccagaacccttaacccaagaagaaaagaaagaatggctttgccagaacacacaagtggcattagggagtgatgcattcttcccctttggagataatattgaacgcgctcacaaaagtggtgtgcaatatatagcacaagctggaggttctgtgagagacgatcatgtcattgagacttgcaacaaatacggcatcacaatggcatttacaggggtgagattattccaccattaattcatcaaacacagtggcataaacatctttgtatgaaggacatctaacaagaaaacgactgccactgtcatcaatttacatgcgtatggacgattttgacgacatattagaaaacgggatagtctttcgcaagcctcctaaagagaaaaaagaggacggaaagattaaaaccaaagccaagaaaaagaagtatattacaggagcacatggcagtggctctgctcgccaaaaagcgaaataccgcacacagcgagccaatagacataaagggaaagcgtgatataaggatatcgcacttacttcgtagcgttagtcttgttacgcttcgaagtaatttttcctgatttagtcaaggtcaaggttacatcttgtaaacttcgctttgcatggttgaacagtatatttggattgtaacgccgccctctgtattttacttcaaaatgcaaatgtgcggttgttgcacgtcctgttcgccccgtcaatccaatcacctcaccagctttcactttttgacccacctttacaaagtttttagattgatgactgtaaagggtttcaaagccatatttatgttttattttgatgcagtttccatacccataatgtggccctgacaacgttacaactccatcaaaggctgccactatcttatcattcggcttggtcttcaaatctactccgccatgtcctcgtctgcctccgtaaggacttatcacctttgcaccaggaagaggataagcccattgacctgttttcctcacttcagacaagttcaattgaaaagaattactgtttttaaaaggattttctgggtcaactcctgcacgctgttgctcctccgtcaccactttcacatcaatgtgatgccccactttcttaaactgaagcaattgtgaatataattgatgactcgcaggactgagaataatcgttggattgatgcgagcaccattcaccatgattgaaaagcgcaaaaacgagcgtcctgcacgctctccaacaatcgcaatggtctgtcctgcacgcacatgttcacccactttcaccaaattctgcacttgatgactataaacggtttccaatccattcttatgtcgaatcaccaacacgggtatttgagctgcatttcgcttggacaagcgcacagtaccttcaaacatcgccttcaccgcatctcccttcgtcgttctgatttccagttcttgttgtggcaaaaggatactctttcccacaggaagtggaaaacaataatctgttgaggacaactttttgaaatcaatataaaattgatcagatttgtcaaagagatgaggtgttgcaatacttacctgctgtcgttctgcaggagtgaactgttctgtatcgggagcaaaagccgacaagctcatgaccgaagctacactcaatattaattttcgtaaaggaaatttcatttcattaccgctttggagagacatagacagatgttatcgtatttcggaatcaactttctatattctcattcatttaacagaataccattataaatccgtccagacgccactcccagccgtcttgcagaaaaatattggtctatctggtcgtacgtacaaatgcctgtctgtaaaatatggtgcgcctttaccccctcctctatgagttgcagacgattgcattcaggcaaatcaaggtgccacttcgtcttcttcacactgatagacgaaaggggaaaacctgcttttgcaaatctttcaaacacttcgtcaccaacctcaaaattctttaaggatattccgggtcctatacaagcatacacatcatctgtcgaggtatcataaacctgccgcatcatggatagagtgtgctgcacaattcgctgcacggtgcctcgccaaccagcatgaatggcagcaatagcacgatgcttcgtatcatataaaagcacaggaatgcaatcggcagtagacacaccaatacaaacttgtggtacagaagtgatgagcgcatccacaccttctaacaataagtgctgcgtagatggtgacaaagaaaagaaatctttttcgataacccgtgtctcaacaccgtgaacttgatgtggcaacaaaagacggtcggcacttaactggagttcggcacaaagagctgttcgattagactgtatggctttcggttcatctccacaataaggattgatgttaaacgaactataacaacccttactgacgcctccgctccgtgtggtagaaaaaacttttacttgcttatgtaatgggaaataagtgagcagaggtgtgggcaaatctttttgttgcgcatcagacatcttcgtactcataatcctccaagtcttcgatgtcttgattgtcattgtcgtctattggagttatttcctccacctcaccctcggcaataagttccgaagccattttatccatctctttgtcccgatgaatcaaattgtcttctgcaataatcccctgcagtttattactctcgctattaagttctttccacaaaacatctttcagttcatccaatccctgacctgttacagcagaaataaacacaacgggcaaatcagtaggaagagtgtcgtgcagcatttctatcagttcttgatctaacaagtcacattttgtcactgctaagacacggtgtttgtccatcatatcagggttgaaggtacgcagctcattgagtaatatttcatactccttcttaatatcatcagtatcacctggtaccataaacagtaacaaggagttgcgctcaatatgtctcaagaaacgcaagcctaaccccttcccctcactcgcaccttcaatgatgcctggaatatctgccatgacaaacgaatgatgatcacgatattccacaatgcccaaagatggttcaagggtagtaaacggataattggctatcttaggccgtgcactcgacaaagaggaaaccaaggtagacttacctgcattaggaaaaccaaccaatcccacatctgccaacaatttaagttctaagatgaccgtcatctcttgcatgggctcgccgggctgtgcatagcgtggagcctgattggtggctgtcctaaactggaaatttccaagtcctcctcgcccacctttcaacaataagacctcctgtccatgctcggtcacatcgcaaataaacttgccattttcagcattatacaccacagtaccacagggaacatcaatatatatatcctttccatcagtaccatgacacttgtctttacctccatttccaccatgttcggcaaagatatgtcggtcgtaccgcagatgtagaagcgtccagtaattgtggttcccccgaagatagatgcttcctcccttacctccgtcaccaccatcgggtccgccattgtagttatatttaacatgacgaaggtgcatagaccctcgaccgccttttcccgaacgacaataaatctttacgtaatcaacaaaattagactccatgaaaacatgatttaggtaagataaaaaaacatgaaatatgactatccttcaaattcctcagttctttgaacttgaatgatagtcatattaaaagtcaattataaagcttcaacgacagcaaaaatatctgctgtgattctatccaactcgcccaagccgtcaatgtggtgatgtatcgcttcttgcttgtaccactctatgagcggagctgtttgtgcatgataaacacctaaacgttttttaatagtttcttcattatcatcactgcgaccactctgctgcccacgcaacaacaatcgcttcatcaattcatcttctggcacatccaattctatcatagcagctacatgatgaccacgttttgccaacatttctttcaatgcctcagcttgtggaattgttcgtggaaatccatcgaagataactcccttatgatttttaccaaaactatcataaacactggcaaggatatcaatcatcaactcatcaggaatcagctgccctttgtcaataaattccttggctgtctttcccaagtccgtaccattcttgatttcgctacgcaacacatctcccgtagaaatatgttccaaaccaaatttttcaatgagcttatcgctctgtgtgccctttcctgaaccaggagcaccaaagattactatatttttcattcttctactattgtataaatatctcgtaaatttcttcctaattggtcatagtccaaaccataccccacaataaaatcattaggtatctccatagctacatacttaatattaagtggtgctttgagtttacctggcttcaacaacaaagtacaaatgtccaacgaggcaggactacgtgtacccaatttttctatcatacgcttcattgtagcaccagtgtctacaatatcctccacaataataactgcacgatttgtaatatcttcattaagacctatcacctctttgatttcacccgtagaagcaataccttggtaagaagccaacttcacaaaagaaatctcacatggtatggtgatataacgcatcaaatcggctgcaaagatgaaagaaccatttaacaccgccaacaaaagcggattttttccttcaaaatcgtggttaatttggttggcaacctcctttacacggcgtaacaagtcggcctcaggaatgaacgtcttaaacgtcttatctttaatcgtaacttcactcatgaatggtatgatttatatttagaaagcacaaagttactaaaaatatcatgaagttgcgaagctcataggcattaattagtataatttaaaatctatctatcatctacaaaatattgatttccataaccttttgacacattcaaaatcttttgtcaaacagcaagcatagagagattgaatccttctatatctaccttttcttcggtaagaatagccatcaacatttttaacccatagagttacctgcatagaataatggaggaaagggcttacctttttgcaataatgttattaagccaataggatagagaaacagagagccttcatcttgtttaaccttctattggaaacggtgtaaaggcagtgctgggtttccctatatgaggatttccataacaagaaaaatgataaagggtattttttgtagaaattaactaaaaataggaaataccaagtacacctatttatattaattttgtatttttgcagtaatgaagatactaacaagtgctcaaattcaagagcttgacgattataccattgcacacgagtccattaaaagcattgatttgatggaacgtgcagcacaggcattgagccgtgccatcatgaatagctggacgacaacatcacccatggtagtctttgctggtcctggaaacaatgggggtgacgcattggctgtagctcggatattggcagagaacggatattccattgatgtgtatttgtttaatattagcaacaaactatcagagaattgtgctatcaacagggatcgattgaaaaatcacccaaagattacccatttcacggaggttacgctcaattttgaacctcctactttggaagctaacaccgttgttattgacggattgtttggagcaggacttaacaaaccactcacaggaggctttgcttcactggtaaaatatatcaaccaatcgccttgcaaggtggtaagcattgacatgccttcaggactcttaccagaaaacaatgcttttaatgttcgaacaaatatcgtgaaggcggatgtaacgctcacgcttcagcataaaaagttgtccatgatgatggcggacatgcaaccctatattgggcaagtaaaagtgttagacattcaactttcggaagcttttacccagcaaatagatgccaaatacaacattgtggaagaacatgaagtggttgagaagttgctaacacgttctgaatttgtacacaaaggcgacatgggccatgcactattagtggctggcagctacggtatggctggtgctgcaacactcgccactcaagcttgtatgcgagtaggcgtgggaaaagtgaccactcacattcctaaacatcttcttaatattctccaaatatcagttccagaagccattgtgagtgtggatcctgaaaaagaatacttcaccgaacctgtagacacagacccttttgatgccttaggtataggttctggattgggacaacacgagaactccgccattgccatgattgcacaagtaaggcgtgcacagtgtcccattgttgttgatgccgacgctctgaacatgttaggtacgcatcgagcatggatgcagcaattgcccaagaacattattcttactcctcatcccaaagagtttgaccgactggttggaaatacaagtgctgacagttacgaaagactcgcaaaagcctgcgaattggcagaacggttgcacggcttcgtgctactgaaagggcattataccgcactgtgccaacctaacggaaaagtgttctttaactcaacaggcaatgggggcatggcaactgctggctgtggagatgtcttaacgggcatcatcacaggactattggcacgcggataccgtcatgcagacgcatgtatcgtaggtatgtatcttcacggattagcgggcgatttggcagcacaagaaatgggaaaagagagtatgattgctggcgatatcattcgctggttaccacaggcattcaagaaattacaggcattgcattgaggtttgacacacatccctcatgaaacacgatttgaaatatgaaaaaaacatttttatccaccctatttttagcattgaatatcactgcgctttgggcacaaattcctacagaaggcgtaacctacttcctacccaaaacagctttgcgcttttccgttctggtagagaaaactacatttacacccggaaagtacgcacgcttttcagaaagatacctcaaaacacctgtgaaagatacgcccaccacaacctacagaattgttagtactaaaatgaatacctatgccgtacccgactcttctaagcagtttactgcaacgattgataagaagcatagcatcatcagcgtgagcagagaccaaaatggagtcatcatggcggtgaacagtgagccaatgcctgtggagaaagtcacatcttttcagtcagcacccaaaccagtagctattgacccagctaaatacatgaccgctgaaatattggctgctggcagcaatgccaagacagcagaactcattgcacaggagatatacgatatcagagacagcaaaaatcaactctcaagaggcgaggcagacttcatgcccaaagatggcgaacaactaagaatcatgctggacaacctcaatacgcaagaaaaagccatgttacagtttttccaaggcaccacaattaccgacactctcgaaactattgtggactatgtccctgtcaaaggaaccgaacacgacttgctgttccgcttttctaagtacttgggaatggtggacaaagacgacttgggaggtacaccttattatataagtatcaaagatgaagaaatcatccccatactttcgctgcccgatgagaatgcaaaaaaagacaagaacaatgtgggtatcaatgtgaacttgccaggaaaaattaatatcacactgtcgaaagaggaacaacccatggcatctttcgacacctacgctgcacaattcggtcgcatagagaacattagcggaagactatgggggaagaaattcaccacacatttggttctaaacccagtaacagggaatgtagaaaatatcaaaatagaagccttagactaaatcaagagtgaaagacgagttaaacattaaaaaatgttgtatcacttgggtataacaaattaaaatgttaactttgcaataactatcaaaggtattagtaaaccaactttataaaaataaaaaaatatggtagattacaaatcattaggcctcgtaaacacacgtgagatgtttaagagagccatcaatggcggttacgctattccagctttcaactttaataacatggaacagttgcaagccattatcaaggctacttctgaccaaaaatctcctgttatcttacaggtatctaagggtgcacgtcaatatgccaaccaaacattgcttcgctatatggcacaaggtgctgtagagtacgctaaagaattgggttgcaagcatcctgaaatcgcacttcacttggatcacggagattcattcgagacctgcaagagctgcgttgactatggtttctcttctgtgatgattgatggttcatcacttccttacgaggagaacattgcattgaccaagaaagtcgtagaatacgctcatcagtttgatgtcaccgtagaaggcgaacttggcgttttggcaggtgtagaagatgacgtagtagcagaagaatctcattacaccaagccagaagaggttatcgactttgttagtcgtacaggcgttgactcgctggctatctctataggtacctcacacggtgcatacaagtttaagccagagcagtgtacacgtgacccgaagacaggcttgttggtaccacctccattggctttcgacgtattggacgaaattatggagaaacttcctggattcccaatcgtacttcacggttcttcttctgtaccacaggagtatgtgaagattatcaacgaaaatggcggaaaactgcctgatgccgttggtatcccagaggagcagttgcgcaaagctgcgaagagtgccgtttgcaagattaacattgactcagactctcgtcttgctttcaccgctgccgtacgtaaggtacttaacgaaaagccaggagaatttgatccacgcaaatactgtggaccagctcgcgacttgatgacagagctttacacacacaagattgtgaatgttttaggctctaataacaagttagctcaactcgactaattgtcattagagatgaaaggatgaccttccattgtgagcattgtcgagcatggaatcgtcttttcattaagtagtacgatagcacttacctctattgagttaactacatcgtacagcattagataaaagcgggatcaactttgtttgatacccgctttcttttcaaatccatgtaagcactctactataaatgaggaaatatattaccatgatacgaatgatgatttgatagtattctaaatatggtacgtcttatttttctatccgattttacagaagcctacgcccaccatttactgcaaggaattctaacctatgccaaacaaaaagaccaagaagcatgggtcgtttgtcgtatgcccccctcgtataaagaaacctatggcatcaaaggcgttgttgaatgggcaaagaaatgggaagcaaatgctattatcggacgattcaaccatgatgacgatatcgatttgttccgcagaaatggaatcattgcaatagcacaagactttaagcgaagatttaataacattccaaatatcaccagcaattatcacgatacaggaagattggctgccctgttttttatagaaaaaggctacaagcattttgcattttatggttacaaagatacagtatggtctgacgaacgatgtgaaggattctacgaaggcataaaagaagctgggtacagcaaaaacttttatacgtataccaaccaacaattggaaacgctttggtattacgacaccaccccattattaaactggttaaaccaactcccacaacaaacagctgtcttttgctgtgatgacaaccagggaaataaaatcactgaaatttgtaaaagtaacagaatccaaatcccagaacatcttgccgtattaggagtagacaatgatacgaccctttgcgaactgtccgatcctcccctctcaagtattcatttagatattgaagctggtggttatgaaactgcagaactcatcatgaatctcatgaagcaaaaggattttcagccacaggatgtaatcatcaaggctatctccatcatcaatagagcatcaaccaacagctttgcaaccaatgacatgtacatcaatgaagcgttggaatttatacacagcaacttagataaagccctgaatgtgacagacttggttaaaaagctgccgctatcaaggagattgctcgagatgagatttaaaaaggtaacaggaagatcggtatataattatatcatctataacagaatagaagagtttgcacgaaaaattcatgaaacagataaatccatcaatgaaatcgccacagagatggagttttacaactacagtaacttggtacaacaatttaagcaaatcaaaggttgtacacctactgaatttcgcaaaagaaacaaagcatacgacttgtaacaagttacatttaattgcatagacactcatgacggtctattatttgcacaactattgcacaacgaacaacacaaaaaagacaaaaacatagtttgttcagagatgtaggattgttgtaccttcagtaaattcatacgccacacttttgtcctattattttaccaaaaatcgaccattgaaaatcttcaaaatagaaaattttaataggcaaatcatgaacaaaagtacgctgatttgaacaaaaaaaacgctttttcaagttagaatattgacttaacgctcttggaaacactctttaagggtgttattcacatgcttcagcaacattaaagcatgcaaattgcaggcttatctcaatgggttaatcgcaaaaaaatggtaaagataggaaagaaaagagttgtttaaggcgtaacatcttcaatgccaataaattacaaacatcgctcatttctcgcatatttgcgaccaactttgagcttggtgatttacacgcgagttatgagaggcactttgtaaagaaaattcagcatctattatccttctttacagcgtgccaccgatgttacatatactgccttttggaggcttttcattgtaaaaatatcattcttcaatgaaagagccatgtgttatttgacgtatttgcgcattttcaatattaaaatacgcaaatacgtatctatgttcaataaaaaagtattaaatttgtaacattgaaccaaaggtcttaaaatctaataataagttttcaataataaaagagaaatacaagcaactcatttattacgaatagattacaaaactatgaaaagaacaagaaccgtatctatttttacccacatatgctaaaaatataagctacgctaattatctttgcattgcaaaaagagaaatctaaatcaattatactatcactattaatttcaactgcatgaagaagtttattttttcagtaggcaacaaaaacaagctgttcaaagtcaccgctttaacggcattgacactgtgtttgcctgcaatggcatctgcatataatgcaaatgcaaacaaggtagagatgagtcagcagaaagctgaccacattacaggtaccgtaactgatactaatggagaaccagttattggtgctaccattaaaattgtaggtagtagcaacggtactgtcacagacgtaaatggtaaatttacactcagcgttgcaaaaaatgctgaactgcaaatctcatctattgggtatgttactaaaaaaataacagtagttagcaataacttaaatgttgttttggcagaggatcgtgcttcccttgatgaggtggttgtattaggctatggtgctggtcaacgcaaacaagacctttctgcctctgtaggtgtgattaataatgcggataaactatccgttcgtccagtcagctctacggagggtatgctgcaaggtcagttggcaggtgttactattacagccaatggaggtgaccctacttctgcaccaaacattgtcattcgcggacaaggctccatgaatggcgacaatgtactgtgggttgtagatggcatccctggcgctcctattccttctatgaatgatatagaatcaattgtcgtactgaaagatgctgcatcggcagccatttatggtgcacaatcgggagctggaggctgtgtgttggtaacaactaagaaagccaaagaaggaaaagtgagcttgagctatgacggtttatatggtttcagacaagctaccaacctgcccaaagcactcactgcagaagagcaaatcaagctggctaatatctcgtataaggcagcaggactggatactcctattggctgggatacaaaagtgaatccatatatcgccaccaatcgtacagactggatggacgaagtatttagaaatgctttctaccaaagacacaacgtggttatcaacacaggtacctcctcggcaagaagccggttgagttatgcctatgacggcgatgacggtgtattgattggcacatttaacaagagacacaccatacattataacggtcagttcgacattaacaaatggataaccattactgaggatttcacttggcgcaactcgcaaatgcgcggagccaatactgcaaatccagaaggtggtgtcattatgaacgcattacacatgccttcgagtgccagtgtttacaatccagacggaacctatggcggcgtttcagagcctggtaacggttacaccgacatccatggtgatgctatcaaccctgtgcgcatactatgtgccagcaatgcttataacaaaacgagtgatatgtggtcaaccacctcactacaactccatgacattgttccaggattgaagtttaccagcagattttctttcaacattgaaaacaacttctataaggagttcaaccctatgcgtcctgagtctggtaagccacaactatttaacgagatgaacgaatcggcttacagatataaaaaatggatgacagaaaatacgctgacttacgataatgcctttgggaaacacaacctggggcttttgttatctacaacagccaacaagttggtacaacgaggtgttagtgtgtatgcacgtggtttctcggacgaaactcctgctctacaatatttggcatacgctggaactaccacaccaaaagactatctcattggtcctgatgcaaacgtagcttgcattgcacgtgcttcttactcatacgacgatcgttatttcctaacagcatcatggcgtagagactacgcaggtcgtctgcctaaggataataactatggcgacttccctgcttttacaggtgcatggaaaatctcaaatgaaagctggttccctaaaaataaaaatctaaacttactgaaacttcgtgcttcctggggacgcgttggtaatcttggctccattggctatggttacaaagctgcacaactgtcatcatcggtatggtcagaaggtgcacagtacggcgttacaagtaacaccttatggggaaccctcatatataatggtacagcattaaatccatcgttgacttgggaaacatccgagcagtgggatttaggtttggatgcaactatgttcaacaacagactgtctttaggatttgactatttcaacaagcgcacctacaatcttatacaacaacaatctgtaggttggccatcgacaattggacttgatgccatgcttgttaacttaggagaagttaagaacgaaggtgtggaagtgcaagccgcatggaacgatcaggtgaacaaagacttctcttattatatcaatggtaactttgcgtggctgaaaaaccgtgttaccgacactggtactcatgatgagaatggtaatccaggcatctgggttggtgacgtttacggacataatgacttcaagaccctgacgaatcttttccagacaacgcaaggacaagctcttaactcgttccacctcattaagacagacggtattttccaaagtgatgaagaagctgcagcatacgttgacaaagatggaaaacggattcaacccaatgctaaggctggtgatttgaagtttgttgatgcgaacaacgatggaaagattgacgacaaagaccggcaatattgtggtagttctatgccaaagacgacctatgcgctcacagcaggatttaattggaaagggctatctgtaagtgctatgttccaaggtgtgtctggcgctcaggcgctctttgtaggaaagggcctcacgctgagcgacacagagggtaacttcaaccgctggaacaagatattggatgcgtggtctcctgaaaacagaggaagcgacattccacgtatttcgaagaacgatcctaacggtaacttcacaacttcttcggattggtacttggaagatgcatcctacttgcgcttaaagaacctaaccataggatacgactttacagactttatccagaaatggggacacctgaacaatcgtaaaagctcgctctacgtatatttcagcgcagagaatgttttcaccatcaccaagtattcgggcatggacccagaggtgggtggctttgacacgatgaaatatcctctgtcaagagtattttcattaggtgtaaagattacttattaaaaccaaacagttaagaatttatcattatgaaaaaatatatttcaattatcactgttgtagctgctgtgacttttacatcgtgcagcgactttcttgacgtacagccagagggaaagccaacaactgaaaactattttgccaatgaccaacaagccattgatgccattgacatgttgtacggaaggttgcaccaagagaatgtttttggccgtgaattcttctgggaacaaggcggcggtcaggatgttgtatggggacgcacgcgaggctatggcacgttagcaaccttgaaatacagcggtgacgaaagtccattaagagacactttcgagcaattttataaccaaatggcaagagccaactgggtcattgtaaagttactgaacaaggaaaaacaaaccaaattgactccagtagagagccgctcgttaggtgaagctttgtttgtacgtggaatgtgccacttctatatcgcataccgctatggtactgataaacagggtgtgccatttgtacgctacgaagattttgaaaatggctatgacaacagcattccaaagcaaagtgcaacggtcatggacgattacaagatgattattgaagacatggacaaagccatacaatatcttcctacggttgatcaatacgatgacaataataagggtcgtgcacaccaagctgcttgtgtagcttacaaggcaaagacttacgcatattgggcttgttgggacaagtcacagtggaaacatgttgttgcttgtgttgatgaactggaaaacaaatatggacgcggtcttgcttctacctatgatgaggtatttacctcagacatgagcaaattctatgggaaagaatatctatggggtgtgcctggctatggcggtcaaacacctggtggaattgaattcacaggcgttgttttggaaaacaaaggatggggtgtctataacggatggggacaaaacaagccctcatacgagatctacgaagagctgatgaaagacggcaaagacaacgtacgcttgaaacgtactctgttagagtacaatcaagagttcaaattctttggaaaaaccagaaaattcttttctgcatctgacgtagaatcgggcttcatgtgcaacaagtatatgcaagcattcgaaccaaaagactgtgtagagaaaggaatggttagtggcaacggtaactggcccactactcgcatcatgttcccgttaattcgtatggcagaaatgtatctgttccgtgcagaagccaacatcatgattggcaacgcagctgctgccgccaaagatattaataaggtgcgaaatcgctcaaacctcgcttcactcgaccacaatcctacaatgatggatatctatcacgaacgaagatgtgaacttaccttcgagttttacgatgctctctatgacttaaagcgctggcacaagagctgtccagagctcaaaaacgttactgccaaagcattgactagtcaacctcgtgttcgtaagtatgacgaccgttctaatcctgagtcatcctttaagattgtaccttatgcagattatcaggataggattactacctacgacgaccacctcattgttttcccatatccaagtaaggcgattaccgaatcgaatgggcaactaaagcaaaatgagggatacaactaattctatccgtcgttaatatagaagatagtctatcctttccacaaaaaaggatagactatttttataaatattttgtacttttgtaaatctaagaaattatatttaatgaaacgtcaaattctgctattagtagcactattagtaaacgcttacgcgggcttgtttgcacaaaataccaacatgcaaacatacaccatggagcatccatacaaggtagaaaagctcaaggctcccaaaggtaaaaaagtaaaaaatgttattttaatgataggcgatggcatgtcgctgatggatgtctattccgcttgggtgtgcaatcgaggatgcttatggctcgacaatgcacaatacattggactgtcggctacccattgcaccgataaactcatcaccgactcgggcgcaggtggcacagcattggcaacaggacacaaaacaaaataccatgccgtaggggttgacccagaaggaaaaccgcttacaacaatcatagatcttgcaaaacgaaaaggcaaagatgcgggaattgctgtaacatgccgcttatgggatgccacgcctgccgacttctgctgccataacattaacagggacaacgaacaagaaattatagccgactatccaaccagtggcgttgactttgcttttggtggtggagccaaatacttcacaaacaggaaagacggtcgcaacatcttcgaagagctgaaaaatcaaggttactacattgccaagacgtgggaggaattagaaaaatgggaaagcggaaaggtattctgcgtgccttacgaggtggatactcccctgcctgatgagcgtggtgacttgcttgctcgcgctaccatgaaaggcatcagcttgatgaatcaaaacaagaacggctttttcatgatggttgaagggtcacaattagacgactatggacattttaatcaactggatatgctcatgaaagaattgcacgactttgaccgcaccatcggtgaagtcatgaaatgggctgccaaagatggtgaaacgttagttgtcgtaactgctgaccatgaaacgggaggtcttactttgcacgggggtgatttagcaactggacgcattgaagcaaaatttgcaagcactggtcacactggcgttatggttcccgtatacgctttcggtcctggtgcagaagaatttactggattcatggacaatacagaaatattctggaagatcaaaaaactaatgcgactataattgaggcttgcactattcgtctcaaaagtcggtcaatactcgaaattatacctaccagtcacacaagatacaagcaaaaaaaactggtatgtactatcaagaaatcctatcgcaagataacttatcaaagcttacatcatcaattatgctgaaaaaacttaatcaacttcttctcttcctcggtattatgttgccactgaacatgatggcacaaaacctaatatcgtcggggtctcctctgtacaaactaccttacaagaatacctacgtcatggaaacgttagtggcagagaacagttttcgtacggctaaggttgagaagacccaaccgggaacctttgcacaagccaaaaaagtgttgccatctccctattgggaagggcacaacaaggaaatagagatgtactggaaggcatgggaaatagggattaaaaacatctgtcagccgttagatgactctggatttgtaaccagttatatcgctccagcctacaacggaaacatctttatgtgggacaatgcctttatcacaatgttctgtcgatatggtaaaaacttcttcccatttcagaaaagcttagataacttttatgccaagcaacatcccgatggctttatttgtagagagatacgtgccgatggtagcgattgtttcggtcgatacgaccctaccagcacgggtcccaatattctgccatggtccgaatggctgtattatacgcagtttggcgatgacaataggctcaacaaggtcttccctgtactggcggcatactacaagtggttaaagctaaaccgtacttggcgcaatggtacttattggtcgagtggctggggaacaggcatggataatatgccacgagtacaagacggatacaacaccatctacagtcatggacacatgatatggttagatgcctgcttgcaacaaatcatggtggctaagattttgttgaaaatgggcttctacttggaacgttggcaagagatagaaaccttcgaagatgatataaagcatctttcacaatacattaacgacaatatgtggagcgacaaagatggctttctctatgaccaatacgcggataacagccttagtactacacaaggtatctatgcctattgggcgctacataccgacgtgttgtccaaagaccggttggataagctggttgctcacttgaccgatactaccaaatttaaccgtccgcatcgcgtcccttccctctcgcatagtcatcctaaatacaaagctaatgggcgttattgggttggaggcgtatggccaggcaccaattatatgatcatctctggactcgtagacaaaggatttcgacagttggcatgggatattaccatgaatcattataacaacgtactggaggtgtacaaaaagacgggtactttttttgagtattatgcacctgaaagtaatcatcctggcttcatggctcgcaaggactttgtaggttggacggggcttcctcccattgcagaactcatagaatacatctttggcattcgagccaaccatgaacagaacgccattacattggatgtcaacctgttagatgcttatggtattgataagtatccttatggtcaagatggacttatttccttcaaagcacaaaaacgtaactccaaagaggagaagcctaaggtcacgattcaaacgaacgttccctttaaagtcatcttactttggagtgacaaaaaaatagaacaacaggttggggttggtaaacattccctctaacacttttattgatataaaaactaagtatgtatcaaacaatgacaacacgtatagccatcgaccttggtggtaccaatcttagagctgcgagagtaagaaatgggcaaattgaagcctccctgcaagagccatgccttgccaacggaactcaaaatgaagtgctagagcaaatcattcaaatgataacacggctcaaccagtcatcagttgaacgcataggcatagcagtaccctccattgtagactacaaaaagggcattgtttaccacgtacaaaacataccttcgtggacagaggtacatctaaaggatattcttgaacaacgctttaacttggagacaagggtggacaatgacgtgaattgctttgttgctgcagagaatgtgctgggagcgggacaacctttcagagattttgtaggcatcactttaggaacaggtgtcggtgctggcatcgttatcaacaatgaggtgtaccgaggagtccatacaggtgctggcgaaattggctgtattccttatttagatagcatctacgaagactacaccagcagtcagttgttcaacaaatggcacacaacggggcagcaagaagcattgaaagccgcacaaggagaccaagcagcactcgaaaaatggcaagaattaggcttccatttaggaaagttattgcaagtaattctgtacgcatacaaccctgaagccatcatcatcggaggcggcatctctttgtcgcaccctctctttgaacaatcaatgtatgagtcaatgcacgaaaaattcttgttcccgaaagaagccgaagccgttcaaatcatcttttctaagcttaaagacagtaatattttaggtgctgcccaattataaaatttattcatttatccattctcacaaataatgaaaaagtcacttttcttgtcattgctactgacattcctaaccacgtttaatgtatggagtcagcactcgttccgtttccatgatggaaagtttaggatagctcaattcacagacattcactgggatgcgaaatctgctaattgcaagcaaacttcagcaatcattcagaaggtcatacaaacggaaaagcccgacatcgccattcttacgggcgatattgtaaccgaacaacctgccggcgaaggttggaaatcaatcatccaaatctttgaaaattctcatctgccttttgtggttgtaatgggaaatcatgatgccgaggtgatgagtaaaaaagaaatataccaacagcttacagcttctccctattacgcaggatgtatcggggcaaccaacatcacggggtatggcaactgttctattcctatttattcttcaaataagagcagcgaccaaccagcagccttgatttattgcattgactccaacgattaccagcctatcaaagagtatggtgcatacgattggatacactttgaccagatacaatggtatcggacagaaagtaagaaatatacccaagccaatggtaacaagccactcccatcacttgctttcttccatataccgctagtagagttcaagcatgtagtggctcgcaacgactacttggggagctatggcgatggtgaggtctgttcatccaatatcaattcgggcatgtttgcttctttcattgacatgaaagatgtaatgggcgtgttttgtggacacgaccacgacaacgatttcatcggcatggaatacgatattgccttaggttatggtcgtgtgagtggtcttgatgcgtatggaaaagtagaccgtggcggtagaatcattgagctatacgaaggtcagcgcaaatttgatacatgggtacggacagccaacaagaaagaggacactttctactatccgtctgcactcacttcgaaagatgaacgaatcatgaactatctgcctgcgaaaccagtcaagccatccaagcagggagtagcatacacgtattttgaaggtaagattaagcacaccaaagacattcacactttgaaaaaggtagagagtagaacaatgaaaaacttctctatcagcaacgcaaagcaaaacgaccattttgcttatatcttccgagcattcatccaaataaaagaacgtggcgtatatcgtttctacacctattcagacgatggcagcaaattattgattgacaaccaattggttgtagacaatgatggtggacacagtgctcgaagagctgaaggaaaagtggcactcgagtcaggctttcatgaaattgaggttcgatactttgaggactatatgggacaggaattgcaggtaggctatgccagtcgcaatatcatcgagcgtccattgcccgacaacatcctgttcttgccacaaccataaagcaaacctcattccccaagaaaaatgcgtatgaacaaaattcccaccatttgggcttgttcatacgcattgcatttttgtaaggtcacaggcaaacgatcctatcttgcaatcttctttgctgaattgcctttctgtatatacacgccatgcacaggtgctttttccaaacgcctgccatgcaaatcataaaaggcgggttgcccaacattatctgttttcacctgttcaatgtcagttgagtcattctcaacctgcaaaatagcatccactatcacacctccattggtcagtatgccattgtgccccgtacaagtgccgtcagctgctttgcgtccaccagcatctacactgttccagtcaatcttgaaccgcatgcgatagtcgcccgtcttctttggagccgtgaacgatggtggattgagaatgttacgcgcattaccactaatgttctctcctaaggaatttactcctgccccatcttggaacgcattgcccgagtaaaagctaaaagcacgtaactcgctgccttgctggttgatatttccctctacgaaggagaactgtttatcgtggtcttcgtcaacatacacatagccatacatccaagcaccagcataatcaaattttaccgtcaatgtcgctcctgccttgcaaacaaaacgcttggcgtcgtcggcagtaaggtctacataaggcatcctactgccaatcgtcaccgtttgcggtatttggttgtccgcagtgagtgagattgcgttcaaatgcctttgtgtatttactggctgtgtctgcttgtcaaagttcacggcatatggttgcagctcacctatcgtcgccttcactacttctatctcgatttctgtctctacgcccgagccgtccaatgccaccgcttttatcattacctttcctggttttagtccttttacacaaccgttgtacacagttgccgtctctgtgtcactcgatgtccacgcacagacgggataagtagcatcggtgggcaacacattggttcgtagcacaaaggttttgccaacttctacctgtctattgtcacgctcagagacaagagcgatggatgtcacatttacgacagacacagatgcatccaagccttcgaaactatacacgctgctgcctggtaattttacgataagcaagcggtctatgtcaacggggacaccttcttgcagcccattcaaagcagcttgttcgccaaaagatttgcgcaatacgacacttccattcacgttggcaggaatattaagtgcctcacgaagtgtaaactggtatgtttgctcttcatttccaccattgcgaagcgtcaacaccgactttgttccattccatgcagcccaaccataaaccgctgtcttgacgccattccaaggattgccaccaacccaatgtatgtcgggcaagacatcggcattgcgtttctgccattgtatgcactctgccaagtcgctccacaatttgccgtcagcgatattgttcatcaaggcatagtcgttgtacagctccaccatacccgaaccacaggcaaaggcgcaacgcaactcacgcctgcatgcctcatagtccatattcttgctcacctgtccaaagctggtaaggataaatccgtgagtcatcaaggtattgataggacacaatggtgaactcgtcacatagttttggtaaaccagtctgtctcgataagttatccagttttctcgatcaatggcgttgttgccaatggttccataatcgccctcctgtcgccaggtagcatccgtaaaatgataccaaaatggactggcccaggttcctaccgtagtgttgaaaaagatattgcgcttgaggttttcacgcacataacgctccaagcggatgataccttcagcattttcattgcccacatctcccttgtctggacctgttgccgagaactgtgcggagatgccatcgaacttgaagaagttgaagttcccgttgttttgagtgagattggtagccgcatccaagaacaccttgtagtaggcagggtttgaaagcaccatgccacccttgtctttccaatagtttctgcggtattctccactttgcccatatccgccaacgggtcctaaccatgctccaacgcctgcacccatcgtagctgctttggctgcaatgtcacgcatttcgttaggaaagcctgcatgaaacgtccacgttccatagttatcccatccatcatcaatcacaaaactattgggggctacgccataacggtcgtagagtttttctttccattgattaagtatgttcagcacctgaatggctttcatgttgcctgtggggtccaaagcgttgttacgatcaatgttcagttcgtaccatgagatataaactgggttgcaacgccatggtactgcacgctcacgttcggagtaagcaaggaacgaacggcgtttctgtgtcttatttatgtcgttgttagcttgttgtccatcttgcgcaaccaatcctacaacacttgatattttccacgtttctccatttttcaaggtagtgttcctgctccaaagtccctgtattggcaccaagtcttgttgtgctacaatgttttccttgggcgagaaaatatctactgtcagtttgctggtagccgttattgtctcagtctttgtctccgcaaagacacgcaaatcgaatgttccatcgtaaggagcaatgaaagaaaacgcattatctttctcggtagaacccgtatatcccttgtgataatcgctggcagcaacgtcaccgtgagcatccagcaagtcggctccgcctaagtttagtcggtgcgaaccgccagtatagctgaccgttaccgacaccttttgattcttcttcaatacaatgtcgtgcatggtataggcacaaacctgcggataagctgcaccagtagcttcaattactcgcatgggcaaacgcgcctcatcaacctgcaaccatgatgccacctgcaagttctcctccttgttgctcaccaactcgtacgtatggtcgcttcctactgcattacccacagtattgtatcctacgggattctccaagcctgcaaacaactgattactcaaaatcacagcaccacgagtgtttcccaccacctgtggcacactaccagcggcttttgtatctaccatatatgaaagaggtaccacgctgtgcatatctacatcgcccagacctgtcatctccatctcgcttcttaggtagtgactaccgtccctcagtacggccttccataccgtttgcagggtggcatcgccaaactggtattcatactttgccactaatgccttaccgggataatgttccgcaccacccaccgcttgcgggttggcaggcaagtttacaagttcgacgctccttaacttcatggctgaagcaggaacacgcacgccattaccaaaagccaccacaaagagttcggtgcctggctgcaggttcatggctttgcatccagcaaaatacagttgtccgtctactttcatgaacgaagcagccaacacattgttgctcaaggtgtacacttcattttcctccgttgcaacagccactccaacattgttttgctgtgcagggtacaccacggcattagcataagtggcaacggcaggctgcacgggagtattggcataagccaccgtgatgcgatgcaatgcatcgtcgatggatataacagcaaacttacccgtttgacgtggtgcgacaatatcagattgctgcaatggttgcagggtagtataaacatccccagagacatagttctcacccttgatttgtatcttttccgctccagttactttgacggtatagctatggcgtaccatttccttgatgttccacttacttccgttgtctcgatttccaccatctgtccaaagtcctacagacaccttgccgtccaaagggttgcttgcacctatgccctgaaaccagttgaagtacaatgcagccttgtctccttgtgccgtgacaggtgagaattcgtagctatcgttaccaacgggcgaagtaacaaaatagcattgttcgtttttctgctcgctgagcgtaacgaacgctgtacctgttccatacgatgcgccaactgtataggtgagccacttcttggctccatagctgtaaatatagtagcttccagtctttccgtcaacggcatagaaggcaaacagacctcggtttgcatcggtctgcgtgggtgccgtcagtgcgttcatgctgtatccgttgccattggtaatggtgtaaagatgttcgggagacccgtctgcaggcaaagtggccgacggttgcaacacttcggcactaccatgcaacgcaaagaggttcaccatcaaggtaaataataacaatgttttctgaatcatagaaatgaaaatatttaggtttagaatgtttgtacgattgatactgccaccacacttcatgacagtgtcagctatcggtacactgttgctccaaaaagaaacgtgcctttcctgcacatcagcaggaaaggtacgcatcaattattctgtcaagtgtgattgggttacttcaccactttcacagtcttggcacccttacggataaatacgccatgggtaggttcgcctttgaggcggcgaccagacaagtcgtagtattctacaggcttgttgttgctcttctcaacaccagcaatactcgtagcctcatctgttacacgcagtatagtgtcgatgatttttccacggtttttcaatatgccattgtcaccgtagcatgtgccgtcagcagcaatctgaccacctgcgtcaacactattccagtctactttcaggcgaatcacataatcgccaggctctgaaggagcattgaatgccggtggattcagtacgttgcggtcatcgcccgtaagtgtttctcccttagagttcacaccctggctgtcatcgctgaagttacccgaatagaagctgtacgcataaagctctgtacccgtttggtcagtttgaccatcattgaagctgaactgcttgtccttgttggtatcgatgtacacatagccatgcatccatacaccagtaaattggaatttaaccgtcaattcttcacccttcttgcaggtaatcactgcactggggtctttcataagatttacataaggcttaatgctttctatggcaacagtttgctcagcggtctctgtacctgcaacagagaaaccagtaaccttacggtcggtgtcgacaggatcaacttccttgccgaagttcaccttatagtcaccatctacgggattggggtttggctcgtctgcctcaagggtaagcacccacttgctgccatcgtccaatctggcagggtccttccacaaacctacggtaacagttccattcaatggggtttgctctcctacaccgccataccagttaaggtactgctcagctttgtcacctcctgccgtagcgggagcaaagtcgtatgcgccatcgtcggtcttgcttacgaagaaatagcacgcatcaaccttttcagcacctaaagtcacaaatgcctttccgccctcatactcgtcagcagtttcgtaagtaatccatttcgcctcagtagtactgtaaatgtagtaggcgttttctttccctgccactgcataaaatgcaaacttcccgtatttgtcatacgttctggtaggacaggtcaggccattcatgtgagtacctttggcactcttaatagtaaacacatgctcaggagtaccagcagaaggcaacgtagtagatgccaccaaatcggctgcaaatccttgtgcagaacaacaggctacaaacatagccaacaaaagtaaagtttttctcatcacttgttttgattaaaagattaataataaatgtttggttaattatttgcttttgcaaaaaagtttcacatctcgtccgtgtatgtcgcctcttgatagcaaagcgaaccgtaagtcatagcaacattgtttatgcaccattccatgatgtaattgattgctcaagacgtctgtaatgcaaaaataacaataaaaaggacataaccacacttttttgcaatcttttttttcatcaacgaatgttttattgcaatttttctcatatgctgatacaaaaatagtgattcggattatcaatttgatgtttgccaaaaagcccttcaacatcgagcgtaataattatgaaaaattaggacaaggacgtccaaaacttgcatatttgcaaccaccctctcacttggtcgcaaatacgcgaaaaatgcaaacacttgattatcaatgactatcggcattatcgtgcttcacgcgtcctattatatcaatgttttaacctgcttaaagcatgacaatagcacaacaagtacaatggagttgtcccactattctcatgttctgggagtgttatctcaatgagttagtgaaattaagacgaaaaaacactcaaataaaggctatcaaagaggaataaaaactctattttgaaaaagtaaaaatgtcaaaatattgtacaaatctccttcttttcttagtcttttacaccaaaatttttcatagtttttgcttacacacataagcggcaaaaagtagcacaacagcatatcccaccaaagggacaacaaatggcactaacatattgatggtgtccgcaagataacccatcaacaggaagccacaacctccgataggggtcatcatcaataacgacgatgcactttttgttagatttcctaaatggctcaatgaaagcgcaaagatagtgggaaacataatcgcctcaaacagatagttagcgatgagagctatcatcgaaacttttcctatatccattaacaccagtgctacactgcacacactccccacagcacaatacaagagcattttttgtggaagaatgtaacgcatcaaccaacttcctaagaatcgccctaccatgaagaacgctaaagcagccgtcaagacaatggaagcttggttatctgacatccacccttgtcctgtcacaaagttgatgaaataactgttgatagagatttctgccacttcgtacgccaagagagccaataatccgaacacaaacaggggatgcttgcacagcttgacatagttattgccttgggcttgatcctctgctgtgacctcatgctgaatttcaggcaaatcaacacgcataaaaacaacagcgatacccagcactaaaatacctaaaatggtatagggaatcactacgttaccccctgtagaagtaccattgaagagaaattgtcctaccgccaaagttgcaaaaagacttcccaatccgttgaaactctgtgacaggttgagcctactggtcgctgtttgcactggaccaagttccgtaacgtaaggattggcagccgtctccaagaacaccaaaccgcaaccgatgacaaacaacgcacccaaataagcataaaactgacctatctctgcactgggaatgaacagcaatgcccccactccaaacaacaataatccaaatacgacacctctcctataaccgaacttattgataaacagacctgctggaatggccatcaggaagtagcctaaatacgtagttacctgtatccaagccgattgcgtaatggtaatgtcgagtgtattttggaaatgcttgttcagcacatcaaggatggcacgtgaaaatccccacagaaaaaacagtgaggtgatgagtacaaagggtacaaggtaacgcttattggtgagttgagggttgttagatttcatcgtttgtttattcataaatatgcggttctttcgctcaatgactggcactgggctgtcatcaactacgtcttataacaaagagatagtagggcaaaggtagtaaaatatgtgtacaacacccgcatttacgcacaataaaaataaataatgtgtacacagacaaccttccaaacaagaggaacatgacttagccaacaagctcacctgcaccaactgctttcgctaaaagtagttatgcctgcaaaatgaagcatccagaaaatacctatttttgggtatgtacattttttttctgaatcgagaagttgacatatctttgcaactcgaaagagttattcagaataataataattatcaaaatagaaaaatgtcgaaaaaagaacaacgaacgcaaaagattctatcggctcgagactcccttttcaagggatgcttgctcatgctgacgatgctgtttctaagcatctctgccacgaaggcatacaacgacacgagtgcaagcacagacaaagctgaggaaggtaacgtaactcttcaagttacagatgcgcttacgggcgagcctatattaggagctgttgtgaaagatagcaacggtaagacatacgtcaccaacgagtcgggaacctgcattatgaagttaggcaacaccgataagaaggtgaaaattactgtcacattcgtaggttacaagagttacatttcttatgtatcagcacaaacacgcagactgaacatcaaactaaaggaagatgcacagcaattaagtggagtaacggtgacatcaaaaaagagacacaccgacatcatgcagcaagccaagactttagaccaaagtatactcgaaaaaggtggtgccacctcgttggcaaaaatattggaaactattcctggtgtgagttctatcagtgctggtagtacggtagctaaaccagttattcaaggtatgcacagtagccgtattctattgatgaacaacggtgtgaaattggagagccagagttggggtaatgaccatgcaccggaaattgactatacaggtgcaagcatggtagaggttgtaaagggtgccgaatgtatccgttacggttttggtgccatgggtggtgtggtattgcttaacgctgcgccattgccttatggacataacaagcccatcgtgaaaggagttaccaacatcggctatgacaccaatgcccgagggataagcggttcgggaagcattgaggctggttggaagaatttcggtatgcgtctgcacggcaactatacacgtggtggtgactaccatacgcccgaatacatcatgaataacacgggctacaacaacatcagcatgtctgccatgggtggttttgagaacaagcgcatcacggcaacggtgcttacaagtttgttctaccaacgttctggtatctattttggcagtcaaatatccgacttggcgcaactacaagaacgattccgcattggtcgtccaacagagtcgtcattgcaaccattcagttatgaaattggtatacccttccagcaatcacaacacttcacgctgaagggcgaggtgaaatatcgcatcaacccaaagcaatcgctggatttgactttgtcgttccaagaaaatttgcgacaggagtatgagaaccgtatgaaaaaggagtggagcgtcatcccgatgcaagaccttatattgaaaacatacaaggccgacttgtcatatcgtgcttcatggaagcctcacaaaatgtctacctttgcaggcttggcaaatacataccaaatcaactacaacttcccaggcaccaagaatcctgccttcgtaccaaactttgcagctctcaccatgggtggcttcctgttgcaaaaggcgactttctttgaaaaattgcaatgcgaattgggcttacgttacgactttagagtgatgagcgtgagcggttacacgacgttgaacaagtacgactattacgatgatttcaaggtttacagtaatttcacctcgagctttgctactcactatcagtttaacgacaactgggacatgcgtgcgaacatcggttggtcgtggcgtccaccagacatcaacgagctttatgccatcggactgcaagaaggttcttactgggtagtgggcaatagagaccttaagagtgagcgtggctggaagtccatcttaggggcaaggtatcgcaacacatgggtatctgtagagccaagcatgttctaccaacacatcaatagttatatatacgaccatatcggctatggcgctaatcgttttcataacagtccaagtggaaaatacgccaagtttatgtatgatcaggacgatgtgaggctgtatggtggcgatatagaagctacagtaaatcccattaaaggactcagtatcgtagcaaagggcgaatggatattcgcacgcaacattacacgagacgactggttgcctttcatgccatcagacaagtatggactgtcagccaactatgaacatatcttcggtgcagagaaaaagataaaggcatcattctctctctctggcaactatgtcacaaaacaggaacgtttcgaccccaacaaggatttagtggcagtatcgccagatccttacttcttgcttggcaccacagcagacgttgccttcaagctaccaagcaacagggaaataaaggtagtgttggtaggcgacaacattctcaatacattatataaggaatatacagaccgatttagatattatgcgcacgaacgtggcatgaactactctttgcgcacaatcattaaattttaagaaaatgaagttacaatataagacaataatgcgttcaactattttagctgtaggatgctgctgcatgcttgccgcatgttctaccaatgatgttgatgatttcttgaaaacaatagtaaaagctcctcctgcttctatcgagtacaatggcaagggacactcacagatatatgcagtgagcgccgtacttagaatggggttcaggggtggtaacataaaggtaggaaactttggtgccgacaacagtatagacaacacatacgaacaagactcgtacaacatgataagcgtgaacacggataaaccgacagactatccgctcatgcaacaaattgagataagcaaggacgacaatggacaaatgcaaattaccagtcagcgcgaccattttgatgtagttgcatcagatgacgtttattacggacttgagcttacgtattatggagccaaccaccaacaaataaatggtgagttcatacagttctattacaagaaaaatggagccccagacctcgacaactccacgctggtacaacaccaacacttctttaccattggcaacgaagtattgaaacacagttacaccatagacggtaaaaccatatccaagaacagtaagcagggtttttacccacacacactggatgagaaacccacctattacccagagcttacttttgaaatggagggtgacaagttaaagtcctgtgacatcaccactaccaatgcactgcttgcacctgaaagtgggaacaaatcagaaatcatgccgtatgacagcactctgatagacaaagcgataaatatattccctacgctgaagagagatcaagccacatggactgaaaatggctataaattctttcaaacactcaccatgccacatgcagcagaacttgccaacaagttgtttacataccaataccgagataccgacccatttgaaaaacaattgggatatgaatatcaagaaggtagtggtgacggtggcgtagttgacgatggcacaaatacactgagacaaagacaaggcgatttcgtggaattgctgcatcaatgccgaaaaataggtacgggtccaaacaatttggacagaatgggattcaagggagttctgcagtttagccaagccaacaccgaatttgcgatgcaaataagcctatgtaatatcgtatcacaaatggataaatcaaagaatgctatttggcccaaatatggaaatgataatccagatgctgactcaaagacttgttctgaaattccaacactcggattgggaggaagtagaggactttacaactttaatgagataaaatcagaatggagtaatcacgacattgacattcctttgacattccgtgtcattgcagacatgaaagatggagacgagaagttcgcggaagatttcaaaaagttctatcctcacatggataccaatgaaatcaagaattatttcttcaatcctcaatatttgctgtccaggaatcgcaagaatatattcgtcatgtagacttcagctaaatggaaggcatttgcgcatcatcattcctcacatggctgacacgttctcctaactaaggaaaatttacatacacggctaagaggggtgagagtattaagcaaagtgccaattatactggactatctaatcaagacatttacataaaaataataaaatgaaaaaatatagtttttgtttcgttcttatattgatgctatgtacatcatgtgatgatttcatctttggtaacatgaacatcaattacaacgaaaacccacttgaatacaaagaagtgccacacagcggtgcggatgccatggttgacagcttgaagaaaaaagctccctttggtgatgccatgagtaatcccgaccaagatggcgcattcaacaactgggctcgctgcttagtcatgttcaaggaaggacactcacacggagatgaaaaatttcatggcaattatgtttaccctgcagcgccatggagacaagaagaatttgtcatagtagaaaacaactcacaaaagtttcctactgtaaaggtggagtgggaaaagagtattcaaactgtttttgaaaagaagttaggcaaacctactccccagcaaccttacattcgtcttataggtggagataaaaacctttggggtatctgcttgtacttcttggataaagatggaaagttgcttaacgatgagatatacaagcactcggatgagtatcaaatattctttaccatcagcgacgtggacgataagggtaacccatacaagattgaagactgtagaggtacatgggaagttgacaaaaatgggaaagatggcaaagtagatgagcatcctgtcgtatcaccttatttcgaaggagtagataaggacggaagtttagggcacgatatcttcatgcgtagacaaaatgcaaccaagaatttgtttgaatatgcctaccgtgacacatggcatcagaatgctatggctgacggtatgcgcgagttttacaacattaggttgctgccaccccttgatgccaccgatgctaattcatgcgtttcctatgacaaggactgcgtaggactaaaaggacatatcaacttttactatgaagctaacgagccttcatctaattttagacctgaaatagatggacgatatgggtctggagagaataaagacacatggcctttcatggttaaaggtttttctggtgagtctgtagtatatagccgtccttcatacatattgccctacttctatctttccgtaagagttatgaaatgtcaaaagggaaagaaggcatatattcctaaggccaccattgccaacaaagagttagactatgctggatattgggactggatgaagagcgaaaaagcctgcgcaccattctataatcctttctggcaatcgaagaatacgaccctcgaggttcctgaatggaaagagcttatacgcttcaacatacctatcaaggtgtattgtaataggttcgattctgatccgacaaacgtttctccagcagaaccatattatttctacttaggtagagagattggattaacaggaaaacaagcatacgaagcaagccaaaatgttaagacgcatggctttggcgcatttggcaactggttcctctaattcatacaattattatcaacaacaaaaattatcagtacaaataaacaaaacaaagatatgaaaaaaataaattacaccttgacattagccttcatggcattgtcaactcttttcacagcatgtcagagaaatggagacatgccagacagaactgatgcgaattcaacagtagaccacctcattttcaaagaagttttttacattggttactgcacttatagggatttgtcttccatgggcttcaaaagccaatatagcagatacgaggatgccaactatgtggtgatatacaatcctaccaaccaaccgatatcgcttgccaacatggcactcgcatatcatgccgttgacccaagtatccaattttcattccaaaaagatggagctggagattttaccaaaaggtattatggcattggaggtatgtcgtacttccccaacgaccctgtaacaaaaaaaccacatgtcatacagcctggtgacagtgtcatcgtagtgaagtatgcgtgtgatcacaagaagaaattccttgccgagaatgagatcacagaagatgaggcaaagaaagattactttggctgggaggctctgcccgactatagcaaacttccaaaggacaagacctttgaattgtgcaaccaacattcaccgaaaaacggaatgtgcgaccctaacgacaaatttgacaacaaggatattccaaacatgcgtgaccttgttttgtgggatgaacttccatttaaggggccaagtcagagtatgcgcatggctttggtgaagctccctgatggcgatgtatccaaacctcatactaaagacgaaaacggattttatcctgacgaatcgccacgttcacgcaacaattggtatcgactatatgatttgtatggaaccgagcaggaccaaattaatgacgagacagatccgctgaagaaaagagaattagaaaagaacagaaaatacccaacggcatactaccacatgatatataacacaactggtatgggaggcatcaatgctattgagctgaattacaattgggttgtcgacttccttaccatttgtccttcgacagataagaaaatggacttgctgacaggtccaagctctgtaactgtatatgatgcaacaggacaccccgtattggaaggaacagaagaaaagaaagaaaaagtatggtggtacgacagaggaacggcaagtgtctgcaagcggatatttggaattaatgacttttctaatccctcattcgatccttcgcaattacaaggtgcgctgattcgtcgtaacaatgggaaggtatttgtagccgaaatgagttctgcgctgaacttcacgaaaggtgtaccatcactgtgcagacgtgacagcaagggcaaaccgttagacatgaccgcatactggaaggttaactccatcaacgcacgtaccaagaagaaataagagttgggacgtacaaggataactaaacaacaatcattgatataaagaagacaaacaaatgaagaagatgatgctatgtgcattggcaacaattgcgcttttagcaaactgtacacgtgacggacaaccagaagaaaagaaaaataccgcagagacagaaagcacggacctgattataaaagacatttactatgctggagacttcgtggagacaccctacggcaataaatctgaagaaacggatgataagtttatttccgtctacaatccaaccagccatgacataagtcttgagaatatggccctggcactatgtcagtacaacgccgtagacagagtcaattttgaaaagcctaattgcgattataggctgaaagggtttggggtttccaatatgattggcttccccaaagataaaagtggcatgtcatacaccgtaaaagcaggcaaaactattgttattgctatgagagccatcaatcatgcggaaggatacaagaagtatttgacagagaatggagaagatccaaccaaatacaaaggtatcgaaaaactgatcgacctttccaaagccgactttgaatggggacagaatggtaacgaaaacgttccacacatgacgttcttctattgtaaggaaaacgacaaagaacaggaaaaacgaatgaaagaagacaaatcgaaagtcggagtatgggatgaagacgacgatgagtatgtacctttcggatttgagcgaaacttcaccattgcgctgatacgtttggcagaacctatcgagaagataaaagagaatatgaacaatgccaaggtaaatgaagcgttgctaaaagaaattgaagagccgacggcaaagtatggacgctatgtcatgtggaacgagagtggacatcactcacattcacaaattctcatgtttttaccgaaccaatgggtcgtagatgctgtaaacgtaaagttcaaaggagctactactgaaaaaagtttccctatatcgggtacgctggacaagggttggaatggcgtttacgaaaaggctgatgacaagatagacgttggtgcaggcaagatgattactcgacgtttcaatggaaaaagattatccgatacaaacaactcatcggttgactttgaggtcaagaaagtagttgtaccttcgaaataagaaggcatgggcattgtaaatgcctgccttctcttactaaacttcataaaataggttttacctaaatatgtttaatttaatgtttttatagtatgagaaaaatttacatgttaacaatgagcctgttcgtttgcatgggtgcattcgcaggcaacgtaaacggcactattggtgataatttgaaatggacgttcactgatgatggcacacttaccattagcggaactggagaaatggaacacgcagatggtaactcagggtatgcgtggggaactgacaaccacacattagaccgttccttaatcaaaaaggtagtggtggaagaaggggtaacaagccttggcgaatacatcttctgggattgtcccagccttacggaagtaaaattatcaaactcactgacgacacttaggaaagaatgtttcaaacattgtactgcgctcaaatccataatattacctgacaacatctccatgattgacgagagtgcttttgaggaatgtaatgctttggaaaccgttactttcccaaagagtctgaaggaagtgagtacaaaagcattctacaactgcaatcttaaaaaggtagatctttcacaaacacaagtagaaacaattggcatgggagcttttgctcacaatgttcaatgtgaagaggtatacttgccaaagacactcaaaaccttcgaaggtgaagacgagggtgcattttcttcctgtggtgtgaagaaagccgtatgtagtgcagtagagcctcccaagacaataagtggcgtatacgattttataacaggtgagaagaaaacagatcctgttgaatgggtagacattttcactggctatgatgagaatttcgtattggaagtacccgcaggaagcgaggataaatacagaagcgcaaacggctggaaaaatgcagccaacaacattgctactggtatccgtggtgttaaggcgtctcagggaaaggttggtgtgtacgacatcactggcaagagatacatgaaccatgctgatgcacaaacagtcaacacattgcaacgtggcgtttatatcatcaacgggaaaaaagtgttagttaaataacactctcatttatccccacccatagaatgtattaaagatgtacataggaaaacgtgcatagaaacatcaccttctgtgcaccataaaacaaaggttattcaatacatactggtggtggggattttttattttatcaaatttaccttaggctatacctcgtgttacacaaaaacacaaaataagaaagacactctttcctacacatcatttattgtttctaatatttcctttaacaggaaggtggcattttggttatgcgccacgccgggcgttactttgtacgagtaagacacttttgcacccaatgctatctcgaagcaataattgtgaaaacgttctccctccatcttcgacaattccaaatcgtgtgtggctatgacacccgtcactggcaatgccgacaccgcatgtaaaaacaggcgcgaaccattgagcttgtccgccgaattggttccttttaatatctcatccagaataatcagcgtttgcgaattgtgctgacacgccgtaagaagttgtttcagacgcaacaattcggcattgaaataagagataccatgcgccaagtcgtcggtggtacgcatactactgaacaggctatatgccgacacacgcagcgatgtggcaaacacaggcatgccgttcattgccaagatgtagttgatacccaacgccctaaggaaagtactcttacctgccatgttggctcccgtaatgatataatagtgacgatgctgtaatgtaaagtcgttgcgcaccgcctttgcgcccaagaaagggtggtacagtcccaccgcctcgtacaccatttcctcgctcgccaccacttctgccctacccgcttgtggctcgttgtaacgaaaagtcgccatgctcaccaagccatctatctcgctaatggcatctatccacataggtacttgacctaaatactgccgttgccaccgcaggaaacgacgcaccaagaagtaatcgctcaagaacaacgcatccatcaggaaaagcccaaggatgttgccacgcctgtccaagccgttcaggatgtcattcagctggtcgaacgactgtcttgctccttgcaacacattgacaattgctgcattttgaggcgtggtaaaggtcgttgtctcactcacctgtcgtatcaactttacatagacctgcaactgtgcatgcaacttgtcgaccaccttactaatgactctacaagcacccgaacaaataaagaacacgccgaagaaatgcaagataccccaccataagggtagttgggcactcacccagcctgccacagatgccacgacagctgcaaacagtccgacaatgagcagccacgccagcacgaaagtccatcgccttgcagcaaaggtgggtatttgcaacaatttgatctcttgcagtgcctgccgtatcaaggcagaatcaattcttccgtcagcgcctaacgccatgaatgtggctcgccatggttccatggctgccaactcatcaacagcatcggcacgtgcagaccgattggcaaccgatgacagttgagtcgccaaccggtcactaccgcccgtggtcaccgtgcggttgatgcgctgaaacaacgagtctttcccaaacacatccaaatcgaacgtaaacggatggtgcgcatccacgtaccgttctccgtcatcgaagcatgaaaagtcgcctgagagatattgtagctcgtgcgcatataccttgcgaagtgcctcttgataatgaatcgttcgctcgtttttcacatcataataacgcaccagtgcatatacactcaacgatacaaaggacagtatcagtaaaacattcccccaatctacaatggtgtaccctaccaaaaaacctaagaatacgacaaaggtaaatatttctccagcaacaaaccatttgtttttccttttgagttgtctaatggcagtcgccagctgttgttccttttcgagataatatgatttcaaattattcatcacgtgttaaaatatttacagctaaaagtgtattgagtcttctcaacattcaatcaatgctgtaagttatcaaaagtaaatatctctacaaaggtaatgcttttcaggaattagcaaatgcgcaaattcgggtattaacaatctttcatcgttctatccatagtagctaccaaaacaaaacaagctattttgtacaccaaaacaatctgttttacagcacaaaatagcctgttttccattactgcctcatgcaatcagtgtacatcaaaacgagctttacactaaccactgaaggagtattctatgaaagtgctatcacttcacaaccaccttttgaacctgcttacctgttttcaccatgtaaacaccggctggtaagccttgacatgttcttcccacatattgcccgcgaagattgtagacatatgttggctcagaggaatttgcaactattgactgaacgccagtaacattcttcttattgtaagcagtaaccgttgtttgcttttctgctttggtaacaacagatactacgttgttatttacagccatagcaacaatagagtctgcggcagcaggtttcaatgtgccatctgccttgaaccaatagttgagttgagccgtcaaagaatgcttatcagtcttttctgcatatcctgccaacaatacttctccattgttaacaagcatatcaaaaatgccttgcgcataatggtttacatcaccttcgtcataagcatcggctgtcacccaattgacactaaagtcggcaggatgaagagaggcaacgaacaaagtgcgcgcaccaacagctggtaggtcattgttgaaaggattacttccagcagaaacgccactgacaaacaacttgtcgccctccaacgccatgcgtccgattcgatagttatcaccctcgttatcggctttcgtcatgaatgcttttgtcacaacgttgctttcgttgatagacgccaatacaaaaacacggggcatggtgccctctgctatctcagttgtaaaatccttgctttcatttgccgtgttgagtgccaacttgccataccccacgaaggctgcatatacggttccattggcagccgtaagactcacatccgtggcattataagtaccgtcattggccaacacttcttttgccccaaagtcggcaatcgatgttgcagtcatcaagtcttcagccttcaacgacatgatgcctacactatggttgtccacatgcataaagccaaaagcaaaattgtaacgacctttccatgccacgttgtctattatcacatctccatcatgacgtaaacccacatacaccttaccattggatacagccaaagcggtaggttgtacctgagcaaggttatcggaataggtgtctggagagacaatgctatagttggtagccgcctcaatggtacgtaccaccttgaggtttccgtccttgtcgtatttggctataaaggcagcacggcgagtgggtgtcaacgcaccatcaaccctcatgccttgaacgctctgtgaattgccatcaaccgactcaaacgtaacgtcttctgccaaagttcccaagaggtaaacattaccgtctgcatctgtagcaaggtcggtaatgagcgaattacctaccaatccaacagcccacttctcattgccgttagcatcatattttgctaaataagcaggtgtcaggccatcagggtctaatgaggaagccccaaaagtaacgtcttggttataagtaccagtgacaaacacgctcccgtcggctgctacaacggtgtggatgccagagagcttggtagcatcggtgacaggagtaatcgacttcgaccacatagcggtcgtattagacaactgggcttgtgctgtgagacttgctacaacagctacaaacatgagtaaaaactttttcatacgcttaaatattaaagtgttcataatttattaaaatgtgtggagatcctattttactggccacacctctaattctggattggctgccacggcatcggcagggaaacgaagggtgtaacgtgcatcatgctccttcaactggaaagtctcgtccttgtaggtcttggtcagcatgggttgggtggttctacgcaggtcgtcccaacggaatccctcaaaagcaagttctctaaaacgctcgtcatagacttcagtaagaagttgctgctgattcatggcattcagctcgtccacatacttggcgcaaacagcgggtttgtaccgcttttccatcagtgcagaaagatactggcgagcctcggaaagctgtcccatttgagcggtagcttctgctgcaatgaggtatgcctctgccgatcggaaggagcaacgatactcattactaccccctttcaggagtacataagtctgcgaacctttgcgttccatataccgtaacttacgctggtcgccctttttataaataccgatgacactttctgacggtcttcctacctgtttatagttattggtcatcacctgctcaagcgctacgatcgattcaaccgacttgtaatggttgggcaacacaccgcccgaagcattgagatcttccaactcaccatgcttcgccatcacctctttagccgcctttaacgctccttgccagtcgcctttgtacagacaaacacgcgccttgagtgcttgtgccgagataacattgaagcggtaggtctgaccttcgtcccatttctccacgttgaggtgcttggctgcctcgtcaatatcgctcaatacctgctcataaacggctttcagactgctacaatgtggaatggttttcacatctgcctgcaactgcaacggcactcctcgcgttgtctcaggatttactttggtatagggttgggcaaacaggttagccaacaagaaatgacaataggcacgaagcatatagcattcgcccaccaactgttctatttctttcttgcttgcgttcgttatctgaccttggttttcaatgatataattagctatataaatgatatgccagtagcgacgccagttaggagtagctgtagaagtggaaggagcggcatcattccaccgccatatatcaaaatacgaactgtaatcttcgggcgaagtagcggtgggagacatcgtcagctcatcacttcgaagggaggcaaagccacgatcttcgggaaatgtggaatactcataggtaagcatctgtcgatattcctcacctgtcttggcaatcactttacccgtgggagcgatgtcaagaaagttgtcacagcctgtcagcactgccaacaaagccaaacacaacgtgaatgtatgtagttttctcatctttttttcaacttaaaaattcatattcaaaccaaagataacgctttttgccataggctgggcaaatgggtttcccatggtctcggggtcgagatagttggtgtagtcggtagcaacgacaaagaggttgcgcccttctaaagacagtgacgcattggtaacgcccaccttgttgagccatttcgagggcaatttgtaacccaaacgaaggctttgcagacgcatataactgcggtctttcacccaggtatcgagcatactgtaggtattgtattcagaatattgaatatgctcgggcactcgcacatccttcgtcatcaacttgggaaaagttgtttggttgttgtttggcgtccaacgttgcaggatgtcacgattgacatttagccctctgtcgtacgttgtggggttataagagggttgtacacgcaccttcatgcccaagttaaaaatgaagttaatgcccaattgccaatctttatactcaaaatgattgataaaaccaccagacactttagggtcggtagtacccatataggtgtataatgctcgctgttcggaagccgaaagcgtgctggcgccagcattattcagtttcaacagttcggcagcggtcaccttatgaccctccttgttgacaaacaagggatatccatccttatccaaacccgctgtcttgtaggcaaacaaggctcccacaggataaccttcacgactgggataggtagagttttctgccacactctcgttcaatattttattggtgttgaagcctaagttcaggttggtggtccacttgaaattcttggtgtaaatgtttcttgaacccaaggctatctcccatccgctattctccatgcttgcccagttgatagtagtagccgagaagcctgtttcttgtggcaacatacgcatcccgatgaggtcactactgcggcgatagtaatagtctgccgacagcgttatggcattgttccacaaaccaaggtctactccaaagttcacgtttttcgtcttttcccaacgcaaatcaggattgggagctgtctctgcctttatcatttgttcacccttgccaggcaatatcgacgttttgtcataaaagccaatgagataaggcgaagtgtttttgtcgatgtttccttggattccgtaagatgcacgcaacgacaagttgctaagccatttagcctttttggcgaaacgctcttggtgtacacgccacaagccactcactgaatatagcggcagataacgatatttcttagcaacaccgaacacatcggaaccatcgaagcgcacactgccccccaaagtgtaacgatagaacagcgtgtacgaaccagttgcgaaccacgacacataggaattctcggcttgattctcacgatgtagcggacgactctctgctgttgtctcatttggaaatatcacaggatgcgtggtaagcgtacgggcatcgtaaccgtatgctgctgaataaacagaagaagagttgatgtggcgcacctctgtaccagccaaaagctcaacatcgtgaaccttgttaaagcggtgtgcatactctaaaagagccttccatgtccactgcaaactattataggaggtagttttgtgcattcctccttctggaagatacgagcgtttgccgtctttataagcataagtagcattgaagtgttcctttctcatcgcaaaactgttctcgccagcgtacttctctaatgagtagttgtcatactgcaaaccaaattgcgaagtgagtttcaagtcgggtgtgaactgcaattcaccgtcaaagatagccatgagcgaccggtcggtacgcttgtgcgaagtattttctcgctcttcaaagatgttgaagtcaagcgatgagtcttcttttccctgcacattgacatcgtaatgatatttaccgtcgacaaaaggtaggaagtatgggtttgccaaacgtgagtaatacacagggttagtaaacccattggtgtcggtgagatagctgttttgcttccgttggttggcgtaaacggatgcacccaactttaacattttgttgatgcgataatcggctttcaatgtcatgttaaagcgtttgttgtcaacacctttcacgttgccttgctcatcgtaataacccaccgatgtataatagccagaacggttgcttccacccgcaatactggcattgtattcttggttcatggcatggcggaaaaggatgtcgttccaatcggtatggatgttgcgaagtgcattgatctgcgtttgtgccaatgctgaaagcgcattcctgccttctcttttatatacctcagtctcgttgagtgttttcagaatgttcgccacctcacctttatgttcacgataggtgtagtctgaagctaacaagcctaactctaaatccaccttttcgtcagcattcaacaggttcagacgatcaatattcaacttcggactgtaggtatatttggcagagaagttaataactggtctgccctccttgcctttcttggtggtgatgacaatcacgccattggcagcacgagcaccataaatggctgtggcggcagcatctttcagcaccgtgatgttctcaatatccgatggattgatgcctgcaatggacgtttgatacatgtcatcgatgtcgttgaggttctccatagacggaatatccgtaccctccaaaggaataccatccaatacccacagcggttcctgtgtgccattgatggacgcggtaccacgaatacgtatcttcactggtgcgcccggagcacccgaactgcttaccgtagacagtccggctatctgtcctgccaaggcttggtcaatgttcttcaccgctcccacagccttgtcggagatgtcgactgtcgttacagaggctgtcagcttgcgtctgtctatgcgctgataaccagttacaactacttcgttgatggaatgtgcatcgggcatcagcaagattttgtaatgattaacgcctggtttcagactaatagtttgcgtcgtataacccacatagctaacggatatggcttttgtatcctttccaacggacagcttgaactttccttcgtagtcggttaccgtaccagttgacaccttacctacgccctttcccaccgttgcaccaatgagcggctcgtccttgaggtcgccatcaagcaccacaccagtaatcactcgctcctgtgcctgcacctgcaagacacacgccagcaaggcgatgagcatgtatatcgttttctttttcattgttattcttcttatttcgttaatcccaaagctgtttgtatgcgtaatatcacgtcctcataatgaagtcgagtagtagtgtctgaacggtgtaacctactcttcaatagtttcatgacacgaatcatctcgcctcgtttcaaactcaacgcatcgctgttacgtgttacctgcgtattcgtcatttgtatgtttcttgacttactgcttaaataagtttcctcctgacagcccaatcgcttatcgagttggtcaaaaaaactgttttcatatagcttcttgttgattttcacaccctctccttcggcagccgctgtaatgagtgcatcaataaaactcttttgcaaattgcgctccaagagattgggcgactttgctgccaaggttgtcctaaagatatgtcgatgcaacatatccataaattctacaggtgtgaacgcctttttaccattctcatattcgttttcatacattcgcatcaagcggtcgttattgagcaaatcccacaaaatgtaattctgctggttcttcaacatatagaaaggttgctgctcttctacacccaacggagtcttacgttgtaagtaagtcaacttcgagagcggtgtgtcgaacagccattttggttcactcaacacctcatccaacaagaattgcaacgcctgacgctgcttgtctttctcgacaaagcggaatgatgtctgtccgtcaccaacagtaaggttctccaagtacatgcctcccacatttgccatgacatgatataggtacaaactccactgatagatcaccgccgaataaaggttggaagcctcatcgtagtcttgtcctggcttgcctgtagtggtccagttgatgatattaggcacaatgcgtttgaggttggcaatgccatatcgtgccgactttacagcatcgtcgcccaaatcttcgctcaaggcacgtgggtcgatggcagtacgctgcggctgcgcctcactatatttatacaaacgtccacgatgttttcctaaaaaattgttcaacttctgctgttcatctgtgccttgtggataccagcgatagccccactctattgccatgaggtcgtaaggtccgatgttgggcgacatcactttcaccccgtcacccggttgggcaacataattgaaacgcgcataatccataattgacgatgaagtgcctcccattcgttgagtgaaacttacagaccgaagcgaatcggtgggataggcattcgaggcaatcatgttgtgtcgtaaacccaaagaatgccccacttcatgacaggctacaaagcgtacagcatcgccaatcaactcttcgggcaatcgcatacggcgtgcttgagagttctgtgcccccgtttgtaccttgatccactcactgatgagtgattgtacgttatgccaccaaacgatatctgcttccaatatctcgcctgtacgagggtcaatgaccgatggccccatggcattggctttggtagatgcggcataagtcaacaccgagtagcccatgtcatcgcccacttgcgccaaactatcggtatagtcgaacacctgaatggcattcttaaaaccagcccgctcaaatgccttattccaatctgtcatacctttttttatatatggacgcaggtgtttgggtacggcttggtcgatataaaacacgatgggttgaatgggttctaccaattcgccacgcaaataggcggctgtatccgatggaacgagacgccaacgagtgatatagtttttgggttctaccttgttttgatagtcgttgtattggatatttgaggtggtgaaatatcccacacgggcatcctcctcacgaccttgcatgggatattttggcaagagagagagcgaagagctcaccactactgtcacgtttaccttgctattcccctcatgaacggtcgttgttagctcagaggtggctgtgacattgttcttaaacgccttgatatcaataattcgtgacaagtttgcaataggacttgtgcctaaattaatattgttgaacacatcatttaggaaattctccttgccattgtacaagtcattgaccttcacaatcacggtagaagagtcgctcgccatgccttctatcttcaagttagcaagtatggggtcgatataattatccttcaccgaaccagccattgccgcagatgaaggaacttcgggcgtgatgcgttgttgccgaacaatgagccttttctgtcgtttgtcccactcaaaacgcaccgtctgattttcataattgatacccttgttcactcccgactcgttgagttcggaaggaactctttgcaaacggttcactacaaggaactcacgtcccatcaacttggtgggaatttcgtaataaatcgtatcccctttcttgataacattgaacacaccgtgcatctctaccgagtcacgacctgtaagacgcttgtaggcagagatgggtttctctgttttcttcttctttttggagaatggccaaatttgacaggctgcacgcatttccatggaagtggctgaaaacatgaaacctgcacatattattatgaataaggacttacctttatgacgaaaacatctctttagcattgatctgattatttttgaacaaaattaattgagaaacagttatcctatctgcaaactgtatatttacagtttttgatttatctcacatattctgtttgcaaaattaatctttttcttccaaaatgccaagattttaacgtataaagagctattttctttatttctcttgtgaaagattgacagttacttaatcacattcactcgccaagtaaccccaaggtcaagaatggaatgtttgtcttgcaggtaaccagtaggattggtgttcttaccaaagcagtaactatagttggcatgtagacgcacattcttgtttttcagtggatagtactccaatcctgcacctacacgtgtgatttcggttccttcatataacaccagatctgcgcgaggtttggattgttctgctgtcttttgattgggttctgccaacgcagttgatgcctcaggattggtgtctacgcctgcatgattaacatcgtaactcgccttagcccagaggttaacctgtggtgtaggttggtaatcgacacgagcggtcatggagcaatccttgaaaaggaacgtctgccctttggtggcacggttcatgtaatccactcctatttgcagattgtcagccacatcgaaacgattaccaaaagaaaggtagttgataaatttccctggcgcatactccatcaagttgatagaccaatcggtgtgcaagataccatggcttccataccatatcaggttgtaggcatacatctcagaagatatgccactatttcgcttatacactttccggaacgggctttccaccatttgcaagaagaattggtcttttttattcgtggtttgatagcccaaccacagtccccactcgtagcagggaaagttgtaacagaattcaaagagttgaaaacaatcaataggagcagggtcgaactcccacggtccacatagcacagcccacttaccaccagagagtgtccaattttggttagcgtggtaagtaaggaagagccagtcggtagcatcaaagaatgtatactccttgttaatgccattcaggcgttgtcgatacttaaaagagaacttcggtgagagatttccattgataataaggttaaaaatgtttcccttaaagcctgttttatcattgtttttcacaccgtcaatcgattcacgttggtagtctgctcgtgcttcaacagacagatttacatgctggaactcttgcgcatagagccccatgccatagaatgttagcaaaagcagatatatctttaatttcatagtaagtacaaattagatttcatgtttacagtgcaactatcgtgctccgtttctgaaaaggcatgacagtatcaataatttcccgtacgtagcagtcctttcttattccaaagaccatatacttcactcacggtatcagaggtaataaatgttttgagtctttccttactcatgaaatcaatcaaagtagagaattcttcttttgtcaaaacgatttccaactgtatctgtttctcattagaatagccacctatcacctcatgtatggtcacaccacgacgaatggtatgaatgacaaaatccaaaatcttctggtaatctttggagatgatatacacacgagtcttagaattgatatccgacataaagtgattaagtatcaaaccattgagccatgttccaatcaaaccaatgatcactaaactaacaggattaattgcaaaagcagtacaacagattgcaccacctgctaacatcacggcagtaccaagcttgatatggagatacttattgaaaatctttgcaagaatatccaacccacctgtagaagcattgatactgaacaagatactttgtgaggcactcaggatgagaacgaaacaaagaaggtcaaaccaaggattggcaatggcttgtcctgcaacgtaagtggtgaagagagattcatggataggaacgatagaaccaataaagtcaatcatcggtcctaatatcaacgctgtatacacggtcttggcgccaaattcattgccgataagcaaaaatgaaagcacaagcagtatcgcattaataacaaatatcatcgttcccacagacacaaaaggtagcaatttagcgagcaccaaggacaagccagtgatagagcctataatgagtttactgggtatcaagaaaaagtacacacccatggctgccacaaacattcccaccgtcataacgactaattccacccaaaatttacgagtacagacaatctgtttgattcgattcggtgcgttttgtaacttctcaacgaaagtcatttcgctttcctgcttgttattcataatgtttaaatttaaaggttgtcaggttaactaacgagaactcatggtgttcacgcttctttctgtgtttctctgctgccaccttttcttgttttaggtagcaacaattatttaagctttgcaaatttaattgatttttatgaatacacaagtttttagatattttttttacttaaatgcgaaaagttgcacaatattgtaccttcgaaatagaaaaatgggacaaaactttgaagagtacaccaaatactgttgatggataaaagcaaatcatctatcataagacgaaagaaagacaaaaacacaatttacatcactcttttcctcagtatactactgagctttcccctcctgaaccaaatcttaggtacaaaccgattgatataaataaaaaaaggactaccgctgtagtccaatctttgttaaccttaaatctaataccatgaaaaacgcgatgcaaagatagaggttatctccttatattgcaagcaactaaggtcgtttagtaaaaaacagcatgcttttcttgatgtatatcaaagtacatacccaagatttatcgcacatcgttgcagatagcaagaagctatttgcctgcccacatggctcatgaacatacaagtctctcacattaaagaaagatattcatacaaccaaaagcaaccaaaagcaacatttgtcaaattgttggtacgctacataaagcaatcataaatgctgaattttctttacaaagtgcctctcataacttgcgtgtaaatcaccaacctcaaagttggtcgcaaatacgcgagaaatgagcgatgtttgtaatttattggcattgaagatgttacgattaagaaaactctttttattccaacttttatcttttttttgcgactaacccattgagataagcctgcaatttgcatgcttcaatgctgctgaagcatgtgaataacgcacctaatacatgtttccaagctcgtaacgtcaatattttagcttgaaaaggcatttattttttgaaaatcagcccatttttgcagttcgtttgcctattgattttttctattttgaagatttttaatggtcgttttttggtaaaataataagacaaaaacaacggtttcattgaccacggatgatatggatgctgtccgaaaaagcaataggtgcaaagcgtaagcacgttttaccaaagttgcctgccgagccacctggcttgcttacgctttgctcctgaatcaaccaacaatttgtccgtcgaacagtcgcacgatgcgatgggcgatggaggcgtcatgctcgttgtgagtgaccatgacgatggtggttccctcgcgattgagttcggtgagtaggcccatcacctctgcaccatttttcgagtcgagattacctgttggctcatcggcgagaatcagtttcggtccgaacaccacggctctggcgatggccacacgctgctgttgacctcccgagagctgatgagggaaatgcttggcgcgatgactgatgcccatgcgtttcatgatgtccttcactttctgcttacgctcggccttcgacataccaaggtatgtcaggggcagctcgatgttctcttccacgttgagttcgtcgatgaggttgaagctctggaacacgaagcctatctctcccttgcgcacgtcggtgcgatctttctctttcagcgccgacacttccttgtcgcctaaccaatacttgccgcccgtgggattgtcgagcagtccgaggatgttgagcagagttgacttgccgcagcccgaagggcccatgatggcaacaaactccttgtcttctacttggaacgacacattgttgagcgcaatggtctccacttcttccgtacggaacgatttgcttaaattttctactttgatcatattcttaaaatattatggtttttatatgttttatggtttgtattccatacaatcggatgttcctttcttactcttgtttcagatactccaccgggttgctattggccacacgccagcagttgattgccacaacggtaacgatgatgagcagcacgaggacgattgtcacgaggaacggccacaccgtcaacgcgatgcggttgtcatagagctgcagccactgtgcggctacccaataggcaccgacagccccaatcagcacggcaggaatggcggtgcgaaggatgtttagctggaagatgcgcatcacgtcgcccacgcacgcaccgttcaccttacggatggctatttccttgtgacgacggttcacctcatcgctgacataaccaataagtcccatcagcgcgatgaaaagcaccacaatgccaaccgtcatcacaccgtttcggaagttccgggtcgcaacatattgcatgttcttgaggttttccacactctcgaccaagactgttttgcccggaaagaaccgctggagccgctcctggatgtctgtcagcttctctacgctgaaatcgtccagctgaatcagcaggtaattgttcatccagttggccgcacgtccgtagaaaatcacagagggtctgtccctcccattgttctctgcactgcccagatgaatgtcacgatagacgcctacgatggtcagtaagtctttgttttcgttgccgctatgctcactgataatcaccttccgacccaccacgtcgtcccatccgcgcagttttttcatcatagaggcaaagtcctgactcaccattacttgcctgagactgtcgctgcccgatgcgaagacacgtccagcaacaataggaatctgcagcatatcaaagtaatggtcggcgacagtgaagagatcggcgatattgaacagttgtgattcttcccctggaacagttacgttgttaccactcataccatagaaaggaaacgtattgcaagccgacacctgacgcacaccgctcatacgccctacctcgtcgtatgccgtctgccgttcatcgggctgtagcgcggtgatgttaacagacgcgagaccggcacactgatagcccaagtcaaagccaaccgtatgcctatactgcatgctgacaatgaaaagcagacctaaaaggaagctcaccatggcaaactcaagccccaggagtgccaccttccagcgacgcctggcctcgacatagccatgaaatgcaatggtcacgggcatgcggttgtaaagccatccgggcacgataccacccacgaagagcaccatcaacgcaatcaaaagcaaaatccacgcaccacggttgaataccaacacagagagcggagccgacaacaactgttcaatcgtgccatggcaagcccacaacagagctgctcctaacatgagggcaagcacgagatgcaggcacacttcgctgaaggtgatgctgtagacggctccacatccggcaccatagcattttcttaccgccatctcacgggcacgactgaccaaattgcccaccacgatcagcacgtagttgagtatcgagaccgaaagcaggatgatgaccaggagcgacagaatccagaacatctggcgcacattgtccgcctccgtgtaatagcgagatatgggggtgaccttgtaagtgagccacgtgccggactgttgcagctccttgacgggataatgcgtctgtatcatacggtgtataaggggcttcaacgaatcgggagagacacctttcctgagacgtacgaaactgatgtaacggtcgttaccgaccagattatcctgaccgtcgtagctaaaattcttctgcgtcttcattgaaccgatcacatcatagttgtggaacgttgagttgtgaggataatcctcgtagacgcccacgatggtcagcttcaggcccgacatttctttcgactgaatatgccgacccacaacgttgccgcccaagcgctctgccgtcgagcgattcaccacacaacagaacggttccgtgagtgcccggtcggcatcaccctcaaggatgcgggccggaaacatgcggaagaagcagctgtcggcaaagtagacatcggcgcggacacgtactttgtcatcagtttccacctctccatcggtcacaattggattggtgcgcgtagccagttccacctgtggaatggttcgtttcatcatcggtgccacgccgcccgacgtttgaaagccctccgtgaactcctgtgccttcatcttgaagccctcggtcacacggcagatacggtcgtaatcgggataacactggtcgaaagtctgttcgtaataaatctcggcaatgataaccgcactgacactcaatccgagtgccaaacagagaatcttggccacattgtgttgcctgcggcggaagagattgcgccaagccatgcggcaagactgttggataagatgcaacatagtatagatgattaatgtaatacgtgaatatccgaagaccctgatttgtccaattgtcgctggacggggttgcccttgatgcggatgtcgctcgagccagaggctttggcactgacggaacgggtggcgaagcaatagacatccgacgagcctgagcatgtgaccgacacgtctttcgccttgagatcgtaggctctcacatcggaagaaccggaacaggtatatacggctttcgacactttgccagccagacgagcatcggaagaaccctgcaaccggacttccaagctattggccgtcagctgattgaccttgatatcactcgaaccgcgtgcctccaaccgcactgccgaggcattgagcgaccgaatgagcacatcacacgcaccggaagctttgaccgactgcaagttgggtgcctgtacataaaccgtgaggtgatgattgcctgaatgaaagccagggtcagacttttgcttgatggtcagcacacgattgcgcacttccatctgcaacttcggcaacatgctgggcgaacctaccgcctttacacggtagttttgattgttactctgcacaaactctacatggatggctccggagacttcgattgccgagaaatctctcagcgtgtaagctctgctttcgtcattggcagcctcgtatgagttggcttgtacaacgatacatgatgacagcaagacaaggacagctgtcatgcaaaaaaagattttctttttcatatttattcttgtttaatgttatttacagggttttcgttgctggccatgtagctctgaatggccacagcgcagaacgagataagcagcacgaggatgccggcaacgataatccacggccaccacacgatgcggtaactgtaccggctgatccattcgttgataatataccagatgatgggtacgctgataatgaaagcaacgcccacgtattgaaggaaggtgcggatgagatctcggcggattcggttgctcgtggagccaaacactttccggatggcaatctccttgctgcgctgctgaatgaaataggtggacatggcgacaagccccaacagcgagatgacgatggcgatgaaagcaaagagggcgataatctttgaaagtctcaactccgactcaaacaccgattcaatgctcttgtcaacgaacggatgtgcctggtttagctcctcatggaacacctctttatatatgcgctgtatctccttgtatgttttagcgggatttccctcaaactgaatcgtaacgttccatgggttctccaccttgtccttgatgcagagcaacagcggatatactttggtctccgtgatgttgcgcagtcggaaatcgttgagaatgccgccaaacgccgcatcatccgggaaaagaaagaattttgtttgtttgtaaaaatcactcatgtgactgtccgtgggcttcatcttcaaatcacccactgcctggtcattgagataaattacgggtcgatgtcccacgtggttgtcatgttttagcgacagtccatatactttcatgtagttggggtcgccgataagcatttggaaagaatagaccttgtcctttcccgtcaccgtattgttgttgccaccgtcctgcggggttccatcagaacaggacactaatttcactcccgaaacctgcttcaccttgttgaggaataccgggaagttcgtgctgctgaaagcatctccttgatagaggcaaatcaggttcttcgtgttgaaacccaatggagcgttcacaaggtgcagcatttgcagcgacatgatggtggcacaggcgagcatcacgatggtgatgatgttctgaaccacgatgaacaccctgcccagcaccatcttcgtgcggtgccggaaggttcccctcaccacctcgatgggtttggctttcgacaagacataggcggggatgatgcccgagatgaagccaacgagcagcgtgaaggcaagcaacagaccgatgacggcaggcgttgcgagcacacgcatgtccatggtggtgctgagcaagcgaccagtcattggagcgaaagccagcgcaagcgacactgctaccaacagggagatgaaacagagcgttgagctttctatcatcagccgcaggatgatgtgcttgcgttttgcgccgaagagacgtcgtgccgccatctcccgagcacgatagcccgattgcgccaccgtgaggttgatgtagttcatgatggcaaagagcagcaccaccaagcctacaatgaaaagcaagttgaccagtcggctgtttccaatgcgcaagttgtcgttgtagttgtcgtaaccagagaaatatattttgttcagcggcaccaagaacggtctgcaatagaagggcaccttgtcgaaatcaggccagaacgagtgaatgaatttgccgaactctttctctcgccccatcatctttgcaccctctctcacttgcaggaagatgcttgcacccgaaaaattcactgccttggggaaactctcgtccatgttcgccgtgttgtgataccgttcccatgagaagtcgatgatcatttccacgttcttgttgatgagcgtattgtcgaaatcctccaccacgccggtgacatggtaccgaatgctgtcgttccatgtaatctcgcgaccgagcacttcctccgtgccaaaccatttgttggcaaaccgcttggtgacgaccacgttgttccggtcgttcagacaggtctgcctgtcgccctgcagcagcttgaagtcgaacatagagaagaaggtggaatcggtctccaacaccgttgccttgtagaactcatctcccttttgcagccgcatgtctgagacgacaaagccgcaggtgttttcaatttccggataattcttgcgaaaacgactcagtatggcatggtggaatccaagttccttttcatggtcttcatagaagtcgagacccatcgcgtagatgcggtcgcccttgctgtgctgacggtcgacactcttctcctgccaggtatagacaccgatgagcagtacgaacatgagcgagatgctcagtccgaacacattgatggcggtgtacaccttgttcctcgacagaaaggtgaaataagatttgagattgaatagctgtttcataattgcgtttttttcgataatagacctgagaaacttacctctttcggtgttactctactcttgtttgatattctttaccgggttctcattacttgccatatagctctgaatggccactgcgcagaaagagataagcagcacgaggatgccagcaacgatgatccacggccaccacacgatgcggtaactgtattggctgatccattcgcctgcgaaataccagatgacgggcacgctgataatgaaagcaacgcccacatattgaaggaaggtgcggatgaggtctcggcgtattcggttgctcgtggagccgaacactttgcggatggcaatctccttgctgcgctgctgaatgaagtaagtggacatggcaacaagtcccaacagcgagataagaacggcaaggaacgagaagatggtgaggatgcgcacgatgcgggtctgttccttatacacctcggctatcttctgactgaggtatggcgactcctgcgccaagtcctcatgataaactttcttgtaagtctcctgcaccagtcggtaggcttcttgctcgtcgccttccaccttaatgagtacattgttcgcaaaatcgtcgtgtgcgatttggtcgaacaggtaaaccactgtcacctgatcgtcagctttgtccatatcaatggtgtaaagatggaaatcattcagaatcccgttgatttgctcccgctcgtaagtctcgttatagcggaatgccctttcatcaggtttcaactgcattactgagtggaagttgggcgacacaaagagcttgacggaatcgccctgcgcaaattgcttctttacctcgatgcccagcaacggcaggtaatccttgtccgcataaaagcgttggcagcgcactgccttcttgccaatgtaagccatctggttgaatccgcccaagaggggcgagcacaaacagacggaaacctccttcatcggcgaaaactgcaacagggctttcttaaacagattggcattgcgagcatcctgtggaacgccgatttccatcacgccctgggtttcatagcccaacggggcattgatgaggtgctgtatctggcggctgccgatgagcgctacggcaatgaagatgatggtgatggcgttttgcaccacgatgaacaccttactgaatagcatcttggtctgtcggcggaaggtgccgcgaaccacatcaatgggcttcacccgcgactgaatgactgccggcagaactcccgccaacatacctactgccagcacaatgcctaccaacaacaacaggttgatggggatgaacagctcggcgatggtgatgtgggtgtccaacaactgacaggtataagggatggaagcccatgccaacaacacggaaagaacaactgagcagcagcaaaggcacacgctttcgatgaccaaccgccagaggatgtcgctcttccggctgcccaacagccttcttgtcgccatttccttagagcgattgcccgacagggcgaccgtcaggttgatgtagttcatcaccgagaacaccaagatgatgatgccgataatgaaaatgagatagaccaattcgccctttccgcgctgacatacgttggaagagtattcggaaaaatagctctcactgaatggtatcagacggaacttgcagtcaatcttgaaattttctttgtatatctttggtagaatacggttaacattattttccaatgcgccgatatctgtgcctggtctcaagctcaacaccacatccggactgccgaaattaccgtcgattttaaagagccaaggtatgcgctcgcgcagtagttcgtaccgcccaataatgtcacagttggggaaagaggttccgctcatgttctcatagatgccccttacatacactttccggttctctaccgtcaacaccttgcccatcgcatcgccgttgcggaacagcatctgcgccaacttccgggaaatcaccacgtcgctcagttcgttcaaagccgtagcagcatcaccttctacaagcggttgattgaacatggggtagaacgtagaatcggtgtacatcatggtcactttcacattatccttgtcggcggtcgtcacatgttgttcacggttgatgtggaaagcacagcctttttctatttgtggcagttgcttttgcagcactctgatgatttcgcgcgatgttccgctcatcttgtcggaactgaaatcacagcccaacaaatagagcctatccacgttcgtgatgtttttatcgatgcccgtttcgtgctgatagtacaagccgatgaggatgacaaaggcaaagctaatgctcagtccgaacacgttgatggcagtgtacaccttgtttctcgagaggaaggtgaaataggatttgagattgaacagttgtttcatatttcatttcttgttattccaaaaccaaaatttcgttgtctttgtagctttcgtagccgctcacgatgactcgttcgccgggctgaagaccttccagcacctcgtaatactgcggattctgccgtccgatgcggatgttgcgacggtaggctttcttgccatctttgtcaagtacgaagatccattgcccgcccgtcacgctgtagaacgttcctttggggatgagcaccgcccgtttcgactcgcccaactgcaggtcgacataataggtctgacccgttcggatgttggctggacgcttgccgctgaacacgaaatctatcttgaacctgccgtctttcacctcggggtacaccttgcgcacggtgagcgaatagtgcttgccgttctgttcgaaagtcgccgtgagcccttggtgcacccgatcgatgtaatgctcgtcgacctgcgcctccactttataatcgctaaggtcgttgatgacaccaatcttctgtcccggagagatgctctgccctaattcgatgttgagctgtcccacctcgccgtcgatttgcgaacgcacgttgagatgctccttgcgctggcgtaccagctccacattgcgcctcatcgacgagagattgtcgttcatctggtccatctgtgctcgacggagctgcgcatctttcttgagtcgttgcgcaatcagctcattctttttcacggccagttcgtagtcttcctttgctttgagatattcctcgcggctattgagctgttcctgctgcaatgctgtctgatggttgtaggttcgcttcttggcctgcacgtccattgacagctgtgccgcctcgttctgattgttgagtcggtcctgttccatcgtaatctgcgtgttgcggagcatgttctgcttctccgccagttcgctctcggcattgaggatttcaaggtcaagattgctgttgttcagcctcacaatgacatcgccctttctgacgtgagaaccttcctccgccactctctccatgactacgccgccttcttctggcgagatctgcaccacctggatgggcaccacattgccgtctacgctcacatagtcgtcaaactgcgcttgcttcacatcgccaatgctcagcccccgactgtcgactttcagtatcgacgagaaatttcccagagccaaccacagcagagcagccaccacgaaaacgcctccccctatccaagtccaatactttcggggtatccaaaacttcttttgttttatttcaatgtccatgtccgtattcctttataataattgaccaatcgttgtttcatctcaagcatcaactgcatttgcaacagtttgatgcggctgtcaagcaaggtttgcgccgctgtatgcaggtcgaaagtcgaaagcatgccttcctcgtacttgcgcgacgccagatgccaggctatggagtcggccgttgtcttccgttccatcttcatgagctcgcgcgaatagccgtcacggtcgagcaccgcctgcgcaatatcatcgtgcagtttgcggcgcgcgtcttccaagtcgagcttgcttgcctcccaatcggctttcgctctgcgtgcggcacgccagcgcgaaggcatgaaaagggggatggacagggaaaggtagacatattcgcccatgttgttgttgaactgtttgccgaagttgtcggtcttactgctgccctgcgagagattgcggtaatagttggtgttgattcctccgcccaacgccaggacgggcaacagctgtccgcgctgtataagataatggtagcgagcgttcttgacattgaacgccgccgtcttcacttctggtgactcagcttggaaagcggcataaaggttctcggcatcgtcggcaacagacaggcccgcggtcaacagagtgtcgagagcaatcgagtcgcctacgggaaaattcatctccgctttcaaagccatcaatgccaaactggctgcgttctgctggtgcagcaagttgtaatcgtcctctgccacctggctttccatctgcgccacgtcgggacgcgatttctctccaaggtcgaacatcgcacgggtcttgcgaagcagagcctgactgtcggccaatttgcgccgtgccaagccaatgctctgctggctgtacaccgcctccacgaatttcgccatcacggctatggccttgtcgtcggctgtcttttgcagaaccgtcatacttttggcatgcgccaatcgcgcttgctgaaaggcattccaggtacggccaccgtcaaacaatggcatctccgccccaatgctgtaataattgttgaaggtggtgatggtgttgtaggtgttggtctccgggttgatgttacgcccccaggcatactgtgccgtggtctgtgccgacactgtgggcagaaggtcgagtctcgccgtgcgctcgtcaactttgctctgtcgcacctccaatcgctgtttacgcactccgttgttgtgctccaccgcatactgaatgcagcggttcatggtccaagtctcttgtgccaatagcggaagagcggccaaatctaataatataatagtaattgctgttctcatacacttaaacaattgccaaagccgtgccagaaacataacctcctgtttatcggcacgttgcgtaaaaagcacgattgcaagcctgtccaacaattagacactgctgcccaattatttgacagtgaggtccacagtccccacgatgtcttctcatgcggcgcattggtttttatgatatgatttttagacaacggcttgatactaaagagaaaaaagaatatctttgcaaaaacaacatccttttcgccactccattgaaaggatgtgcaactggcaaacagatattagacaataaatgaaacaaggtagcatactgatagttgacgacaaccgcaacatcctcaccacggtgaagatgctgatagaaaatgtattcaagcatgtcgcagcgatagccaaaccagagaatatccccacccgtctacgcgaggacagacccgacgtggtgctgctcgacatgaatttccgcagcggcatcaacaatggtaacgaaggtctcttttggcttcgcgagatcaagaaactgagtccccgcacgcaggtggtgctcttcacggcatacgccgacatagaattagcggtgacgggcatcaaggagggcgctaccgacttcgtggtaaagcctttcgacaataccaagctcatcgatacgctcaccaatgcctaccgaaaaaccaagaaaaccaaccagaacgccaccacccatgagggagaaatgtactggggcgtgtcgccatccatgcaagacctgcgcctgatggtggagaaagtagcggccaccgatgccaacatcctcatcacaggcgagaatggaaccggcaaggaagtgcttgccaaagagattcaccgcctgtcgaaacggcacggacaccagatgatgcccatcgacatgggagctatcacggagacactttttgaaagcgaactctttggacacacgaaaggtgctttcacggatgccaagacagacaagccgggaaagtttgaactggcggagggaggcacgttgtttcttgatgagataggcaacctgagctatgcgttgcaggcaaagctgctcacggccttgcagcgcaggagcatcgtgcgtgtgggaggcagcgagcagattcccatcgacgtgcgactgatttgtgccaccaaccgagacctacaagcaatggtgaccaacggcgagtttcgcgaagacttgctctaccgcgtcaacaccattcacctgcatctgccgcctttgcgcgagcgcaaagaagacatcacagccttggccggcatcttcctcaaacgctacgcgacgatgtacaacaagccagagacaagattctcggccggcgccatgaccaagctcgaagagcaaccttggtacggtaacattcgcgaactgcaacatgccatggagaaagcggttatcctgtgcagcggcgcgacgattgccgaggacgacattgagagcggttctacccgacaggagaaaccaattgaggacgtgcgcacgctcgacgagatggaacgaaggctcatcgagaaaaccatccgtgaatgcgatggcaatctctcacaggtggcgttcaggttaggcatctcacgacagactttatacaacaaaattaaacgttacggattataggccatgaacgtgattgtcatcatactctgtctggcactacttaccgccatcgttgcctatctgcaactgtggcgacggtatcggcgcgaccttggcaaagtgacgttcatgttcaacgccatagatatcggcgactatactttccagtttcccgtcaacaagaaatacggcagcgagcttttgctcaacgagtcgctcaaccgcgtgaaggaaattttacaacacgcccgggatgaacagatagaacgggaaaaatacttcgaactcatactcgattcggtagatacgggcatcttggtagtcgacgtggagcggggcatcgtactccgcagcaaccgagccgcgctcaacctgttgcagatggaaaccatcacccacatcaatcagatcaaggagaagatggcgggattctctctgcgcgagacccacacaactctcaagagtcgtcgggtgcgcatcatcggcttcagcgacatcaagggcgagctggctaaccaagagatagacagctgggtgaagctcatccgcgtgctcacccacgagattatgaacaccgtcacgccaatcatatccctgagcgacaccctactccaaaactcacagggcgagcaacgtcaggggttagaggtcatcagcagaaccagcaaggaacttatgcgctttgtggagaattaccgcaagttcacacatgtgcccacgcccacacccaccctgttctatgtcagaccgttcctcgagcgcatggtgagcctcattcgcccgatgttaaagcccgatgtgaacgtgagctacgaggtagaacccagcgacttgctggtatatgctgatgagagcctcgtcagcagggtggtcaacaacctactgaaaaacgcttccgaggccatcggagaggaggggcaaatcacactgcgcgcatacaccaacgcgcaggaatccgtcatcatcgacatcaccgacaacggagcgatgattcctgatgacgtggcaagtcacatcttcgtgcccttcttcaccaccaagccgcagggaagcggcattggcctgtctatttcacgacaaattatgcaggcttgcaatggctccatcgaccttgtaaccgacaaggccgccggactgaccaccttccgactgacattcttttaacccaacacaagtcttggatttaccaattaggcggtcatggcgtaggttccaagggctgacaagctgttgtcgttctcaatcatccgcatgactaaaccgtcagattccactccgatttttctttacaaagtgcctctcataactcgcgtgtaaatcaccaacatcaaagttggtcgcaaatacgcgagaaatgagcgatgttttaatttattggcattgaagatgttacgccttaaacaactcttttctttcctgtttttaccatttttttgcgactaacccattgagataagcctgctatttgcatgctttaatgctgctgaagcatgtgaataacacctctaatacatgtttacaagaccgttaaatcaatgtttcaacttgaaaaggcatttattttgtgaaaatcagcccatttttgtatgtcgtttgcctattgattttttctattttgaagattttgaatggtcgttttttggtaaaataataagacaaaaacaacggagactttggacaaaaataatattgataaaaagacgcaactctttcattgaagagggattgttgtacaataaatgatgcaaaagatcaaagattgtttttcacaacaaaactcctttcgtcaatgaaagagctgtgatgaacatagggattcattctccacgagctgccaagccgttttctatgtttcagaaagcagtaccactccctcttgcttctgaccgtccatcaaaatgcgcaatggggcgttaaaccgaacatggcgaacataagtggtttcttcgacagctggcatggcatccaaaacatcttgcctgaacaagccactgccacccacctcatcaatcgtaaaatagcccacaccaaaactggtgaggttttggaagaagtgtgtcccttgacttgggtcgatacggtagttgtttaatgtcgtctcgacaataacctttgcaccgctaatttgtggccactttactggaatgcccaaccaaggatcgctcgagccccagcgtcccggacctatcaacacataaccttgacctcgtgacaagaactgctcattgagcttttctatctcccctacaatcgcaggattgtttttcgctgtgaaagaagcgttggtttttacataaacaacgtcacagacatcgtccatgatgccatgccctaacgagttgtgcgaacgcaacaaacaccgttcatcggcgatggcgacaatatcctcatcgagcatttgcttggtatcgacaatgggacggatttgcaataagtaaaattcccctgtcctatcggcattgatatcacaggcaaactctatttctacggggcaccgcatgctctccgcaccatagttcatcgccatttgcatgatgggtgccaaagggaacacatcgtgttgcagcacattgcagaaagatatcaccttgcgtcctccgtcgtacagtccatccctcattatctggttgtatgggtcgtaagtagacgcaatgtattgcagggagccatctgtctcggcagacttgacacctaacttgaggatattgaaaccatcgtctacctggaaatcctgtcccacgtgagccgtgtcgagggcatagaattgcgtttgggtctcgcgcaacgccttttccagttcactggtttgcaagacatgatgaggatgataaggggacacacgcaaagtttgaccgccatctacgatgtatttacccaatcccaatgccaacgaggcaatgccttcttccgccttttctttgccaatgggataataattcaacgagcgcagcaccccacttatcttgggataatagtgcgtatcatactgcttacccaccacttcttgcaagataaccgccattttttcttgatcgataagattgcgggtagccgtcatgtaagccttggaatcatgatagaacaccgatgcatacacacccttgatggcacaagccaacatttgaagcatcacttgcttgtcatcaatcgagggaatcatgtaagtggaatagattccagcaaagggttgataatgcgagtcttctaacaacgaactggaacgaatggctattggacttttggtggcatcgaaaaacgtgataaagtcgtcgcgcagacgctctggcaacttggcttgcaagaagctgtgcagtatctcttcgtctgtggcgtcgctcaaagcaacgtcataaagattattctcgtccatgaattggtcgaacaaatccgtacaaagcaccagcgtttttgggatttgtaccttcactccttcgtactgattaaagtcggggtgcatcttgatgatatggtctaagaaagcaaggccacgcccttttccgcctaacgaaccttcgccaatacgcgcaaaatgggcatattggtcgaatttcaatcggtcgaacaccgctaccacgcctatgtttttcatcttacgatattgcacaatagcatcgaagatgatttgtcgatgcgcttgcaagtcttgcaatttgtcccaagtgatgtttttaagaaactcggagatgggaaatattgagcgtgcgctaagccaacgactcatgtggttgcgcgagacatggaagcgaaacgaatcatctggtatcttaaaaatattgtcttgcagctccttgagcgaatgcacacgcatgatttcctgacgggtgtgcgggtctctaaagatgaaatcgccaaagcccatgtgctcttcgaagatatgacggaggtctattcccatcatcttcgaattcttgtcgacaaaccggaagccctccctttcggtcttttcccgattgcttgactccgaactttccaccactaaaggcagataagggttgcgcttgcgaatctcacgcaacagtttcaaacccgcttcggggtctttcactccgcctttaggataacgggcatcgctgataacgcctaatatgttgtccgcaaaacgattgtaataatccatcgcttcctcataagttcgcgccaaaactacctttggacgaccacgcatacgcaacgtagcggcatgtcgattcaatgcctcaaaggacaaatgcttgttctgcaccaatatgtaactgtacagattgggcagtatggaactgtaaaaacgaatgctgtcctccaccagcaatatcatttgcacgcccccttcggtgatatcatgctctaagttcatcttgtcttccatcagcttgatgatggacataatgagattcgtgttgcccaaccaacaaaagacataatcgaaaatgctcaggtcttcgttctccatcctacgggtaatgccgtgcgagaaaggcgtgagaacaatgcaatgaatatcaggaaaggcgtctttaatgttgtgcgccacggtaaaagcgtcattgtcagcggttcctggcatacatatcaccaagtctatcggtgtggactgaagtatgcgggtagcctcttccgtggtgcttacttgtgtaaaggtgggcggatagcgtaagcccaattccatatactcgttgaaaattttctcctctacccgaccgtcatcttccaacatgaaggcgtcataggggttggcaacgattaagacattataaatacgcctcatcatgaggttgacaaaagtcacatccttcaataagaaattacgccattgagaaggcacagaatcgctcataattgttttttcaagaagtaagaactaaccaaatgaaagaggtttccaaaatacaggtccgtctttgattggacaatatcgacacgacaaatgtagaaaaaacaaagtatattcacaaatatccaacgaactttcgtctttccctcataaagatatataataaggtgtaagctcatgagttttcacatttataaacattgaaattagaatttatccttttatatttggtggttatttataaaaaaactatatttgccacgtcttggataatatccgtgacaagtataaccaactaattaaataaattctactatggaaattgacaaaatcatgcaagacctggagaaaaaacatccaggcgaatccgagtatttacaagctgtcaaagaggtgcttatatccgtaaaggacgtgtacaacgagcatcctgaatttgaaaaagcaaaaattatagagcgcattgttgagccagagcgcatcattatgttccgtgtaccatgggtagacgaccaaggagaagtacatgttaacattggttaccgcgtacaattcaacggcgccattggcccgtacaaaggcggattgcgtttccacccatctgtgaacttatctattatgaagttcttgggctttgaacaaaccttcaaaaacgcattgactacattgcctatgggtggtgccaaaggtggttccgacttctctattcgtggaagaagcgatgcagaagtaatgagattctgccaatctttcatgtctgaactttacaaatatattggcccgagcactgacgttcctgctggtgatattggtgttggcggacgtgaaattggttatttgtttggccagtacaagaagttagtaggtcgctgggaaggcgttcttacaggtaaaggcttgcaatatggtggttcacgcattcgtccagaggcaacaggctttggcgcattgtactttgtgaaccaaatgttgcagacacgcaatattgacatcaagggcaagacagtagctatcagtggcttcggaaatgttgcatggggtgctgctctcaaagctacagaattgggaggaaaggtgattaccattagtggtcctgacggttacatctacgatccaaatggcatcagtggcgaaaagattgcttatatgctcgaattacgtgccagcggtaatgacatttgcaaaccttacgcagataagttcaaaggctctgaattccatgaaggcaagaaaccttgggaacaaaaagctgatatttacttgacctgtgctactcaaaatgaattgaacggtgaagatgctgataagatcttagctcacaaacctctctgtgttgcagaagtaagtaacatgggatgtaccgctgaggctgttgacaagttcgttgcagcagaacaactctttgcaccgggtaaagctgtcaatgctggtggtgttgctacctctggtttggagatgactcaaaactctatccgactcacttggagcgaggcagaagtagacgagaagttgcactacatcatgcactctatccacgaacagtgcgtgaagtatggcacagagtctaatggatatatcaattatgtcaagggagccaacgttgctggattcatgaaagtggcacaagcaatgctggaacaaggcgtagtataaacgaaaatacatcatagtgatatttcacaaaaaaagtattttattgttaaacataatggtaagctttacctttctgatggctcaaacccagaaaggtaaagctactttttattctaagcgatccacaggagcacgtacagccagcggggaaagagttcaccatgatagtatgacgtgcgctcatcgcacctatccgtttggaacattattaagagttacaaatccacgtaacaagaaagacgtcatcgtcaaagtaacggatcgtggtccgttcgtaagaggaagaatcattgatttatcgtacggagcagcaaaagaacttgatattataggacaaggtgttgcgatggttactgtacaacgtatagattcagcagatatcatcagagttccttaccgttccaaagataaaagagaattcccagaattggagtttggcatctccagtggtaaagatagctttattgatgcatggacccgacaacagtctatcaatgcaagtaaaacaaaatcacagctgacaaaacagcgaaatcaatctgccatagaagacaaaaagaagcaaaagcaaccgtctaacacgaagataaaaaagaaataatgaccagctttcacgacaatagaacatctttttcaattattttctgtacctttgtcgcattcttttaaatagaaaatatgagcaacaacttattatcaggaaagagaggtatcgtatttggtgccctcaacgaacagtcaattgcgtggaaagtggctgagagagccgtagaagaaggtgcgaagattacactttcaaacacgcctgtggcagtaagaatgggtacggtaagtgcgttatctgaaaaacttcattgtgaagtgatacccgcagatgccaccaatgtagaagacttagagaatgtgttcaagcagtccgtggagattctgggaggtaaaatagattttgtattgcactctattggtatgtcacccaatgttcgtaagcatcgtacttatgacgatttagattataagatgctggacacgacattagacgtgtcagccgtttcattccataaaatgatacagtgcgccaagaaacttgatgccattaatgaatatgggtctattgtcgccctcacttatgtagccgcacaacgtactttctatggctacaatgacatggcagatgccaaggctttgttggaaagtatcgcacgtagctttggctatatctacggacgagagaaacatgtacgtatcaacaccatctcacaatcacctaccctcaccactgctggacagggcataaaaggcatggataagctcttcgactttgctaaccgcatgtctccactgggcaatgcctctgccgatgaatgcgccaactattgcatcgtgatgttctctgacctcactaagaaggtcaccatgcagaacctttatcacgatggtggcttctctaacgtgggaatgagcctgcgcgccatggccacttacgagaaaggattggatgaatataaagacgaaaatggaaaaattatctacggataaacacatgataaccatcaacagcaagggcgacgctaccaatgtaacgtcgcccctttttatttcttcaactaaaagagcaagctatgaactgtccaaaaccgtttacttgccttgataagtacccataaaaaagatggtacccgtactgtgttcagcaatggcatacatgaaaggacggtcggcatggaacataatgggcttagaaggtggtgcagcagtttcaagtgtctcaaccaccgtgacggctgctgcctttgagccttcctcatcaacctcaatctttgccttctgcaaaaccatggaaacgaaggaacttacggctgacatcttggtgagattagcttttgatgggtcaaacattgcgttcattcctaacagcttcaacacatcattcagttcacgattgtacacggatgtaaagcgtggaagcttcaaatcaacctcactgctatacgtgtttttcaaattatccttccattgcttgccgttcatggcaactaacacatccgacagtttctttccctcacgaggcaaaaccacaatcatttcatacgatccattgccgtaaggaagcaccacagtctggtagttgtcgttctcagcagcaaagaatcgctctttctgatgcatcatctgcacctgtgacttcgtcccatcagctttcgtaaatgcttctttctttgtgtgtttcttatcaaactgccgataccaaatgcctttgaagtaaagagcgttgagcagataagagactccatctggatttatccgttcgagtatcttaggcaccataccctgcgtatgatcactcgcccactggttaatgaacgataatgtggcaggcgaaccaaaatccttactggcgacaagtgcatcatattgctttttcactacgctttgaaaagtaggttgcagctgtatcttcttgttcacaaccacagcattcgccatggagagttgggtagacttgtccaactttggcgattctatcatgagttgatgacaaagagaattgatgtcttgcaccttgcctgaacggaactcaagaccctccaagatttctttctgcgtatctcctaccgccccattggcaagcatgccgagcgcataggtcacactcaacggcgaaacaaacacatcttgctgctcacctttgctcacttctttaaagaatttccaagcaaactcattgctgttttctacttgcgcttgctgcgctgctgttagtttcacggttcccggattatacttcacgttaggtgtaacaggttcgtcttcactacacgatgtcagcatgccaaccgataaacaacatgcaccaattaaaggaaaaaaatgtttcatcatatctattttgttttagttatctactcatagaatgacgaaaacattgaaatcttgcaccgatttacaatttatttttattttttatcccaacagctgcttgacttgaggcattacagaagaacgttcgtagatgtgcaagccaaactctgatgccatggtgtacgcccactccatgatttctgccaagttatgttcatagacaatccattccttgttgctcaggaagaaataaaactcgatgggcaagcctgtgttcgtagcctccaactgacgtaccatacaagtaaaatccgtattgatctcgggcgactttctgagccaattttccatgtacttgcgatacaatcccaagtttgtgaggtcacctttcatttcctgcatcgtcagaaatcccttttcctgacacatatccttcagctcctgcgttgctggtttgatagataggaaatcgaaataaaccaatcgtttcacacgtcttccaccactttcctgcatgcctttccagttttggaacgacccatcaaccaacgtctttggcgacaccgtcacaatggtattatcaaaattctgcacctttaccgtggtgagcgtcatctccatcacctcaccatccacggttgtcgatggcactgtaatccaatctccacgccgaatcatgtcgttactggtaagacggatgcctgccaccaacccctcgatggtgtccttgaacaccaacatcagcacggcagaggtagctcccagtccggcaaacagcttcataggactcttgtctatcaccaaggcaaccaccacgatgacgccgatgaagatagcaacaatcttcagtacgccacaaaacgactgcaaatattgctgtctactcgaactttcggctgtctcaagatgacgaaaagaattgataatggcaatcgccaattgcaccgaagctacagtgatatagatgctggtgagccggttgagcatctcttgcacaaacggtgcctcatagaacaccaacggcaagagtttgtaaatgactatcgcaggaacgatagcgcaaaccttgagcagcacatcgcggttgaacagcacgtcatcccacgtggctttagtccgtgcagtgagcctattgatgattggaatcagcagtttcttggcgataatatagctaagccaagaaaagaaaatggctgccaacgacattgacacataccgcactacgggcactgccacacctgtaattccacacatctgaatcaatttctcaacgacaatgcgtacttgctccattgtttctgttatatcccacatgattttattgtttattcatgaataattattgttagttttctcttaaggcaaacacaaggcttgacatattttgtcctgaaacctacgggcattctttccgtgcatcaccccctgattgataatagcaaagcacaacaaatgtccgttcggagcctgacaataacctgccaaactactcactcctgtcaccgttcctgtctttgcccacaccttgccacgggtgtcagcatccctcattcggtcgctcaacgtcccatctactcctgccacaggaagtgttggttgcaagtggttataaatacgaggttggcgatgcgcatatttcaagaattctattaacaattctgcactcaggtaattgtataacgaaagtccgctaccatcggcaattttgtaagtcgaaggatttaaccccaccttttttatcaatcgtttgacgacattgcttgcatctttcgctgtccttctttgttggcgttctccccctggtaactgatagaacaaagcctccgcacaaaggttgtcactctttttcaccataggcagcaacacctgatcgatggtatgtgttcgcaagcaaaggcgttgcgcattcgcaggacatgagcctgtagtactaaaagcctctacttgtatgcctgagtctcgcaacctacgttcaagctctgccatgaaatggtctttacggcgatacagtaggggcgacaacacggggttgtcatcatcccaacaccaaccttcgcccaacaagttaaggtccttcattcccttgtctgcatacagtgtaccccgaatggtgtcaataccaagttcctgcacgcaggttgcaaaggcttgcatatcctctttatcgaacaaagggtcaaagcctccaacacaatagatatcacctttcagcgtccgattttcaatgtttcctgtataataaagctccgttttaagctcataatcaccccccaactgttccaaggctgcaatggctgttatgagtttcatcgtactggcaggtcgcaaatgttgccgctcgttgtacttataaagcacactgtcggctgttaggtcatataccgctaaacctaattgcgaggtctcaagcaacttgctttgcaacaattgctccaaccttatctgcactttctgttgccaagtaatggttggcgcaacaacagatgccgtatccactggcactgatatcagtgtcaacgaatctgtgggcgttatctgatgtgttatttctgtttgtgctggagctggttgccataaacccaagactgccaaacacagtaaattcttaattatcttcatgaatgtttatgtgcaaaagacgcatcctctgcttgctgtcgcttcatcaattcgtccataaaagcctgctcttgttgtggctgaacggcaatcaacctatctgcaccatacttgatgagtaggtaatgcgaaagcccgaaattgtttcgcataggtacacatttcacgacatcacataaagcaatttgttgctttgtcgaaaaacgacctttattgatgagcaaaaattccatttcttcatccctatcaatgggtttgatacgtataaaggtgtaggtggtatgtaatatacgctctatcattccaacaataacaatgacgacaaagagtcccaataaggcctgctttatccaaaacaaataaatgaccaacagggaaaacagcactaatccacacagggaacccaaagttaatcgatgatgaaatgtgcgttgcgacatatcttgttacggttttataatactcatcttgctactgcctgctgtgctcaatagctgtgatacaaggttgaatcaacgaagccaagcagaataaatggagagttatttgttgcaaatttacaaaattatttatggttgagtgcttcttgccggtactttatgatactttcacaaacatagatttttattcatggtacggattttgaatcaaatcatgaagaaaaacaccattgaacgacaacgataattgtcaaaaaaaatggcaattttttaacacttctcaattcctcattctagcaaaaaaatgacgtttgtaaactcgagaaacaacgataattggtgtgtgaaacgtgggttttagtgaaaactcaatgggttaagcccgctatctacaacgaataagcggcttatttgcacgcattaagggtgcaatctccatgggttaacagccaaaataatgcgaaaaaagggcattaaaacgaggggaaaatcacaaaacaaactgatttacagaaaattaccaacattcgtcatttctcgcgtatttacgcacgaacacacttgtcttcgcaaatatgcgagctatggaagagtgtttgtcaagaaaattcacattttttatcgggtcagactgaacttcaaactgatgccaaaatcgtgcgtcgtggtgggataactattgctcgaaagcagcggattgttgacttgctgatcataatacatcgtcatcgtcatgagcttagacaaattataatcggcagagaactggaacttaaaagctgtatttccgcccgttgccatacttgtcatagtsgcaataycmcgmcymmyacttsccysycsscsmymmcymmcmccccccccccccccccccccccccccccccccccccccccccccccccccccccccccccccccccccccccccccccccccccccccccccccccccccccccccccccccccc

SEQ ID NO: 116 - DNA, 293277 bp, Prevotella timonensis
  source 1..293277: mol_type = genomic DNA
ttggtttggakwwkagtakaarrgraagcggcaaggctgaaactggctaagtggtttaacgaggtagagaagttgggggtggacaacttctatacggtgattgacacctttaagaaccattatgataccatactcaatttctttgtcaacagagccacaaatgccaatgctgaatccttcaacgcaaaagtcaaagccttcagggcacagttcaggggagtaacggatattcctttcttcctttacaggcttatgaaattatgtgcatgagaggaggggtgcaactgggttttacgactgacccgcaataacgagccaatgataggacggatttgccgcaacagcattttgcgagatttcacgacacgtccgtgtcattccgtattcttccgttgcgatgatgaaaaatatgtttccttttcatcacaccagccgtctgatgtgctgcattcctctcaagttcgtcggcagattgcgtgcattttcttgttgcgttgattcaaattattgacttcattcgatgttcaacaacactgcttttcaatgaaaaagccgtgctgctgcatctgtatttttgtaaatttatttcgtaatttcaaatttttattttagaaaaatattcgttgtcagatagccatcatgtattcttaccataatattttgaattgtagtttctttgtttaattgttaatattatataaatataagccctttgagaatatgtttccttgtaattttaagaataataagttatatttgtggcatgttactaaaaatattaggggtcgtgtgatagctttttatacatatctttttcgttgtaaatattctctgttgtatttatagagaaaaatcggaagaacactggttttgagtctaaaagcaatattttatataaagtaaatttcatttacaacctttctttaaggttagaaaaattttaatataactaatacaaatgcttatgaaaaaagtttatatttttttgcaaatggcattcatatctttgctacttttcaattgtagtaatgatgatgaaaatttactttctaaaagagttcctaaagaagaattatttgcagttgaaagtaaacctcttacacgagctaatgccaataagtatctttttacaattgaaaatatcaagtcttttaatctaaagacacgtgagatagtatttgtggattttgaaccaaaaacagagcttttcccaatttatcacaatattgagatacactcatacaataaggtcttgctccatattgcaacattcgtgtcatcttatgatagtcaaatcttcactgatttatctttagtttcggaaaacaataaattttatctcagcaattgttaccctcgtaatttagagaacaatgataaatatgccaaagaaaatttaggtattaaaaattctatatataaacgaagagaagagtggaaagaatttctctcaattattaagaaacatggaaagttaattgagtgacattagatactaaaagtcaaatagccctatttagaatctcaaacaaaattttgaagtattactgcacttagatacagattgtttatgaagcaataatgtgccaatgatatgcggatttactgcaacagcattttgcgagatttcacggcacgtccgtgtcgatccgtgttcttccgttgcgatgatgaaaaatatgttttccgtttcatcacaccagccgtctgatgcgctgcattcctctcaagtctgttggcagagtgggttcattgttttgttgcgttgattcgtttcattgacttcattcgatgttcaacaacactgcttttcaatgaaaaagccgtgctgctgcatccgtatttttgtaagtttatttcgtaatttcaaattttcattttagaaaaatattcgttgtcagatagtcgtttttgccttgttttttgggtggaatttcctcatctcattgagttaagccgtctatttaccgcaaattgtggttaaaaagcatgcaaattcttgccttattcccatgtttcaacggtgtcaaagcaatgagatagtgggttcattacaggtggtgtagtagttaatcagttcattcacaagtgtttgcaaaatttgcatatttgcgcacagtcctgcgcttggtcgaaaatatgcgagtattgagaggggttgttaaattttttcacacttttacacaccgacagatgtttgtgcaaatggtcattggaacgaagcagtaggaatatttttcgggttatccttttgagtgatgacggggcgaagccccaataggtatatagcccagggtaacaccctgggggtcagtgaactaagtaatttgcgctctgaaagagcagcaggaggcagttcactggcaattctccccattccttttgctctttcagagcgcagaatagctatccaattcctccccaggtcgttgccctggctgtattcctattgggctttcagcccgctatttcagcccgatggatagtttcaaaaaatagaggaacactattaccgtggatggaaaaaaatttctgtttcgttcgtgtttttcgttgtaaaacatcattcttcgatgaaggaattgtgggacggaaaaaagaagcaacgatatttagcatactttacacgtattttttttgtaggttgctgctttttttatatttttaccacatcaaatgaaaaacaacttaaacctaatcatattaaaaatgacacaaaaacaacaaatcgtagagtgcgtccctaattttagcgagggtcgcaacatgcatgtaatcaagcaaattacagatgagattgagcgcgtgaagggtgttaaacttttagatgtagacccgggtgaggctaccaatagaacggtggtgacgtttgtcggttcgcccgataatgtattagaagctgcattccaagccgtgaaaaaggcagcccagctcattgatatgcgcaatcaccatggagcgcatccacgaatgggtgccacagatgtttgtccactcatcccagtggctggcattacattggaagaatgtgcaaaactcgcacagcagttggcagagcgaatcgccaacgaactcaacgtaccttgttattgttacgaggctgcagcacggacgcccgagcgtaagaacttggctgtttgtcgtgcaggagaatacgaggcgctgccagagaagatgaatgaccctgctaaggcacccgactttggggctcgcccctttgacgaaggtgtggcacgcacaggatgtactgccgttggcgcacgtgactttctgattgctaccaacttcaacctcaatacaacctctacacgtcgcgccaacgccattgcatttgacgtgcgtgagaagggacgtccacgccgtgagggcaactctcctgtgggtaagcccatgaaggatgagcagggcaaaaccatcatgataccgggtaccttgaaaggaacaaaggcgatagggtggtatattgatgaatacgccattgcgcaagtgtctatgaatatcacggatatcaacgccactccattgcacgttgcctttgatgaggtttgccgttgtgcgcagaaccgaggcatccgtgtcacgggaacggagatcgtaggactggttcctaagcgaacattgatagatgcaggcaagtacttcttgcggaaacagaaccgctctactggtattccagaagaagatatcttgaccatcgctatcaagtcgttgggattagacgacctcaaaccattcaatcctcgtgagaaggtcattgaatacctgttggaggacgataacaagaaagccaaactgatagaccttaccgtgaaggagtttgccgatgagacttcgcgcgagtctcccgctcccggtggtggaaccatctccgcttatatgggtgcattaggtgctaccttaggaacgatggttgccaacctgtcaagtcacaaggcaggatgggatgatcgttgggaagagttcagcaactgggcagacaaaggacaggaaatcaaggtagagctgatgcaccttgtcgacgaggataccgaggctttcaaccgcatcatggctgcctttggcttgcctaagaagacggacgaggacaaagctgcccgttccgcagcaattcaagacgcgaccctttatgccacacaggtacctctgcacaccatgaaggcagcctataaagtgtttgaactctgtaaggcgatggcacaagaaggcaaccccaacagcgtttcggatgctggtgtgggcgtgttggctgcccgtgctgccgttttgggagcaggactcaatgtcaagattaacgcctctggactgaaaaatcgtgaggtagccgaccagttggtgggggaggctaaccaactcattgacaaggcaaaccaagccgaagtagagattatgaaaatagtagaaagtaaattataagaccttaaagataaagaaaatgacgcacgaagaattcatggcggacattcgggcaggtattcctaacaccttacccgatccacaaccgtatgaccatacggtgaaccatgcacctaagagaaaagacattcttacaccagaagaaaagaagttggcattgcgcaacgcactgcgttacttcccaaagaagtttcatgccacattggcaccagagtttttggacgagttgaagacttatggacgtatctatatgtatcgcttccgtcctacgtatgatatgcacgctcgtcccattgacgaatatccacacaaatgcaagcaggctgccgctatcatgatgatgatacaaaacaacttggatagggcagtagcgcaacatccacacgaactgattacctacggaggcaacggtgccgtgttccaaaactgggcgcagtatcgacttgtgatgaagtatctcagcgagatgacagacgagcaaacattggtgatgtactctggtcatccgcttggtttgttcccttcgcataaggatgcaccacgggtggtggtgacgaacggtatggtgattcccaattactctaagcaggacgattgggagagagacaatgcactcggtgtgagtcagtacggacagatgaccgcaggctcgtatatgtatattggtccacagggaattgtgcatggcactaccattactgtgctcaatgcggcacgcaaggtaggtggcgacaacatgaaactgtttgtcacggcaggtcttggtggcatgtcgggcgcacaaccaaaggctggcaacatcgctggtgtggtgagtgtgactgctgaaatcaaccccttggctgctaacaaacgttacgaacaaggatgggtagatgagctacacgacaaccttgacgaactgatacctgctatccgaaaagctgtcgaagagaagcgtgtggtgtccatggcgtatgtgggtaacatcgttgacctgtgggaacgccttgccgaagagaacatccgtgtggacttgggtagcgaccaaacgtctttgcacaacccttgggcaggtggttattatccagtaggcatgagcttggaggagtctaatcgcatgatggcagaagctcccgagcaattcaaggaaaaggttcgggcgtcattgcgccgacaggtagacgccatcaacaagctcaccgcaaagggaatgtacttcttcgattacggcaatgccttcctcttggaggcaagtcgtgcaggtgctgacatccttcgtgaggacggtaagttccgctatccttcgtatgtgcaggatatcatgggaccgatgttcttcgattatggtttcggtccattccgttgggtgtgctcatcgtgcgacccgaaggatttggaggtgaccgaccgcttggcaactgaagtgctggaagaaatgaggaaaactgccacaaaagatattatcggtcagttggatgacaacatccactggattaaggaagctggcaagaatcatttggttgtaggctctcaggctcgcatcctctatgctgacagtgtgggcagaaccaagatagcgttggcattcaacgaggcagtgcgcaaaggcgaaatcagtcagcccgttgtccttggtcgtgatcatcacgatgtctctggtacggactctcctttccgtgaaaccagtaatatctacgacggttcgcaattctgtgccgacatggccattcagaatgtcatcggcgatgctttccgtggtgccacatgggtgtctattcacaacggtggcggcgtaggctggggcgaagtcatcaatggaggcttcggtatggtagttgatggcagcgaagatgcgaatcgccacatccgcgagatgcttctgtgggatgtcaacaacggtatcgcacgccgtagctgggctcgcaacaagggttctatcgatgccattaagcgtgaaatggaacgcactcccggcttgaaggtaaccttacccaacttcgtggatgatagcgaaatagagaaacttaacttctaaatcaacgtccagtcgcaatgcttcacgctaaacacttctttgagcgagaggcgttgcgacttggcacattaacaatcacactatgatacacaaaattagcgcagcacacctcacgattgaggaggtgggagcgattttagaaaaccatgctactttagaattatctgatgacgcacgtcaacgaattgtgcgctgtcgcaaatatttagacaagaaaattgccgagtcggacgttcctatttatggcgtcaccacaggtttcggttctttgtgcaacgtgtcggtagacaaagacaggttagctcagttgcaagttaacctcatcatgtcgcacgcttgtggcgtgggcagcagggtgccaaatgacattgtaaagattatgctcttcctcaaagcgcagtctttgagttatggctattctggctgtcaggtagagacagttgagcgattgatcgacttcttcaacaatgatatttatcccgtggtctatacacaaggctcactgggcgcatcgggcgacctcgttccgttggctcacctttgcttgccactgttaggaatgggcgaggtagagtataaaggtgaacggatgagcggcgaggcgatattgcaaaagatgaattggaaacccatacagttagcttccaaagaaggacttgccctgctcaatggtacgcagaacatgaacgcttatgccgtttgggcagtgttgcagagcgagcgtctctgtgattgggcagacaagattggcgtaatgtcattggaagcctacgacggacgtattgaaccgttcacacatgccgtgcatgctgtccgtccacacaagggacagatagacaccgctgcacatattcgagaactgttagagggcagcgaactcatcaagcaacctaaggtgaatgtgcaagatccttattcgttccgttgtatgccacaggtgcatggcgcatcgaaagacacgttggcttatgtgcgatcggtcattgaaatagagttgaatgcggcaaccgacaacccaactgtttgtcctgacgacgatttggtgatttctgcaggcaacttccatggcgaacctatcgcccaacctatggactttttggcaattgcactgtgtgaattgagcaacatctccgagcgacgaatctataagttgatttcaggtacgcgcaatctgcccagcttcttagtggcaaagcctggtcttaacagtgggttcatgataccgcaatatgccgctgcgtctattgtcagtcaaagcaagatgtacagcacgccagcttcggtcgacagcattccgtcgtcgcaggggcaggaagaccatgtaagtatgggtgccaatgcagccacgaagttgtatcaggtagtgctcaacactgagcgagtgttggctatcgagctgttcaatgcagcccaagcactcgagttccgtcgcccattgaagtcgtcaccagccattgaggctatctatgcggcttatcgcaaggtggtaccattcatcgaaaacgatgagtttatgtcaccacacattgcgcaatcggtagaatttttaaggaaataaatcatcaatcccactctcttcggacaggaggagtgggattttcattttgttacatgatatgaaacttttagtaaccaacatcgcttttctggcaggcatccaacccacagacaagctacgactggagggtaaggagatggcgcagctcgaaacgattgcgaatgcctttctctatgttgaggacgggcgcatccattcgtatggtgccatgagcgatttagcgacctgcagccttccttctgatgtacagcagatagatgccaaaggaggaagtgtgctgccctcgtggtgcgattcgcacacccacattgtcttcgcagggagtcgtgagcaggagtttgtggacaagatacgtggcttgagctatgccgaaattgccaaacgcggcggtggcatcctcaattctgccgacaagttgcacgacatgtctgaagacgaactgtaccaacaggcgatgcgtcgtgtagacgaagtcatccgaaagggaacgggatgtatagaaatcaagagtggatacggtttgaacaccgctgacgaactaaagatgttacgcgtcatcaaacgcatcaaagagaggacatcgctcaaggtggttgccactttcttgggtgcgcatgccgtttcacgcgaatatgcaggcagacaaagtgaatatgtcgatttggtgattcgtgagatgattcccgctgtagccaaagaaaacttggcagaatatattgatgtgttctgcgatacgggcttctttacgcccgaagagaccgcacgcatccttgaagctggggcaaaatatggcatgcgaggcaagatacatgccgacgaattggcgtcctctggtggggtagaggtaggagttagacacaatgccctatcggtagaccatctcgagagtatgaccgcagaaacgatagagacactacgtggcagcgaaaccatgccaaccgctcttcctggtacatcgttcttcctgaacatgccgtttgcgttggggcgcaaagtcatagacgagggattgcctttagcggtggcaagcgactacaatccaggctcgacaccatcgggagacatgaagtttgttatttcgctggcgtgcatcaagatgcgtctcttgccagcagaagccatcaatgctggtaccatgaacagtgcttatgccatgggattgagcaaggattacggttcaatcacgaagggaaaggttgcgaatttttacatcacaaagcctatcccatcggttgactttattccttatgcttacaccacgccaattgtggacagaatatttttgcggggcgaggagtatattccacaaacagagttgtagaaaacaggcagatgttctggattcaaaccagttcgtttgctttcttttccgttccctttcttgacgaaaaaacgctcaaccacaataaggttgagcgttttttcgagtgtagggtcgtattattttcgcatctgccggtctctctctttcaatacaccatggcgataagcatcgagcagtgcttccaagtccttgatttgttgtttgagttctgcacctttgtccgtgtctgccaccagcatgcggtgtgcactcatctcaacaatttgcgtcgttccgatgatgtctgtgccttgcaaaatagcatcctcggtattggtaaaaggctcgtgctgtaccaattggaaacctctactatggtacaccaaggtgtagccagcaataccagtctctttgtggtaggcttgtgagaagcctccgtcaatcaccatgagctttccattggctttgataggattctcgccattcatcacatgaacgggtacatgaccgttgatgatgtgtcgattgggatcttttacgtcgaaagcatccaagatttggtccactattgcttcttgattacgcagtttgaagtagttccccttttcttcatggtgcgtttctttgtcggcaatgaaatatcgctcgaaggtggacatcttcgacttgttgaacaaaggactatcgggaccacaccacaggtagaggaaatagtcgatggcatattggtgttcatcgttaggagcgtcatgttggaaggcggtacgtatcatcatacccgtctggtgcatcaattgtcttcccacatatttccgtccgggataaatctctacttcttttaatgagccgtcttcgttgagtgggatagaggcgtgaaacagcaagttgccgttaaagatggcgtacatgcacccatgttgcaaaagcaatcgcatgtgcttgtgcagtttctcgctgaccatgaacgaatggcgaagtcgttgcatcagttccttttcttcgggcgtcaattcgttgggatggtttggatctactgtggggaaataatgatcgtgaagctcatattcttttccgtccaatgtaatagtacccttctcatagttcacaaagttgaagagtgctctgttttgcatcttccactctggatgacgttcatagagttgcgcctcttccttgaactgaataatcgcaattgccttgtgcatgagtgctgtgaggcgcagcgtcttctctgcaacttctttggaacctccactgagtttgggataaaaagcctcgcaagggtcgtctccataggtctccatggcaaaggtagccaatggcactaagttgataccatacccctcttccaaggtagtgaggttggcatatcgcagcgacaagcggatgacattgcagatacacgcattgtttcctgcacatgcccccatccacagcacgtcgtggtttccccactgaatgtcccaactgtggtagtgttccatggtgtccatgatgatgtgtgcacccggtccacggtcgtacacatcgcccaagatgtgcagttggtctatcaccagtcgttgaatgacgtgtgccaaggcaatgataaaatcatcggcacgtccagtagagataatggtctcaaggataacattgtaataagccaccttgttcgtaacgccagcattttcgtgtaagagctcttgaatgatgtaactgaaatctttgggcagtgcttttctcactttcgagcgcgtatatttgctggacacatcacgacacaccattaccaactgatgcagggtaatatgataccaatcataaatatcctgttcggcagccttgaccaattgcaatttctgttcggggtaataaatcagtgtgcataactctcgcttctcactctctcgcaaggtgttgccaaagagttcgctcactttgcgcttgatgttgccagaggcattctttaacacatgctgaaaagcctcgttctcaccgtgaatatctgccaaaaaatgttccgttcccttgggtagatgcagaattgcctgcaagttaatgatttcggtacttgcatcggcgatggtgggaaacgactgtgataataattctaaatatcttaaatcttgtagagtagggtgcttgtattccatttccatttattttatcgtattctgttctgttgtgttgacggcttctcttagccttttggtgtgtttatcatcaaggggatttaatggcatgaacccttctgttatttgtttgtcttcttcaagtagctgaaggatgcgggcagtaaacttttcttcgtgcagtgtaatgagcatttggacaagcatatcctcatcgtagtcaaccgtcatcagcgaagtggctaattgtgccaatgccgcttttgaaatgttacggcggtggtactgatacctgagatataatacttgtgtgcaaaattctttttccaatggggcgtcttcttcgatgatggtcatcttcttggcaatcgcttgccgcatcctttggtcgtgttcaaggatggtctgttcgtagagtgtcaccaactgctcaaggcaatcttggggtgtgatagtggcggtgagaatggggttgggaatcaatgccacgcggtcgctccattgcctttgctggatgctccttcgctcattttctccccataccaatacggtggtggctttctttgttgcatttttttgtgcaagtagctttgtgggactcagtcgaacttcttgtcgatgaaaccaccaaggtgccagttcgcccaaaggagaatagactgtgggtatcagttgtcggtgtgcttgcgtaatgcgcttcgaggtttgggcgttccatgcgccaaaaacatgaatcagttgtggaaactgcgtggacagcgtcatgtcacttcgtgcagcaagtccctcttcgagcaatgtaaaatattgctggtaaagcggctgtttggcaacattgggcggaaaatacaactcgatattcatgtttacagtttatgactggtgaaatcgtaatcatcggctttgcgaaatctttgcctaaacagaaggttacgccacacgatagtaggttcgtaacacagtacttgccatgtagacaagtggggcataaagaatttcaaaggttttgtgatgacccacattctcatgcctatcgtgcagagtaaagcgacggcagcggtcacgatgagcatccagttggattcgctaatggcaattcctaacacgatgaacgtcacgagataagagagataaagcatcacctgatcgaccttatatataaggtgtaagcggaaggagcgttggagtaatgggcgagaggcaagttcgaagagcaactggttgcgccgtttcttttttgtaggaatgtcctctatcatccacgaggcaggttcaatgcatacggtgttggcttggggagcggcaaacttgttgacgatgaagtcgtattccccccgcaacaattgcaggttaccgcgataaccgtcttgggcaatgaacccactcttgcggaacatgaggttgcacgagttggtgcgataggcgatgctgcgatgcgcctgatgcaataaatataaatccgagtaccacctttccagctggtaaagggtgggggcggcagtctcatactggctatatcccacaaccaactgtgccccttgggtgcagtggcgagacatctcaagcaaccaagtgctactggctggctgacaatctgcctctgttaagagtatccattcatacttagcagccttgacacccaacgtaatggcaagtttcttgcgactcatataccgggaagaagtggggacaaaggtggcgtagagatgtgggttattggcaaaacgcttcagcaccatctcggtttcgtggtcgccttgttctgccacaaccaccacctcgaaggcaccttcgtattcttgttccaagagtgcaggcagatgcttcgccaactcttttgcctgttcatgaaccgtcactaagacagtgatgctcgttggttctgctgtttgtatgtcgttggctgtgttgtcattatgctgagacgctgcaacatcctctgccgtctctacgatttcctcctcgtcagacacctcttctgtcgtgatgagtcgacgaagatcacggcgaaaacggaaatacggactgcaaagcggtgctaccaaagccagcaacaggacgaggatgctaatgatgagggttgtttcgttgatactcatgttatatttttctttcctctgatgaaaaatcattgcttaaatatccctgaactaaaggtctgccattgtattgacttgccatactttcaccgtaggctcctgccgaccgaatggctaagatatcgcctctgtgacaggagggtagaagtacaccttgtgccatgacatcgctcgattcacagataggacctaccacatcgtaagtttccagcgctccttgagacgacctgttttctattttgtgatgagcttgatagagtgcaggacgtaacagctcggtcattccagcatctatgatgcaaaactttttgtgttctccttccttgatatagagcactttgcttatcaaactcccacattgggcaacaaccgatcgtcctaattcaaagtgaatggtttgctcttttgtgtagtgtaaatgttgggcaaaggtgtcaaaataggcttggaaatcagggatggcgcaaccatcagggtcgtcatagttcacaccgagtccgcctcccacattgatgtaacgcaaatgaatgtcgtgttggtttaactctgtttgcagctcattgatgcgttgacactcagacacaaagtcgctcatatctgtgatttgggaaccaatatgaaagtgaagacctatgagtgtgatgtgtttgagccgagagcaggcttctatggctgtgttcatctgtgtcaatggaatgccaaacttgttttccgacagtcctgtggtgatgtgagcgtgcgtatgagcacccacattgggattgatgcgcaatgccacacgtgctacttgttgttcttgagtagccagcacgttgataacttctaactcttccaagctctctacatgaatgcaaaaaatgtgctgttgaagtgctaatctgatttcttcatctcgttttcccaccccagcaaacacaatcttattggcaggaaagcctgccttcaaggctgctgcaatctctccaccacttacacagtcggcaccaaaccccgcctgacttatctgttgcagtagttggggatgcgcattggctttcatggcataatgcacttcaaagtgggtatgcttgtccgtctcacgcttcatggcgtccagtgtgcgatgaagcaactgggtgtcgtaataataataaggtgtctgcttggtgtttaagcaggctgcagaaggtaatgcgttcatgttgtgccagtctcctattcaacttcttggtgatgaaagagcatgtcactgagactttgtagtgcttttttcttgtcactggcttttacaaggaacgagatgttataattgctacctccataagatatcatgcgtacagggatgtgtcgcatggcatctaatgctaaggtctcgaaccccacgttactccaagctaagtcgcccaccacgcagatgatgcacatgtctctgtcaacggtgaccgtaccgaacttcatcaggtcattaacaatctcgtccaagtggctgtcgtcgtcaatactcatagacacacccacctcgctggtggcaatcatgtcaataggcgtttgataactttcaaagatttcgaatacctttctcaagaaaccagtggctaataacattctcgatgattttattctaatggcgacaatgttgtctttggcagccaccgccttaatctccccttgtttgatagtattgttaatgagggttccgtcggcatcgggctctaaggtatttttcaaccgcacgggtattcctgcatatttggcaggctgcacacaagtcgggtgtagtatcttggcaccaaaatatgccaactctgcagcctcctcaaagttcagctgttctactgcttcggtgtcgtctaccacgcgagggtcgttgttgtgcatgccatcaatgtcagtccaaatcacgatttcttctgctggtagtgccgctcctatcagtgaagcggtataatcagaaccgcccctaagcaggttatccacctctccataggcgttgcgacaaatgaatccttgggtcaagtagatttgttgctctgggttggcagccatttgttcggcaagtttttctttgatatatggaaggttgggctccccattcttatccgttctcataaagtcgagtgccgacaatagaacggcttttatcccttgttcttgcagataattcaccatcatcgtggtactgatgatttcgccttgcgcaacaatgcacttctcttcaaacgaggtaaacaagtctttggtaaacaatcggaggtagttaaactcttctgccaagaactgttgcgttttctgtttgtacacttccgtgctgtacagctcctcgatatgctcaagatattttctttccaaggcgttgatgacctcgtttgcaccttctggattcttcttatataaatagtctgctatttcaatcagagtgttcgttgtacccgacatggcagagagaaccacaaaggtgggttgtcctgaagtggtaatcagcgttgccacattctttattcttgttggtgagcctacggaagtgccaccgaatttcattactttcatacgtaataactgtttacctgagttcatgtaaaatgtgaataagctactgctgtgtgcgatgcggttatgcctcttgactttcttgcgtgtcctgcaaggcgtctactttcaagtcggacttgttgtaggaactggtaatatcttcaagaagtccgtctttcgcacgatatacaatgccgggatattgatctaacaaggggatgttatgtgtcgacatcacaacggcggtgcccgtgagggtaatctctttcagcagtttcacaatgttgtgtgcggtctctgggtcaagattgcccgtaggttcatctgcgacaatcatcttaggatgattcaggagagcccttgcaatcgcaattcgctgttgctctccgcctgagagttcatggggcatcttatattttttctccgtcatctctacggctgagagcacctcgtctatgcgggcatcaatctctttcttatctttccacccagtggctttgagaacaaatttcaaatttatatagatgtttttgtcgtgcaacagctgaaaatcttggaagatgatgcccatttcgcgtcgcaatccgggtacttgttttcgtttgatatgtatgagatctcgccctaacacttccgctttggttccctcttctgtttggatgtccaactcacaatagatggttttcagcagtgaacttttgccagagcctacttttccgataaggtaaataaattcaccttcctcaacttgaaaatttacatctttcagtactaacgtgtcagcctgatatatttgcaccttttgatagtctactaacatggtcgatagtcttcttttttattattgaatcgtcattctctcttcctcaagagccgaatgtttcactcatgcaaagatactaaattctttcgaatagtcagccatatcggcactgataaatatgaattgcacacagctcttttattgaaaacgtggctctattatataaaaatgacgtattttttctgtcttcggggtaaacgtgagactgcagtaagttaataaatggctcgatatacacttatgaagagtggttattctttcatctggcgactaagttttttgttttatccatatgtttttaattaattccttcaataattattgaattccttgagtaaaatatattatctttgtcatgaaaggcgctttgtactgaaggaatatttaatgatgctttctatctctctttattaaatcaattccctccaagtatttgaaaataattataaacattaaaaatctaaaaagtgaataatataagtttgcagttaggtgtcacccgcattggtgacctcttgttgaagaaccgattcacccaaatgggagagggcgatgctccagaaggtatccaactgagaatacccatctaccaaagaccttataagtggactgcaaagaacgccattcaactgttggatgacatcatcgaggcaaagaacgccaacaaagaggtttatcgtgttgggacacttatccttcaccatgatgacaaaaattattataacattgtagacggacaacaacgcatcatcacttttgcgcttctattaaaatcgcttttccgtgataatctcgaaatttttaaggaagagcttcccaataattcctatacacgtgagaatattgtgaacaacttaagagccttcgaacgtcgtcgggacacaatagcagacgaacatacaaagaccactattgaaactcttcgtgaggatcgaggaataaccgatctcagagagttcgttgaaaatcaatgcgagttgatagttgtcatcactaatgatatttccgaagcttttcagttcttcgattctcaaaatgcgcgtggtaaagaattgtatccacacgacttgttgaaggcctatcatcttagagaaatggaagatgtagaggattacgaaactgaggcgatagtaagacgatgggagaatgccgaccagaaagagcttgccaatttgtttgccgagtatctccatagggtaagggaatgggcgcatggtaatgaagtttggaaactcgacgagcataacatagataaattcaaaggcatcagcaagcgtgacaatctaccttatgcccaattttataagggtgcttatgcctatgcgcagatgatgaataagtcggccataccctttgtttcaggtatgcaggagttgaatccgttcaagatagataccccaattattgctggcaagtcatttttcgactatacgagccattattttgaaatcttgaaagatattcagaataacgacagatacgtgggatatttcatcaacggcaacaaaatcgtagagacattagatttacctaaatacaaaaatggtgtaggaaatagaattgcccgcaaactcttcgatttagctgcactgctttatgttgatcgtttctgtcctgataggccaacgaggcttgatcttgatattttcgagcagtttgtggttatggattttatttgggcctactccttaagagcgcagtatagaaacttaggttgggtgtcggcacaaaactatatttttgggaatggccatgtcaactcattcaatctttacaagtgtatagctgaggctccgacacctacagtactgctcagtgagcttgcagagcgcattcatcctttgccaaagaataaggtgctggcaaaaatagagggatttgatgaacaagacaacaaaggtatctatcaaaattacctacattatttcaaggtaaacaaattttatactgaatagatgacgagccataaaataccgttaaaggaactatctgttgatgagttattcaacagtccggaagaatatagttatgaaattcctatctatcaacgcaattatgcttgggagatagatgaaatcacaacgctagtcactgatgtatgggatgcctgtcagatgaaaaagaaagtctattatattggtactttggtctcctacgtcagaggtaacaacaagtttgaggtaatagacggtcaacaacgtctgacaacgctttacctgatgatgagctttctgaaaagaaatagtattaaaaataaactgacatacagagcccgtcagaagtcgaacgatgccataaaggatttaggcaacgtagacaacagaaatgttgaccaaggtatctataatggttataagtgtgttaagcgagccatcgatgagatagttggcgataaaaataaagaagcatttatcaattatctgctgaatcaagtacacattatccattacaatgttccccgagatgtcgatttgaaccactattttgaagtgatgaactctcgtggtgaacagttagagaaacacgagattgttaaagccaagctgattgcttaccttgaaaagaccgaacgcaataagttcgctgctatttggcaggcatgcagcgagatgaatgtctatgttcaggtgaggattccagaagaaaaggataatcttatttttgagccaagtctaaaaacattcaaatactataatgcgtcgttcgatgatctgcctgaatttgggcaacataatgatttgcacaccttgcaagaatttatcaacggcactactgaaccttcaactgataaagaaagaactggcagaacggagatattccaacccatcatcgactttcccaactttttgcttatagtattgaagattacccggatggagagtcctgatttcgaaccagagaagtttattcttgatgataaggaactgatcaacgcttttgagaacgcacaacctgataaagattttgtcaaacgctttggtttcaatttgctgaaggcaaaatacttacttgataactatgtggttcatcatgttgacgaaatagatatgcctgacagtaacccttggcagttggagcattggcagcacaagggagactcttataattcgaagaatctgtctgacgataatcgcttgcaaaataagttggtgcagctgctctccatgtttgaggtttcatttactccacgccaacgcaagaattatctcttttactcattataccatctttttggcgataatgatttggaacactatgctgacttcttatccaagctggcggataaatatttctttgatatctatcttgaaaaagataaccttaataaaattaatactccgttgccaagagcttttgatactgtgatactcaaggaaggaaagatagatttgcagttaaatcaaaagtcattctatgatattagtatttttggcaatggagataataaaacagaaggaattcctttgtttatgttcaattatttggattacaagttatggaataagtatgctgagacattattaggaatgaatttcaaggaagagcatgcagtgcgtaaagcttttttcaatgaattgggatgctctgattttgggcttaaagaatttgaacaattctatttttccagaactcgacgttcgcttgaacatttctatccacaagctaatgtctctgagataatcgatgaaaataaaatcaattgttttggtaattatgctatgattggtagccaagctaacagttcgggttcgtattggactccaagggcaaagattatccgttatcttgatgaatcagagaaaatatcaagagtgggcgtagcttccttgaagttgagaatcatgatgcaaatgtgccgtgacaacgaccatgatgaccgcagaaaagagggggaggaatgggtctatgaagatatgaaaacgcatcaggaaaaaatgttacggattttaggggtatgccaataacaaattaactttgaaagaacatgattttttttgaatagtatgaatgtttactattcttctcctgcgtgaggtgtgcgaagaattaagcttgttgctccgatagtaaaaagagtaccatcgtagatgatgcgacgctcacgatcgcccaaaatttcattgtgtacaaaggtgccagtgaagctgggaccatcgctcagttcatatttcaaaccgcctcgtttgtctttcgatacctgaatgcggcaatgcgtcatgtcaacgctggggtcggtggtttcgatggggcagttgatatcattgcctttctgataacgtcctatgacgttgatgcccaattggaggggaatgacttgtttataatgaaatacattctctatcaccaccagctctccatagttgactgctgcttgttcttcgtgagtttcgtcttgttgtttgtccttttgtttggacacacctaacttgataccaaactgtttgttgcaggctggacattggaaaaccaacgattgtccatcggtatatttggtttcatcaaaggtaagataatagtcacatttcggacatcgaactctcttcacggtcagtatttctatcgggttgcggttgggtgcttaattttcatgacccatccttctgtaaatgcgggtttgtggcgcaagctgttcaatgctttataggcagcttgttcggtggcatagtgcccaaaaatcactcgggtggtcttggctcttgtgtacacctcagcctctttcattccttgcttctgcaactcttccacgtaagtcgtggcgttgcgaatggtcactctgcttgccaagacaatggtataaaaaggttctgccttctcttctgacgctgcctgttttgcagttgtggatgcagctgcttgcggttgctctgcttttaccacctcttcagcttcctgttttgtaggctgtacatctgtttgctcatttcccgtggttacgtctttcggcataatgcgataaagcagacgggtgttaatcttcccaaacatatcggctgtatttcctgcatcatggagtgtggcaggaaataagaagaaagccaagactgccaaacatgccgcagccagattgcgcagcacactcacttttatttcaatggtgcgactggggcgaacctctgctacttcagtatcagtttgagcctcttcttcggtctcggcagatagtataggatgggtctcaatgggcgcattctttggattggtagacgcctccaactgaggcgcaggggcggttgtgcgaggttgaacacgtcttagcggcgtgatgtctaccgtgcttagtccgtaaagttcgggcgtcaggatgcctgcctcgcagggttgaaacgtatagcttccgtcatgatgatagaaaatagtaccaaggtcggacatttcataggagccttcgtttgccaagtgttgctttacttcgctcacctcgctatcgatacgttgcaatgcttctggatagctgatgtcgtaaacatcgacatacgactgtgccaataacgaatcattcagggtaagttgtggattgaatcctatcgtccgcaatgggggatagtacatttcttgctcctcatcatagtgtgcctcaacatgatgcgtcatgaatccgccaaagttggggacaatcacgcaatcattgttcagcagaagaatctcgatatgtctttctaattcaatcacgtttgcaaatttagcttatttttgcgaatataccaatgaattgtttgaaaaaataaacaacctaaaaattaaacctgcatttgctttgtcattctttcaaataatgttatctttgcttcagattatttgtttcaatacaatatgatgaagtttacagagacccctattcaaggggtttggattatagagccaaaggtatttaacgatgcacgaggctatttttttgaagcttggaaacaagccgaattcaacgcccatataggagaggtcaactttatccaagacaacgagtctcaatcgagttatggtgtgttgcgcggactgcattatcaaaaaggtgcctattcgcaagcaaaacttgttcgagtaattcaaggaagcgtcttggatgttgctgttgaccttcgaaagtcatctcctactttcgggaaacatgtcgctgtagagttgagtgccgataacaaacggcaacttttcatacctcgtgggtttgcccatggtttcttggtgttgagcgaagaagccatttttacatataaggtggataatgtttattcacctcagcacgagactggcattcgttggaacgatgaggatttgaacattcagtggcctttggacccagcttgttttgtcaccagtgagaaggatttgaatgcttgctctttccgagaggcagaagtctttgaggaaatttagtatagttgctgatgatgacaataaaggacgtgacagtgaaaaagctcaaccatagaacattaccgctctctctctttttgtttaccctgctcctcgtattaggaagttgtggctctgaaaagaagaaaaacgtgcaagatgctatccaagaagatgtgcaagcaaagaaactgctgcaaggcatttggctcaatgaagacgaggggagcgtggtgttcaaggtacatggcgacaccatttattatccagactcgaccagtattcctgtgtacttcaaaatagtgcaggattcgttgattttacaaggaaatgctatcacgcaatatgccattgtaaaacaggcaccccatttgtttatattcaaaaatccgtatggcgatgtggttcgattggtgaagagtgatgaccccgaagaccgttatgcttttatgtcaaagcagccagtggcgctcaatcagaacagtttgattaagcgtgataccgtggtgcatgctggcgatgagcgatatcatctgtacgtacaggtgaaccccaccacctataaaattatcaaaaacacctataccgatgaaggggtagaagtggggaacatctactacgacaacattatccacgtgagtgtgttcaatggtgccaaccgaattttttcacgtgactttaggaaacaggattttaagacgttgattccgagcgattattataatcagtgcatcttgtccgattttctttttgacaaaattactgccgatggggtgacctatcgtgcctatttacccataccagattctacgaccagttatgttatcaaagtgttgatttcgtttactggaaagtttgaattaagcatctaatcaatgcctcgaaaatttttacgaggcgttttttagatgctttcgccaaatttcatgcctttaattttcgtctattttccacgtcttgatccttgtgtttcgtaaagaaaaatgacaatttttggcacttttatttttctgaaaatagaattggaaaaggcaattttctgctcgtgtttgcaccattttgtggctaactccgtacaatagatgaggaagtataaagagataagccccttaacccattaggttaagtcgtctaacccatgtgaacaacggggttggaacgtctctttttagttcaaaacaggacttaaagtaatgagataagtaccttataaggtggttggaacgcatggttgcgagcgaagtttctgatagtcagcggattacaaacatacaaaatccagcccatatttgagacctatcccgactttgctcgaaaataatcgagtatttaagcacctactgtaagaaaaattcaaaataaatttaccctaaaacgtcatcgtggcaacacctcaaacggaagtgttgccacgatgtatgtaagattctaaaaagaaagttcttgtagagtttagtctaattgtgctgcgacaaactttcgtaattcatcgcctcgcaaatcctctgccaatacctctcctttggagttgataatcacggtgtgaggaatggagttgacacggaacaggcgtgccgcttcgctgtcccagcccttcaggtcggagagctgcgtccagttcatgtgcaactgctccactgcttccttccatgccgcttcatcattgtctaacgagatgccgacaatacccaatcctttggattgataatcgttgtacacggcaacaacattgggtgcttcgtgcatacatggcccacaccagcttgcccagaagtcgagaatggtgagtttgtttttcgccatttcgtcttggatagcaacaggtttgccgttgatatcgttcatcgtaaaggtaggaatggtgttctccgtgtcctgcttttgctcctgtggagctgctggagccgctggttgttgcttcttctgctgacagctgctcatgatgagccagcctgccagcaccatgattattcctgtgatgggtttcatcagcttcattttattaaataaggtattgtgaagagatactctcgttgtgaataacacgacgtatggtctcggcaaacatgtctgctacagagagttgcttaatctttgcgcaacgttgggtgtagggaatggagtcggtgaagacaatctcttcgatagacgactgttgcacacgttcattggctggtccactcatcacacagtgtgatgccatggcacgaacgctgagtgcacccgcagccttcattacgtcggcagccttggtgatggtacccgctgtatctaccatgtcatcgatgagcaccacattcttgccatttacgtcgccaataatctgcatgctctctacttcgttggctctcgcacgtgtcttattgcacaatacgagtgggcaacctaaatatttggcgtaggtgttggcacgttttgagccgcctacatcgggcgaggcaatgaccaaattgtcgagtttgagactctgtaaataggggaggataacgcccgatgcgtagaggtgatcaacgggaacgttgaagaatccttgaatctggtcagcatgcaagtccatggtgatgagcctgtcgatgcctgcacagcttaagagatctgccaccaacttagccccgatgcttactctcggtttgtctttgcggtcttgtcgtgcccaaccaaagtatggaattactgcaatgatgtgacgagccgaagcgcgcttggcagcatcaatcatcaaaaggagttccattaagttgtctgaatttgggaaagtgctttgcaccaagaacacattcttgccacgaatcgattcttcgtaggatacggcaaactcaccatccgagaacttggtcatcaccatatttcccaatgggcatcccaaacttgcacaaatcttttctgcaagataccttgttttggtacccgagaaaattaaaaaagagtcattgtcactcatttcagtattgcgtttaatatttaatagtgttatgtgtattttagtagattctgctcttcagggctatccaaccgcctttttcagcttttgaaaatgcgcaatgagcgccttgaaatctatttcattgtggatattgaagtgattccacaaatcacctcgaatcaccactccgccaaatccgtattcttttgccaacttgatgttgtccaagtgcatgcctcccaccgcaaaaacatggcggtcgatgagtcctttcttggcggcttcttctatttgcagcaggttgaaagaggctttctgtgtaggatcttcaatgctatcgaaaatcttttccaagaaaacatagtcggctttgcgctttgtttctctcaacaactgtatgtcagagcaactgcgtgtgatgcgacctctaaccccttcggggacaggatcggtgagttgctgaagatgaatgcctgataaattgtattcgtttttaagataataatgttcgtgaacaataatctttttgtggtatctttcgggtaagagcgataacaaacgttccgaatagagcggtgaggaatcgggtttgtgcaagtgtaggctgtccataccctcctcgaagagggctgtcaatattttatcttcttccacaaaaaatgtggatttcgtcatgattacgagcttcatcaccaagtttgtttgatgttgcaaaagtatgaaatttatgtcacatgcgcaattttatccgaaataaaaagctatctttgtgatgaatatgtgcgacagctccctgtatgtcgcctttgccttcggctgtggcatggaggtaaaaccctatttagacacaaaatgagcatgaaaattaattctgtaacatacgaagagatacatcgacctatctatatattagaagaagagaagttaagacgcaacctccaactgattcgacatgtggcaacaacagccgatgtggagattatcttggctttcaaggcttatgccctttggaagacttttcctatctttcgggagtatattcacgccacgacagccagctcgctcaacgaggctttgttgggatttcatgcttttggtgagcctacacatacgtattcgcctgcttataccgacgatgaaatggaggaaattgtgcgttgctcgagtcatgtcacgttcaattctctttcccagtataagcgttttcatgttttggctcgacaggttcagccaaaggttcaattgggtttgcgcatcaatcccgaatattctgaagtgggtacagacctgtataacccctgtgcgcccggtacccgatttggcgttactgctgaccaattgccgctgtctttgcccaacgacctcacgggctttcattgtcactgccattgtgaaagtggggcagacgtgtttcaacgcacgttggcacacatcgaggagaagtttagccactggtttgacgaactgtcgtggattaactttggtggaggacacttgatgactcgtcaagactatgacgtagacttgttgattgccctgctccaagacttcaaacagaggcatccgcatttacaagttatcttggaaccgggcagtgcttttgcgtggcagacgggagtgttggtggcacaggtggttgatgtggtggagaatcatggtattcgtaccgccattgtcaacgtgagttttacgtgccatatgcccgactgtttggagatgccctatcaacctacaatccgaaatgccactactttggcgccaaagtcgcaaaaccatacggagaaaaaacacgtatatagaataggtggcaactcgtgtttgagtggtgatttcatgggcgattggcaatttgaccatgaattgaaagtgagagaaaacctcatttttgaagacatgttgcactatactacggtgaaaaccaatatgtttaacgggattgcccatcccgctattgccctcttaaaggccgatggagcgttgcaaatgctgcgggaatatacttatgacgattatcgcttgcggatggattaagacaaaatttgaggcatttttgaaaaaaaatgatgaattgtttgcgctatcagaaaaaaatattacctttgcacagcatttagggaaatgcccctttagagggatgatgcggcaatagctcagttggtagagcacaaccttgccaaggttggggtcgcgagttcgagtctcgtttgccgctcttttctgaataaaccaaaacggagatacgctttttatctctcacttgcccaggtggcggaattggtagacgcgcacgtttcaggtgcgtgtgtttcacgacgtgcaggttcgagtcctgttctgggcactgttttattcagaaaaaacaagaatggagaggtggcggaattggtagacgcgctactttgagggggtagtgaaaattgtttcgtgggagttcgagtctcctcctcttcactttttgttgttcttacaatacgatgcggcaatagctcagttggtagagcacaaccttgccaaggttggggtcgcgagttcgagtctcgtttgccgctcttttttttagtgaaacatacttatcaatgaatttatacatccgatattttgataaagaagcattagtatataatgttgaagaagctttagattttttacgttccatttctgaaattgatgttgatgctgcgttagagaacgacattcgagactatgtgtcgagtgatgtgttctatcctaaacgttataaggttcgcccgcgtgtctactttataattatcaagacgaccgcagaaaccatgatcgacttcaagcagaaaaaggcgttacatcccaataatgcgccacaaaacgtgatagataagcgcgatttgaccaccaacgtgatgacacgactcaccaaaattcaagaaggttggtacgagggagtgttggattttaagcgagtggtcatgattcctgcaacggggaaacacgaatacagagacacacactttgtggcacgctgcaaggcaaactccggacaggactgttataatcgggttgtggattatttgaaggaaagggtagatgcacgttcacagttcccctcttcaaaaggtaaaagctttcgttttaagtacttaggcatgtggaaataatccgtcgtgctaaaaaaattgtcaagctatgaataaagttatgttgattggtaatgtcggtaaagatcccgatgtgagatattttgaagcagatcaggctgttgcacaaatcacacttgccactacggagcgtggatatacccttcagaatggtacgcaagtgcctgatcatacagattggcacacgattgttttttaccgtgggctggcaaaagtcgtggagaaatacgttcacaaaggcgataaactctatgtagagggtcgcatacgctatcgttcgtacgatgaccaacgaggcatcaagcgctatgttaccgagatattggcggataacatggagatgttaactcctaaaaatgtaacttcttcacaacaaaaaccgtcggaaacgcagacaacggagacgacttctacagctgcggacgatctctcaaaggttcctttctaatttgatatagttttggatttctcctttatcacacaatctttttcagacgtttacctgcaaactccatcggtaggagttatttttgcagctattcttgccgcactcttgctactgttatcgggctttgccagtggttcggaaattgctttttttagtcttacacccacggacatcgcagccttagacagtgagaaaaatgtacgcgatcgtaaaatagagcggttgcgtgaagacagtcagcgcactttggcaaccatattgatagctaacaactttgtcaatgtaaccattatcatgctttgcaactatgtatttgggtcacttgtgcattttggaccatcggcttattggttgcaattcctcatgattacggtgctgttgacattcctgttgttgctttttggcgaaattatgccgaaagtgtatagtcgacaaaatccgctcaagttttgtcgtaggagtgttggtggtattttgatttttcgcaaactcttctggccaattgagaatgtcctgctcagaagtggggtaattgcggagcgtatgctgcaaaaacaaaatcatattttgagcgtaaacgacttagaacaagcgttggaactcacagataaggaagatatcaaagaagaacagagcatgctgaaaggcattatacgctttggagatgagacagcgaaagagattatgacaccacgtcaggacatgctcacgctcgatattaagaccaagtttgcggaggtgttacaatgtattaaagagaataattatagccgaatccctgtttatcaggaaaacaacgacaacatccgaggggtgttgtacattaaagacctgttgccacatcttggcaagccaacaacgtttcgctggcaaagtcttatgagattgccttattacgtgccaggaacgaaaaagattgatgacttgttgcgtgaatttcaggaaaacaaaattcacattgccattgtggtcgatgagtttggtggtaccagtgggttggtaacgatggaggatatcttagaggaaattgtcggagaaatcaatgacgagtacgatgaagacgagaaacctttcaccaaactcaatgagaacacgtatgtttttgaagggaagaccttgctttctgacttctgcaaattgctgtctctcaatgacgatgagtttgaggatgtgcaaggtgacgccgactcattagcaggtttactcttggaaatcaaaggagatttcttgcatttgcatgaacaagtaaactataagaattatactttcgagattcttgagatagaagagcgacgcatcagtaagataaaagtggtgattcatcgtgaacctgttcaaactacagaagaaaactaaagcatggcagtgttgtcaatcataccgcttgctgcagatgttcagttgggtatttggaagatagaagagcctgtaacgacgttgttacagcgttttccacatttggagaaaacggttgaatcctatcactcaatagaaagaaagcgacaaaaacttgcggtctatgcgctcctttacgctatgacaggcaagcaagacgtatggatttcacacgacatgaacggcaagcctttgttggaaaactatcaaattagcatcagtgatacgcacggtttcgctgccattatcctcagcaagtctcgcattgtggctgtagacatcgagtatatgagcgaccgtgtgagtaggattgtctcgcgcttcttacggtctgatgaaagcgcaagcaaggtggaagaacagttgatacattggagcgcgaaagaaacagcattcaaattttattcttcacagcacttgcagtatagcgaaatgcgactacatccttttaccgcaacagcccatggcagggttgaggtagacaacttgaaagccggaaccgtgctcccagtgaactatgtggttacatccgattatgtgctgacgtatgctttggagaaataaactcctgaaaacgaagggcttcgcgtatttctcacatagacagttgcaccttctttagcgcatttgaatgcgtccaacgactactcgcaaatgcccgcttctatccatcgctgtattaacacttcaacatctttgcgtgcagtggaagcgtccacattatattcttccatgagaaggtcgactaagtcgtcaatcgtaaattcacggttttgaatcttctcccatagataggcagccgattcattcatgcctacgatgtgtgtgaaatcaatattttctttaccctctgctgtgaggatttgctctccacatatgttacggagttggaaacctggttttgttctcatattttagttttgcttgttgcttatttaatgatttataatggtccaaaatagtgaacccatattctgtatgctgctaagagatagcgacgaatagggtagagtgccatccatattttcgaataaactctgaacttcagtccattggtggcatcgagttgagtgcgatctttgcgatagaaacccaaaaggaaacccttgagttggtcaacagtacagtgttctacgcctatgtttccatcccctcgcaaggttacttgtgcgccttccatttttatgatacggtggatgacgtaagtccctttttgtacttctgccaagacaacatcgcccactttccatggacgtggtggctttcctatcaatcccctatcgcgttcattttccaaaaaaggccgcatactgtagcctcttaggtcgatagtcacggtatgtccatcttcaatgagtttgataacttctggaataaaggcactgttagcaaggaagagctttgtgggtgatgtctttggttgtacggatggttgcatgaaattgggacgaatagcggagtttgtcaaaatggttcacgctcttattttcgagcaatggcatggttgcatatctctgctgcttccctatttggaagacagtgcagtgtatatatcgatgtcaattcgatgatacgtgtaactgtgttacatacattattattgacatctttgtcccaccgcatgccagagcaggaggggagcaatattgcaaacgcattgatgggcgagagacgttcgacactattggtcaaagccctgtcgatttgggtgattgctcccagcttggctttgatgtttcgataacaaggtgtcttaccactccaaggagttccatagatgaaaacttcatcatcaatgatgcgtatggcaggattgtcatcgttcatcaggtcacaacctttgagatagcgcagccacatgcttacctgtgtgctcttgcctgtgccacttttggcagtgaaggcatagccatagccgttttgtctcaccaatgacgcatgaatcagtaaggtgttgtatttgctggctgcataggcaaaagccatcatgatggcattgttgatgccatatctacgcatgttgtaatgaccattgagggcgcaatcgaacctgtagaaatgcttatctgtctgtaacagacagcagtcacgtttattcgtgttcttgatgatgaattgatagccacctcgcttcagcttttcaacaatggtgtcaccgttgccagtctcaaagtttcttatcaattctttttcctctttcttggcaggtttcaactcgtcattcacataaagctcaaggagtagcggttgatctgcagaaggcttgggacattgaaacggtaaataagagggaattagttggggactattcttctgtgaacattcaaagttgatgctcaaatagtggttggcaatgcaataataatagctttgatatttcatccgtcaaatgagtggttcagtgtgaaagaaagactcaatgatgccactatcgtttcgtgtcatcatcaaaggtcgtgggaaacttgtagagtctccctacttcgtggtttgagttacagcttgtcgtgctgtttctttgcgcttgcgcttggcttctttctttgccttttttgcttctttcttttcggctttcgccttttgtttagctattttgtcccgattcaaatcgctttcttgtggcacgatgcctttgtatagaaagtcttgtaacggtataaatttgatttgatacgtgccttttttctcgtaacgcttacgcatctttagatatttcttctcgatatttttttgctttttggcaaaggtcgtgacgcaagtgggggtagcaattccttttgacttcaagtagttctgaagttgataggagtagttctcacgactaaagagaaaattagatttgccaatataggcagagtcaacatattgtatctctgtgagatacactgtagaatcattaaacgaagtggcaaatccaaagatgtgcgcccccatagggcggttgtctgcatgactattcattgcgaaaagggcggcaatgaataggggtaggagttttctaatgttcattattgttgttacgttgaatgggagcgtgccttctaacattcgccttttagaagtttgttgcatcgctcgagcgtgcctgtctgcctcaaaagggttgttgttttgataaagttttctcgcaagctccgttacttgattatccatctgttgcaggatagcactgacaatccttatcttcctaaatacgatttgagttgtttgttttttgtattcttacgaagttttcgcaatgccttttcccttatttgtcttactcgttcacgtgtgagtccgtagcggtcgccaatttcctcgagagtcatctcgggttggttgatgccatagaagcattcaatcacgttacgttcgcgctcgttcagggtatgcagtgcgtccgcaatctcttttctaagcgattccatcaccaactcattgtccgccatggggatatcgctgtctggcagaacgtctatcagactgttgtcgtcgccatccgagaatggggcgtctaccgagacgtgcttcccattggctttcattgcatcgatgactttgtcctctgggatatcaattctttcggcaatttcactcgaattgggacgtcgctcaaactcttgttcaaatttgttttgtagctgattgattttgttcaccgatccaacctgatttagaggcagtcggacgatgcgactttgctcggcaatggcttgcaaaatgctttgtcgaatccaccaaacagcgtaagagatgaatttgaaacctcgggtctcgtcaaacttctctgcggctttgataagccctaagttgccttcgttgataaggtcgggcaagctaagaccttggttctgatattgtttggcaaccgacaccacaaacctcaagttggctttcgtcagtttgtcaagggcttttctatcgccttttttgatgcgctgtgccaactctatttcttcttcggtcgagagcaagtcctcacgtccaatctcttggagatacttgtccaaggcagcactctctcggttggtaatggattttgtgattttcagttgtctcattttagcctgaaccaatttgatggttgttgcaaatgtaatggtttttgtgtaactgaacaaattttagtcataaaaagtatgttcctcgcacaccaaccttttgcacttgtcctttctttggttttaccgtgtaatctcaccagctatcgaacggttcatttcttggctaatgatttgtgggtcatcgtacttcccttgcaggtacatcagtttggtaatggcagcctctaccgtactgtcgtatccgctaataacaccagcatttttcagttgatagcctgtatcgtagcgcgtcatctctacataacccgagatacactgactgatgttcaccacgatgatgccacggttggacgcttcgcgcagcagttttgtgagtccgtttcgttgaggggcgttcccacttccgtagcttcgcatgatgatgcctcgcaaggtggggacttgcaggataggtttgaagatttcttcttccaagcctgggaacaacgagaacaccattacatgtgaatcgagttgtgtatgtggcaccattggttttgagtagtcgggctttaagatgtgatgttcttgaaaattgaagttcactcctgcattgcacaaatgcggaaagttgaaggattcaaaagcatccaaaccatcggcattctgcttggtacttcggttgcctcgtagtagtctgccgctgaagtatatgcacacctctggcaccatggctgttccgtcttcatgatgtgctgatgccaattcaaggctcgacaacagattttctttcccatccgttcttagttcaccgatgggtagctgacttcctgtaagaatgacgggcttggtaaggttttcgagcatgaacgaaagcgccgaagccgtgtacgacatcgtgtctgtaccatgcaggatgacgaatccgtcatacttgttgtaattttcgctaataatgttaaccaactttgcccacatggtaggatccatgtcactggagtcgatgggtgggtcaaactggtaaattcctacatcggtttgtagcaaatcaaactctggcacgttctccacgaggtgacgaaagtcgagcggttccaatgcgcctgtctgtgcgttcttgcccatgccaatagtaccaccggtgtaaatgagcaatactttatttgttctcatattcttagatttatattaggtgtgtgttatcgttgctctaacagtaccacattctccacgtgtggtgtgtgtggaaacatatctactggctgcaccgcctcaactcgatactgttcgttcagcacttccaagtcgcgcgcttgcgtggcagggttacagcttacatagacaatacgcttgggggcagctctcaagatggtttgtatcacgtcagggtgcattcctgctcgtggtggatcggtgatgatgacgtcgggttttccatgctgcttcacgaactcatcggtcaggatgtccttcatgtctccagcataaaacaaggtgttctcaatgccattgcacttcgagttcgccttggcatcggcaatagcgtcctccacatattcaatgccaattacctgttgggcatggcgtgctacgaagttagctatcgtaccagtgccggtatataagtcgtacaccaactcttttcctgtgagttgtgccagttggcgtgccacttcatagaggtgaaaagcctgctgggtattggtttggtagaaacttttggctgctaccttgaattgtagcttgtccatcatctccgtgatgtggtctttgcctttgaacacttctactgtttggtcgctgaaggtgtcgttgcatttttggttgttcacatagagcagcgatgtaatttgtggaaagcggtcgccgatgtgctgcaacaagtcgtgtgctcgttgctcatctccttgctcttggaacttgaattgcacgagcaccatccactctcctgtgctggaattgcgaatcattatatctcgcaagagacctgtctgttcccttacatcaaaaaaactgatgccattgttcaaggcatagtcgcgaatctcatttctgatttggttgcataggtcatccatgagccagcatttctcgataggataaatcttgtcgaaagcgcccgtgatgtgaaaaccaatggcgtttttgtggtcaagctgtacaccactgttcacttcttccttggtgagccaccgcttgttggaacaactaaactctaacttgttgcggtattcgtagattttttcagaccccaagatagggcgaaagtcgggcaattccaccttgcctatgcgtgtcagctggtcgtgcacttgcttttgtttcgccttaagctggtcctcatacggcaaattttgccatttgcacccgccacaaatgccaaagtgttggcacacgggttctgctctacgttcactatattttataaatcgcaccacctctgcttcacaatagtgatgctttttcttacgtacttgcaggtcgacaacatcgcccggaacggcaaagggaacaaagactaccatgtcatcgacacgtgttagtgatttgccctcagcagccacatctgtaatggttactccttcgaggatgggtaatggtttcttttttcttgacatcttgcttttttgagcaggtaaaattacagcaaattcagtaaattaccaaacaattgggcaggtttctatgcgaatgtggacgaaatgtggaattgtgagacacgcctcctttattgaagagcggttgctgatagagagaaaccgtctttgttctttggtttcaaccctccatctaatgacattttatccctgagccgttcctgtttttgccagcccaattatcataccatcaaagcgttacttttttgctatttttgataaaaataagctcttgcttttgtcttatcattttaccaaaaaacggtcatctaaaatttgcaaaatagaaaaaattaataggcaaatgcccaacaaaaatgggctgattttcacaaaataaacgtctcttgaaactaaaacattgacttaacaggcttggaaacacgctttagagctgttattcacatgcttcagctgccttaaagcatgcaaatagcgagcttatctcaatgctttagccgttgagaaagggtaaaaatgggaataaatgaagtcgttttaacggtaacgtattatgcaacaacggattatgaaaattgctcaaaattagcgtatttgcgaccaacttgactgttgatggattttacgagagttatgagaggcactttgtaaagaatattcagcatttattttgctttcttgcaatgtatcaacgaccaatgcagtagatgtttttcgatgtaaaaatacgaatcttcaaggtacgaaccataggtgggagacgaggcggagaagaaaagaaatcgccagtctcttgtagaaactggcgatgattagcagccaagtataggagctaaatgagtcctattcgtggcagtagacttacttcttgtgttgctctatatgtgctatttgttgcagcagggcgtccaaggtttcagttgtttgaagaaatcatttcccttgtcgtctactaagatgaaagcagggaagtcgacaacgtcaattttccaaatggcttccatgccgagttctggatattccacgcactcaatgctcttaatggagttcatcgacagcacagcagcaggaccgccaatgctacccaaatagaaacctccgtgcttttgacaagcgtcggtaaccacttgtgtgcggttgcctttggcaatcatcaccatcgaacctccatgatcttggaactcgtctacataggggtccatgcggtttgcggtagtaggacccatactgccacaaggcattccttctggagtcttcgcaggaccagcatagagaatagggtggttcttgaagtattcgggcaactcttcgcctgcgtcgagacgtgctttgagcttggcatgtgcgatgtcgcgtgccacgatgatagtaccgttgagactcacacgtgtagatacgggatattttgatagctctttgcagatatctgccatgggttgatcgaggttgattttcaccacatcgccttcaccagcttgacgtaattcctctggaatgagtgaaccgggattttcgtccaacttctctatccacaaaccctctttattaatcttggctttgatgttgcggtctgccgaacagctgacgcccattccgatgggacatgatgctccatggcgtggcaagcgtaccacccgaatgtcgtgagccatgtatttaccaccaaactgagcacccagtccaatcttgtgtgcttcttctaaaagttccttctcaagtgctacatcgcggaaagcacgtcctgtttcgtcccccgaggtgggcaggttgtcataataatgagtagacgctaacttcacggtgagcaggtttttctctgccgaggtgcctccaatgacgaatgcaatgtggtaaggaggacaagcagctgtacccaatgatttcattttctctaccaagaaaggaaccaaggtgccagggttttggataatggctttggtcatttggtacagataggtcttgttggcagagccgcctcccttggtaacaaacaagaatttgtattccattccctcggttgcctctaagtcaatctgtgcaggaaggttgcatctggtgttcacctcgtcatacatattgaggggtgcattctgtgagtagcgcaggttgtcttgtgtgtaggtgttgtaaacgccccgagagatggcttcttcatcgcaaaagcccgtccatacctgttgtcccttttcaccgtgaacaatagcagtacccgtgtcttgacaaaatggcagtttgccttttgatgctacttctgcattgcgcaagaaggagagagccacatacttgtcattgtcagaagcctcagggtcggttaaaatcttcgctacttgttcgttgtgagtgcggcgcaacatgaaactcacattgtgaatggcttgttgggtgagcatggttaaagcttctggggttacctttagcatgggtttgccctcaaattcgctcaccgatacgccatcgttggtcagtaaatagtactctgtgtcatccttgcccatctgaaacatgggcgcatacttgaaatcaggtgtttttgccataatgttttgttgttatgttttatagagttatttgttattgcttatgttgtgatgtttgtttagtaaccaaagatttcctcgggtgtaagatgcttgatgttgcctatcttttgcagtgccttgatattgaggttcttctcatcacccaaaataatataatggtatggcttgtgtgccatgtgttttacttcgaaatcaacaatgtcttgcaaggtgatggtaggcaaagcgtggtaaatcttttctgctacgtcataatcaatgcctttttccttggcactataataagcattgagtacaccgctccgtgtaattctgcggcttgccaattgctttgtaagtccttgttttgcaatttcaaaggctgcctgactttgtggaatggtgtctaagatgttgttgaacaccttgatgcaatccatcattttatcgttttgagagatgatataggtttgggcatattcgggatgtcctttcagtggactgttgttgtaatatgccgatgcgctataagccaagcctcttgcctcgcgtaactcttggaagacaacggtgttcatgcctcctccaaagtattcgttaaatagtgctcccactgctaactgtttctcatcgaagggcttgttttcgttatgatacatcaacatatagatgtttttagccttgtatggggctataaatacttggttctgtggggtagtacgctcttgatactctttattttgtggagttggccacttctttttgaaatgatgatacaacttgtcgaggtcgttggatagttgctgcacgcttgttggaccgtaataaagggcggtgtgttcgtacttccgaagcgattgaaacaaatcgaccaaatgttgtggttgcaatgctttcagttccttttcgctaacgatattgcggacatcgttataaggtccgaacttcacgtagttgattaaggcattgaagtttttcttttgatcttgtttgttgtcttgtctggctttcaatactaacgcaacatactgtttgtatgccgctgtatctggttgggcatcggtcatcagttcgttgagaagttggagcgcttttggcatattttcatccaatccagatagtttaatggtgatgttacgtggctttgctgatatgtagagactacatgccaacttgtataattcgcgcttgaagtcttttgccgacttcttcgatgtgcctaaatattcgatatagttgcacgcctcgtcgtactctttgtttgctgttgtgccgaaatcccatgtcaatacaaggttgaacagaccgtcctcactgttgtgtttgtaaacaataggtaacttcttcttcgtcttcgtgaaggtgaggtcgcgtttgaaatcgaggaactgcggttgaatgggggtggtatgtgtatttctaatgttatttaagaaggcactactctcgttgcgattgcttggaataggtgtgatttggggcttgtctattttcttttgtgtggtgtcttcgccttgctttttgtacacacatacaaagttatctttgaaatgtcggttggcaaaagcaataatatcttgcttagaaatctttgtcaatcggttgagtttgttcactacatcttcccatttttgcccattgataaaggcgtcggtgaacattgaaacgcgcgaacggttggattgtaacgattgataatattcgcgtttgtagttgttgaggatagagagcagcaggtcatcagcaaacgctcccttctttaacttatcaatctccgacaacaacaagtgcttcacttcgtccaaggtttgcccttctttcggcattcctatgatgcaaaaagagctatagtcagcaagtggattgataaaagcaccactctcaagcacttgcatgctttgattgaggttcaggtctaacagtcctgcgtgtccattgctcaatattttatccaccaaagtgagggtgtcattttgcagtgatgcagcaccatcgaacttccatgccatgagtacattctcggcttctaagcctacaaccgttgtatctacgctggcttgcaaagacggttgaggtgcaaaagtggggtaagacagtgtttcgctcttcttccatgtgctgaaatagcgctccaaaacggtcatcacctcgtcgggattcaggtcgcctgccatacagatggcaatgttattgggcacatagtagcgtttgaaatagttttgaatgtttacaatcgagggattttttagatgtccttgtgtgccaattgtggtctgtgtgccatagggatgtgttggaaacagcttggcattgagtgcattccattccttttcaccatcgttagctaagccgatattatactcctcgtacactgcttccagttcggtatggaagcctctaatcaccatattttgaaagcggtcggcttgtatctttgcccaattctctacttcgttggcaggaatgttctcaacatagcaggtgatgtcgttgctcgtaaaagcattagtaccctccgaaccaatagatgccataagcttgtcgtactcgttaggaatgttataagcagcagctaattgtgacacactgtctatttcatgataagctttcttacgctcgttggggtcggtgagcaagcgatattgctcgtatcgctcggtaatctcttggagatagggggcttctttttcggcattggtagtgccaaactgctttgttcccttgaacatgagatgctctaagtagtgcgctaaacctgtggtttcggcaggatcgtttttacttcctgtctttaccgcaatgtaagtttgaatgcgtggtttctctttgttgacactcaggtaaactttcagtccattatcgagggtgtaaatacgggttttcatggggtcgccagccactgttttgtagttgtacgacttggctgatgcaatgcttgtgatgagcaacaaagccaaactgagcgtgaattttgctattttcattgggtgagttattgagttattgagtttttgagttattgagttgagtttattgagttgttgagttgaatttattgagttcttgagtttttaagtttgtgagtgatgaagtgtttaagtttttagtgatacttactcttcataatccacttcatgatcgagtttgtttaagaaatcatctaagacattttgctcaacatcgcccattgcaaactctttttcagcatctttccgaatggcagcaatccaagtacgacgtgcttggatgtagtcttctcgaatgcgatcggcgtcttgcggggtaatggtgttcaaatgataatagtccaaaatgagttgataagtccatgcccattggtaatctcgataatgttcgttgatatcctcaaagcgttgtagcacgtcttgaatcgactctaagttgccgtttttgatatcctcaatcaggcgttcttcttcagaaacgggcagaagtaatcccgataagtcggtccattgtcctgttcccacagtgctggagggtggagttaggctggcatctcgttttcgcatgcgcttcaatacggcacccatgtagatgcgaagtgccatgtcgtaattctcaatacctttttgtagcgaattggatttgatgacatagttatagtagttgtacagtgctacttcattgccagaggcatcttgcagcttttccaatattttctttccttctattatctcacctacggagtaaggagagagccagtcaaagttgacaatacttttcagtgtgccttgtggtcttaaatctcgtttgggccacttcctgatatcacgatacaaacccaccgtggtgatattccgtcctggtgagagatacatgatgtcactataagctttgagataggagaaaggtagacaactggtgtcagggtggtacatcagcttgccaaaacataccgagaacgtgccaatgttggctggcattagcaggtaagcaccactggctgtcttgcatcctcgttgtaaagtgccatagtgcattggtcccattttgtaggcatgattgctgaagttcgtggcagagcctgcattgtaaaacgaaaacatgccaccaatgagcaaactactcttatgatgactggctgtgaacgggccacagaaggcagcgcaggcttcaccgttggacatataactgttggcgaaaaacacactcgctgatgcagtaaacccattacttatctgacaggcttcacctacaaagcagtcttgcatcttcacactgttgataatggatgagccataagagatgatagagttttcacaaattactcctgtgccgatataaacactggcattgtccgagcttagaatggtacaatcgcttagtctggaggctccattgatttcgcattcgtcaaagataacggtattggatatctctttcgtattgacaatcttcacgttgttaccaatccatccctgctcgggagcgtgtagatttatctcctctttgatgagtcttctaatcgcctctttgagcggtttgtcgtggaaatgcttcaccatgaatgcggcgagctgactgttgaggtctctaaacagcaccacattgccgtcgcccacctcgttcaatacagacactaagttgccttctccataggtagccccctctgaggtttcaagagtacagacattcgagatgtagcatcggtcaccaatggtatagttgttgatgtagttgccaatgttctccaccagactgttgtcaccgatggtcacgtttcgcagcgttgcgttgttgatgcctgaatgtttgaaaaagtctctactcacttcaatggtgtcgtcgaaagcaccaatgtaaacttctccatacagcatcacacgatgcatgtaattgggcttgaacccttcggctacgtgaatgttcgcccattcctctgcccaacaacttctttcctcgaggatgcgaatctcctcttctgtcagttcacggtattctttcatacattatttattttattatcttggttccttttgctctttcagagcgcaagttacatttccttgttgccccagggcgttgccctgggctgtattccttttggggcttcgccccgtctctgcgcaagctatttgtccacatcgtccgcttatacctgtttacttatctatcatcaattgaatgttgttactcctttcctttttcattggtccgcttattcctgtttatttatctatcatcaatgtgcagactgtacgatatgtacttacacagaaagagcgatagggggtcaatctgaaaatatatattgttggtcatattggatttgatatgcttctaagaaatgtttatactcatctgcgaatgataatttttgatgatgctgatgttggtttttaatataatgtatagttttgtcaatttgtgattgactcactgaaaatgctgcatatccatgttgccatgaaaatttctgataatgagcgtctatagtttttatccatttgctactttttctcttaatttcttcaactacatgtgcaacactttctatattggagagtgtgaataaaatgtgtatatggttggaaatacctccaacactcaagactttgcagtttgttgctaaatccacaagttttgctaaatattcatgaatacgacttaaatcactttcacggatacaagggctatcgcttttgacatgaaaaatcaaatgtatatatattttacataatgattgtgccatattgtttccatccttattttttttagtcccttttgcctctatgagcgcaagttacttatcatagtttaccgaaaacatatcccaagcaatgttctctttggaacttagttctatctccgtgcaagatttttttccacttcattagcttatttgtatttctctttttttatattatttagagacatcgctctttttgttgaattgttacattattctgtggtgtgttacttgtaatatgtacttctttacttcattcagtttatcgtccttctctgattgtttctatggctacgatgcggaccgaaggtccagtaggaacttagcccagggcagcgccctgggtagagagttgcagggggttgacgctctgaaagagcaaagggaggcataggtcacatattttatagtttattctcttcataataaaaggtggagcattgagtcgctgcatagagagttgaaggttattcttctatgggatataagaaatcattgtagggatatttttgtacatggagtcggcgaacttgttgatacaacacctctttgaattcgtctatgttcaactttttcttggcagaaatgaagagacactggtcgttgagccgtgccatccatgtttgtttaagttcatcgagagtaatattctctgcgttggaaggtgtcaagtcgtccgcatctttaggtacccaagtgtaattatctattttgttaaagataatcatagagggcttttctgcacatcctaactctttcagcgtgttttcaacgacatgaatttgctcttcaaagtcgggatgagagatgtcaaccacatgcagtagcaaatcggcttctcgcacttcgtccaaggtagacttgaaagaatcgaccaaatcggtgggtaatttccgtataaatccaacggtatcagctaaaaggaagggcagattttcaaccactactttacgaacggtggtgtcgagtgttgcaaatagcttgttttctgcaaacacttcgcttttggaaagcaggttcatgagcgttgatttgcctacgttggtgtagcccaccaatgcgactcgtatcatgcgcccacggtttttgcgctgcgtcgtcttttgtttgtcaatctgttctaatcgttgttttaagagagtgatacgttgtaggatgattcgtcggtccatttctaactgcgtctcaccgggtccacgaagtcccacagaacccttaccaccgccagagcctgaccctccgccttgtcgttccaagtgagtccacagccgttgcaagcgagggagcatgtagcgatattgcgccaactctacttgtgtcttggcattggctgtctgagcgcgcatggcaaaaatgtcgaggatgagcgatgtgcggtctaagatttttacatccaatgctttttcgatgtttctaatctgcttggcggatagttcatcatcaaaaataaccatgcccacaggacgctcattttctgcttcttcgtcaatatattgtttgatttcttccaattttcctttgcctacataggtcacggcattaggtccgccagccttttgagtaaagcgcttcacggtttctgcccctgcggtatctgctaagaactccaattcgtcaaggtactcgttggttttagcctcgttttgttcttgcgtgacgatacctaccaataccgctgtttctgatttggcttcggaaataacaaattctttcatttatatataatgtgatttcatgcaaaggtacaataaagccccaaaagcacaaaataaaactctcttttttcttttcaagattgattgctattgtatcttggtcaaagcatctgttgcttttgtcctattattttaccaaaaaacggctcttgaaaatcttcaaaatagaaaaaatcaataggcaagccatatacaaaaatgggctgaatttcaaaaaacaaacgtctcttgaagctaaaacaacgacttaacaggcttgtaaacacgctttagaggggttattttcatgacctaagagcattaaagcatgcaaatagcaggcttatctcaatgcttcagtcgccaagaagtggttaaaaaaggaatgaaaagacaatatgtaaacataacattttgagtaacaacgaattatgaatattgctcaaatttcgcatatttgcgaccaactttgacgtttgttgttgcgacgcgagttatgagaggcactttgtaaagaaaattcagcatctattatcatcctgtgcagtttagcaccatttttgcagatgaatactaaaaaaactaaaaaagcgaaatgaatgtcgaaattgagcacctcaacaaaggtgttttatcagaataaagtcgtatctttgtcattcatttaatacgatataaacatgaaaacaaaaatgatcaccttactgttggtgtgtggtatgatgtctttcttttccgcttctgcacagaatgtggcagattatcagattgttcccatgcccaaagagttgtcactcactacgaagaagccctttgtgttatcggcttcaacctgtatttacagtcctgcaggagacatggatttgcagcgcaatgcccagtacttgtcggagtatattcgtgagacgacgggcttgcaactcaattgtgtgacgaagaaaaccaaacaagcgatttctttaaccatagattcaaaaattaaaaacgatgaaggatatgtgctgtccgttacacctcaaggagtgacggtggctgggaaaacggcacgtggcgtgttctatggactgcaaaccttgcgcaagtcgctccccgttgcgaataacttaacggaagtgatgttgccagcggtcgttatcaaggatgctcctcgtttcggttatcgtggtggaatgttggactgcggtcgccatttcttctccatcgacttcgttaaaaaatatatcgatctgttggctttgcacaacatgaacgtgtttcactggcacttaaccgaagaccagggttggcgcattgaaatcaagaaatatcccgaacttaccaagataggctccatacgcaaagagacagtagtgggacgcaattcaggtgtgtgcgacggtgtgccttatggcggttattacacacaggaacaggcacgcgaaatcgtgaaatatgctgccgaccgatacattactgtgattcccgagatagatatgcctggccacatgcttgctgccatggcagcttatccagagttgggatgcacgggtggtccttacgaagtggaaaaaacatggggcgtgtttgaagacgttttgtgtttgggcaacgagaaaacttaccagttctgtgaagatgtcttagccgagttgatggatatattcccttcgaaatatatcaatataggtggtgacgaagctcctcatgtgcgttgggaaaaatgtccaaaatgccaacgtgttatgcaagcacaaggcttgacagctaagaagttgcaaggctatttcactaatcgtatcgaaaaattcatcaatagcaaagggcgtcgcatcataggttgggatgaaatcttagatggagacatcaatcaaagtgctactgtgatgagttggcgtggggtagaacccggtataaaggcagccatgacaggtcacgatgtggtgatgtcgcctactacctatgcttatttcgattattaccaaaccgataagacctttaacgagccattactcattggcggaaacctgcctattgagaagacatacagctttgaacccttgccagacagtttgtcgggtgaggcacgtcagcatatcattggtgtacaatgtaatctttggacggaatatattccttatccaaagttggcagaatatcagctgttgccacgcatggcagccattgcagaaatacaatggtcggaacataagaaggacttccctgagtttaagaaccgtttaacacgtttgacgaagttctacgacttgtatcactatgactatgccaagcatctttggaataaaaaataatcattcaacgaaatattaagaacatgagacttattattgaaaaaaattatgaagcgctgtcaaactgggcagcagagcatgttattgagcgcattcgtgcgttcaatcctaccgctgagcgtccttttgtgttaggacttcccacaggctcttcgccagagggaatgtatgcacggttagttaaagccaacaaggagggaagagtgtcgttcaaacacgtcatcacctttaacatggacgagtatgttggtttgcccgaatcgcatccagaaagctatcactcgtttatggctcgcaatctgtttgatcatatcgattgcccgaaagagaatatccatatccttaacggaaacgcaaaagacttggaagctgaatgcaaagcctacgaagaaaagattgctgcagtgggtggcatcgatttatttattggaggaattggacctgatggacacattgctttcaatgagccatgttcttcacttacatcgcgtactcgtatcaagaccctcaccagtgacactattattgccaacagtaggttctttgataacgacatcaacaaggtacctaaacatgcgctgacagtaggtgtggggaccgtgatggatgcgaaagaagtcatgatactctgcaatggtcaccataaggctcgcgctttgcaagctgtggttgaaggtcctgttacccattattggacgattagtgtgttgcagcaacatcctcacggcattattgtgtgtgatgagcctgctacagacgaattgcgtgtgggaacgtaccgctactttaaggatatagagaaaaacaatatttaatcaatagggggcttgtacgattttgtttcgtgacaagcctcgttttttaaggatagatttatgaaattaaatttaagttctgagattgttctcaacaaagtacccgtcgaattgtatcgaccagcaactgccattgaccgctctgagttgacacgttacgaaaagattgataccgatatctttccaaaaatagaggaaggagccagtcacattgccgatgcgattgtaaagactgtgaaggaaaaacaagctgaaggcaagttttgtgtgcttggtttgggaacgggattgtcactcacacctatctataatgagcttattcatcgccatcaaaccgataaggtaagttttcataatgtgatagtgtttaatgcgtatgaatatttccctatcactgcagatacgcagaacagttgtatgaagcagttgggcgatcgcttcttaaaccatgttgacatcgacccaaagaatgtctttagtctcgatgggagcatctcgcaggaggatgtacagagccattgtcgccttttcgaagagcgcatgcaaacctttggaggaatcgacatcatgctcttgggcattggacgttcgggcaacatcgctactaacgagcctggttctacgttgacatctacctcacgcatcatcttggtagacgaggtgtcacgcaaagaaatggcattgagctttggtaataatgagtcagttccaccttgttctatcactatgggtatcgctacaatattaaaagccaaaaagatattcttggtagcatggggagaagagaaggcagagatgattcaaaaggcggttgaggagaacataacggataccattccagcttcttttctgcaaacacataataatgttcatgtggtcatcgacctgtctgctgccagcagactcacacgcattgtgcatccatggttggtaaagtcgtgtgaatggacggataagttggtgcgctcagccttggtatggttgtgtcaattaacgaagaaacctatcctaaagctcaccaataaggattacaacgaccacggattgagcgaattgttggcgctctacggttcggcatacaatgccaacatcaagatttttaacgatttgcaacataccattacaggatggccaggtggcaaaccgaatgcagacgacacttatcgccccgaacgtgcgaagccgttccccaagcgagtaattgtcttttcgccgcaccctgacgatgatgtcatctccatgggaggcaccttgcgacgtttggttcagcagggacacgacgtacatgtggcttatgagacgagtggtaacattgctgtgggcgatgaagaggtgacacgtttcatgcacttcatcaatggattcaaccagttgtttggctctgaaaaagatgaagtcatcaagaataagtacaaggaaatcaaggagttcttgtcacaaaagaaggaaggcgacattgatacgttggacgtacgaaccattaaaggattgattcgtcgtggagaagcgcgcaccgccaacacgtataatggggttcctttggaccatgttcacttcttggacttaccattctatgagtcgggtaagatagaaaagttgcctatgacagagaaggatgtgcagattgtacgcgatttgattacgcaagtgaagccacatcagatttatgtcgctggcgatttggcagatcctcacggtactcatagaaagtgtacagatgctgtattggctgcactcgatttggaaaaagaagctggtgcagagtggctcaaagactgtcgtgtgtggatgtatcgtggagcttgggcagaatgggaaatcgaaaacatagagatgtgtgttcctatgagtcctgaagagttgcgtgctaaacgcaatagcatcctcaaacaccagagtcaaatggaaagtgcaccgttcttgggcaacgatgaacgattgttctggcagcgttctgaagaccgtaaccatgctacggcagcactttatgacagcttaggtttggcttgctacgaggcgatggaagcctttgtagaatataaggtgtgagaaacgaaagacttcttaataaggacttccgaacagtctcttactatttaacgtaaggttcaacacgctctatctcttcttttgtagaaagatggagcgtgttttttgtggattagagtaaaaaaaaagaacattaaaaattgcaaatatcattataaattgttacttttacagcatcattaaaactcaatagattatggaaacaaatacaactccacaggctacgccaaccttatcctttggtgaagcaatcaaacaagtgttcaacaagtatgctacctttacggggcgtgcacgtcgatctgaatattggtattttgcattgtttggtacattggcaggcatggttgcctatattttagactttgcacttggcttaacgttcacagacattggttatggacctctttatatcctcgttgcattaggtttgcttattcctggtttggctgtcgctgtacgtcgtttgcacgatattaacaagagtggctggaactatttatgggtgttgatacctattgttggtggtattttgctcatcgtttggttttgttacgattcaaaaccagagacaaataagtatggagcttcaccaaaatacatcgattagttgatgtcgttttgaggctttcggtgcaagtatttcacccaagcatagggttttcgatgaatcagataattggggtcgtccatgtgtcgataagcttcacgttcaaaagagatgtttagataggcacgtcctttcatcggaatgcgaatcaaccattcgatgacgtagaacaaatagaagaagataaaacccatttctatcatctgtcgggtgtgaatacgttcatgctgaatcaagtcggcagtaatcgttgtcccttttcggcaaaacaacaagccaaaaagattgatggcatcgtatttcttaaaaggtatcagtcggttgtgaataataagcatgattcgttcttcttctatcgtattaaattgtcattagaggtcattcaggaagtaatggggctgtatgagaagacagtcccattagtttccgtccgatttgcgaatggtaatgatataggcactcagcagcaccaagatacctgccacgggcttgtcccacgtcaatatgtcctgtccaatgtaaatagctacgaacgaagccaccactggttgcaggttggtgtagatactaacggttgtagcttgcaggtaacgcatggcatacggaatagcaaaatagcctatcaccgtggcaaacaccacaatgaaagtcatctctatcacaccactccaagcccattgtgacgaccacaacctttgttggtcgaactctggagcagcaaagggcaatacagcaagggtggaaataagaaatatccatttcatttgagtcacggctgtgtatttctgagacacgttgcgcgtaatcagtaaatacactacccaggtcattaaacttaatatggtgagtgtgataccccataagtcattcttcccagagccacttttccaactcatcaataccatgagtagcgcacccacaatacctatcaacactccgaatatctttgttccgttcatcctctctttcaagaacaacgcagccatgagcatggtggcaacgggggtgagtgtggcaatgagcgagaagtaaacgggcgtggtgtacaccaaagcccatgctgtgagcgtttgtgaaattacaaaacctaacaaacctcccatcatgataatgagcaaatctttgcgttgaacggtctctttaggcaggaatagactgattgcccaaaagattacagccgctcctaaacaccgcatgaacatgtagcccataggcgttacccattgatcaagaagtagtttggtgacaggtacacccaaaccaaagatgacgttggctaagatgattgcagtgtgtgcttgtattttctgttgtttcttcattatgacgagttcgttatggtttgattttcttttggttgtgtgaggacatcagcgtggtatatccttctttctgatgccatgtgaacaagccatcaactgcggcttggcgattttcaatggtagaaaatcattgcaaagatacagttttttccaataattgggcgtaggaacagaaataaaataatatatttgtacaacgaatcaagtccattgaaaaccatgcaaaacgacaatctcccaaattcattgactcccgaccaatatcaaactgaagtgatacaagccagcggtggttatcatttagtgttggctgcaccgggctgtggtaaaacccaaatcctcaccgagcgtattcggagggcgcacgagcaaggcatttcctttgacgagatgctgtgccttaccttcactaatcgtgctgcacgaggcatgagagagcgcattgagacccacatcagtgatgaagaaatagccgagttgtatgtgggaaacgtgcataggttttgttctaagttcttatttgacaatagtttggtgcctgctgaaagctcggtgattgacgatgatgatgcgttcagcatcttggctcgttatcgggatgatgatgaatatgcagtgcagcacaattttcggttgaagaaagagtacatcgaagtgcttcattttgcaggattcatacatcaacttactcatcatcaccccaagcttttgcgtttgcatcctgaatgtgtcacctctttggatgtggctgcattgcgcactttgtgtcgggtacaacgaatggaactcactgctgataccttgcaagacgttttcaaaaatgcgaatacatatgagaaccttatccattcggatgcttacgacattgggagtcaacacgatatagagacattgttgcgtaagatgcagcaagcacagtattatatccagtacaaaaaagaaaacaagttgctcgactttgaggacttgctcatgctcacctacgatgcactgaacgctgatgaccagctcgaattgaagcgctatcgctggatacaagtagacgaagtgcaagatctcaacccgctacagttggcacttgtcgacggttttataagcaaagacttccacacggtgatgtatcttggcgatgaacaacaagcaattttttctttcatgggtgcgaagatgagtaccctcgatgcactgaagcagcgttgtgaggggcacctgcatcggttgttcgtcaatcatcgctcacctcggtatctacttcaagtattcaatacctttgccgaaaagatgttagacatcgaccctgccttgttgcctaccaccgattttgaccctcctcgtcaaggtgatgaactgcaattgatgtcgagcgaacaggtggaatcggaatatgccgatgtggctgacaaggtgcaacgcttgcaggtgcagtatcctcaagagacaacggctgtgattgtgagctcgaatgccgatgccgaactgatgagtgaggctttgacacagaggaatttacctcacttcaaggtgtcgggagaggatgtgtttgcctcttcagaggtgaagttactcttggcacacctcaacattttgtgtaatgaacatcagttcatgggctggtcaagattactcaaaggcctgcaggtgttcgagagtaatgctgccgctcgtaggtttgtacgagggttgttcgataatgccatgttgccatctgatttgttgatgtaccctaatagcagctatgtgcaagcctttgtggagtgttatgagcaacaggacatcgtggtgttcgatacagagactacgggtttgaatgtttttgaggacgatattgtgcagatagctgccgtacgtatgcgccaaggatgtgtggttcccgggtcagagtttgtggtgtttatgcgcaccaatcgtgagataccacgcaagttgggcaacattgacaatcccctgatagaggaaatgcagcatcatcaactgtacagcccaagcgagggcttgagaatgtttatggagtatgtgggaaatagcagactattggggcataatgccgactatgactatcatatcttaaactttaacttgcagcgttatcttcctgatatacagttagaagaacgttgtaacatgtattttgattcactgaaactcatccgtttactcgaaccaaacctaaaagaatacaagctgaaatatttactgtcggtgctgcatctcgaaggacaaaactcgcaccttgccgatgctgatgtgcatgccacctgcagtgtggtgcgccattgttatgagaaagcgaaacagcacatcgactctcaaagggaatggatacagcatcctcgattccaagagagggcagcagtgttcaggaggcattatctcgaaatctatactcgtgcgcgccagctgatgtatcagcgtcagcattcggaggatttgcctgtcttggcgagcgaaatagcgtatctctatcgcaccctctgtgaacaaggattgctgcaacccattgacaaattgcctcatgtcatcaagtatttgtcagctgacatgatagacaaggatgcctatccgtcgctcatcgaacagctttcggtgtatatcaacgaaatcaacacgcttaaagaggctgacctgtgtcatggaacaactttagatgaacgcatctttgtgacaacggttcacaaagccaaaggactggagttcgatgaagttgtcttgtttgatgcggtagatggtcgataccccaactacttcaatcgtgacaatgtgcgcttagttgccgaggataaacgcaagttttatgttgccatgacccgtgccaagcagcggttgtatgtgtcgtggtcacgcaatagggtggactatcacaaccagttgcagcctcgttatctcacgccattcatgaaacccttgctccatttctttgaggtgttggcataacctctttatggcaaggaatttctttcttgatttgttgcatcggaatttcacggatttacacgagagtttatataatacagcatcggagtgtcacggatttacacggaagaatcttagatatgtacaagataataattttattacatccgtgtttttccgtattcttccgtagctacatttagcaaattatccgtgtgagtccgtgtttatccgttgcaacatttattacattatctatatctttccgtgtctatccgttgctaaacatctcgttgcattggagtgatacggggaacaaaccaaaatgaagatacgaacctatgctcctgcctattctattcgttgatttttttgcaaacaaaaaaaagaccatctccttgctctaaaatgagttttggaatggtctttctttatagatgcgtttcagtctgtacgttcttcaggcgaaaaaatacaaatagaaacctcctgttggcaggttgctcatgcttgatgtggcatgaacttgtatgaattatttattttcaggaatgtgcttaaggatttcaagcagatgatcccataccatttgaacagtcgggatgtgcagacgctcatcgggtgtatggacgaaacggagtgtaggaccgaagctcaccatgtcgatatgaggataacgctctgagaacaaaccgcactccaaaccagcatgaataccaagtactttcggctctttgttgaagagtttcttataggcgtcaacggtaatcttaactaatttgctgtcaggattcatgttccatgcagggtatccgtcggtttgctccaccttggctccagccaattcataggcagccttaacggtgttgcacatattgtccaaattgctcatcacgttactgcgctgtgaagacaggatttctaccttgtcttctaaggtcttaacggctgcaacgttgctggaagtttctaccatctttgccaaaatttcatcttgacacatagcaaaaacgccgttgtcgacagcttgcagagcattgataatctggcaacctacgttcttaggcattacccgacatgcttctgcgctctccatgctaaataccatgtccttgtcggtaacgtggtactcctgcatcacttctgtttggaatacgttccagtcggcacgcacttgctctttaacatcgttagggatcgcaaatatcacctttccatcacgaggaatggcattgtgcaacttaccgctgttaaaagaacacaaacgcaagtcgaacttctctttttcattgtagaggaatcgattgagtatcttaatggcgttggcacgtttcttgttgatatcgtcgccagagtggccacctaccagtcccttcaatgcaatttgcaggaagaaatagtctttgggagcctcttcagcctgatagtcaaaggtggcattggtgctgcgtccgcctgcacaactcacaaaaatctgtccttcgtcttccgagtcaaggttgatgagatagtcgcctgtcatgaaaccagccttcatacccatagctccagtgagctgtgtctcttcgtctctggtgaaaacgcattcgataggaccgtgctctatgtcgtcagcactaaggatagccagttcgatagccatgccaataccatcgtcagcacccagtgtggtgcctttggcggtgagccattcaccatcgatataggtctgaatggcatccttgtcaaagtcgaactctacatctaccaacttgtcgcacaccatatccatgtgactttgcaaaatcacagtagccagattttcatagcctttggtagcaggcttacggataatcacgttaccggtctcatcaaccttggtttccaactgatgtttttttccaaactctttcaggtattctatcatcttttcctcacgcttagaagggcgtggaatctcattaattcttgcaaaatgctcaaacacgccagctggctttaagtctttcttttccatgttattttttgtttttttattttgtaaattgcgttatttctactatctttgccacgtttatttcacaatgtgactctgcaaatataactaaaaatgttgaaaacattacttcttagcttgttaattattgcaatctgctttgcattgctggctgtaaagttgctttttcggaaaaacggctcgtttacttctcagcacattcatgacagtaaggcgatgcaggagcggggcattcattgtgtggtagaccaagaccgtgaggctcgacgtagcaacaaggcttgttaattcgtagagatagggtgactaacccacgtctttaacgagcttagcccaaggcaataagacggttagcgttgatatgaaaagaaaataaaacattaatattaaataaaacaatgaagaaaacaatgattcgttcggttgctgttgccgctttggcagcattcacattggtggcttgcgacaaatctaaatcgcaggtagacaacaaaaatgaagaggcaaccccaaaggtgcctactgaatttaagattgcttatgtggaggtggatagcatcatgacccagtacaagttttgcaaagattatagtatgattcttcagaaaaagggtcaaaatatacagaacaccttggctggcaaacaaaaacaattggagcaggcagctggtaatttccaacaaaaactacagcaaaatgcgtacacacgtgagcaagccgagtcgattcaggctgggttgcaaaaacaaggagctgatttgcaagccttgaaccaacgtttgaccaatgagttccaaaccgagacggataaatataataaggcattgcgtgactctattcagcacttcttggcaagttataacaaagacaaaaaatacagtttgatattgtcgaaggcaggggataacttgctgtatgccgacaaggcgtatgacatcaccaaggatgtggtggcaggactgaacaaggcttacaagcctgtggatgctaagaaaaaggacgagaagaaataacgacaatatttgaaacgacagttttcaaatatcattatcttaatataaagaatgcgagcttttttggctcgcatttttttcgctaaataggttggttacgtggatccttgaacatggggcaatgaagcatggcactttcattttgcaatgatatttttactgcgaagcgcatctctgaaattgcgtttgtgtaatcgttagtatcttgttttgaagaatatttaatgctgaattttctttacaaagtgcctctcaaaactctcgtaaaatccatcaacagcaaagttggtcgcgaatacgctaattttgaacgaaattcataatctgttgttacataagctattacgattaaatcactttcatttgttcccatttttaccctttctcaaccgctaaagcattgagatatgctcgctatttgcatgctttaatgcccttaggtcatgtgaataacacctctaaagcgtgtttccaagaccgttaagtcaatgttttagtttcaagagacgattatttcgtgaaaatcagcccatttttgtatatcaattgcctattaattttttctattttgaagattttagatgaccgttttttggtaaaataataggacaaaaacaacaaatggcttttccaaaaaaaagataaaaacaaaaggaaaaaactctttcgttgaagggtcaacatgaactctcttttatttattaagattgtttgtttgcaacaacaagcatgcttttttgtttcgacaacaaatcgaacaaatgacacaaatccgacggctggaatcaatgaacgcaggcgttcaccgaattaaactaatttgtcaaagacgcacaacatgttgctgtcgatagatttgtttcattcgcagacacggctctttcatttaacaataacctttgctgccataaatcattcatcctttggttacttcgctctcaaatgcacccattaaatgaatataacatattgcgtaccaatgaaaaagcagcataatatcccttcttttaacaacgaaaaacacaaaagaatctaaaaaacattgccacaaaagccatttaacgaaagaacgtcccgttctgtctaaaataacgaaaaacatagttgcagcatttcacttttgacaaaaaatcggagaaaaaacacaacgcatttcttttcgctgttttcgtcagaacgtctacgttctttggtttctttatattactcgcacattttcgtgttttctgctttaattcgttgttgatttcttctaagttgtttacaacaacaaaatataccactttaaatgaaaaagccgtgattcgcagaacgcttgcgttcattgtcttgtcgcgttgattcgttttattggttttatttgttgttcaacaacattgccgttaaatcaaagagccgtggggtcactattcttacaacagtgacccttcaaaccattggtgttatttgtactgctgccaataacgaataagacgttcggacgcatcacgagcgaataagacactggagcctacgggtaaacgaaaaacaggatgctgagcgagcgtcgtggtaatcacaagatggtacgactgtgcttcgtacggactgctgctattatgaaatgttatatcttcgatttggttgaaacccactttcgtattattgatatagaggcagttaggatagatcgtgaggttatcttcttcgaacatcatgacgtcgatgggtaattgattctcttgctcatttttagaatccgtgtcattatccgttgctgcgacaacatgttttttctgaaagtaacctttccgatacagccaaaatgcaatgacacccaatcccacaatgacaataatcaaaatgggaaagatgtccgcaaagcgaagtgttgtaggtatgattggtacttcttccataacaatagcgaatcaatgcgtttttgtgagttgttgattggtatttcagcaatgcgcttgcagctcctctttcatctgtgcttgcagttcctttgctgcttctttcgctgcttcggcaaagtgtatatcgttgctggcatagaggatgccgcgtgagctgttgacaagtaaaccacagtcttttgtcatgccatagcgacacacttcctgcaaactaccaccttgagcgccaatgcccggtacgagcaagaaatgatgaggggctacttttcggatgtcttcgaacatctttccctgtgtggcaccaaccacatacatcatgttctcatccgttccccattggctcgaggtcgctattaccttctcaaaaaggcgcgtacctgtggtatcttgtgttagttggaagtcgtgtgagcctttattactggtgagtgccagcacgatagcccacttgtcttggtatgcaagaaagggttttacgctgtcctcgcccatgtagggggcaatggtgagggcgtctacttggtacgtctcgaagaatgtcttggcgtacatggcagaggtgttgcctatatctccacgcttggcatcagcaatgaggaagtgcgtgggatagttgtcttgcagatatttcactgttttctcgaacgacagcattcccttgatacctgtagattcgtagaaagccaagttgggcttataagctacgcagtagggggcagtggcatcgatgatcgcacgattaaaggcaaagatagggtcttcgtcttccaagagatgtgctggtatcttctgtaggtctggatctaagcctacgcatagaaatgtttgtttgtcaaagatttgtttgacgagctgttgtttggtcattggaggtatggtttagttgacgagttaacgaggtgacaagttgacgagttgatagtttacttgttaacttgtcaactcgtcaacttttgttcttattccctcattcgttctctcttctttattacaattcactatctttcaatttctcggcattctctgcaacggtaagggcatcgatgacaccttgaatgtcgccaccaataaagccttgcaggtcgtgagtggtgtagccaatgcggtggtctgtgacacgtccttgtggatagttgtaggtacgaatcttcgcactgcggtcgccagtagataccaatgacttgcgtcggttggcaatatcgtcaatgtacttttgatgctcacggtcgtagataaaggtacgcaagcgtgacagcgcacgttccttgttcttaggttggtcgcgtgtctcggtacattcgatgagaatttcctccacttcgccagtgttggggttcttccatggataacgaagacgaacgcccgattcaaccttgttgacgttttgtccacctgctcccgagcttctgaacgtgtcccatttaatatcaccctcgttgatgttcacctcaaactggtctgcctctggcaacacagccaccgtagcagccgaggtatgcatgcgtccctgtgtctctgtggcaggtacacgttgcacacgatgtacgccactttcgtatttcaatgtaccgtagacattgtcgccactcactgcaaaatcgatttctttgtaaccgcccaccgagccttcgttgacagatgtgacacttaacgtccaacctttcgagtcgcagtaatgcttatacatgttaaataagtcgccagcaaacagggctgcttcatctcctcccgtgccagcacgtatttccatttgtacgttcttggcatcctcagggtcttttggcactaatgctaattttatttcttcttccaactgtggctgcatatcttcgttggcttgcaattcctcacgagccatctctttcatgtcagcatccgtttcattggcaagaatatctttcgactcacgtatggcattgaggcatgcaatgtatcgcttgcgaatgtccatgatgtcgccaaggtctttgtattccttggttagctttacatagcgtggctgatcggctatgacatctgggtcggtaatcaaggtagatacttcttcaaaccttgcctctaatccttcgagcttgttcagtatgctgttgttttctatcatatatttaatattcgaatgttcctaattctgattgaatggtgagagagcgttttccctcctcaatatgaccgatgatttgggcgtcaacattgaaacttttgctgatcgcaatgatttcttgtgcgtactcgggagccacatatatttccatgcggtgccccatgttgaagactttgtacatctctttccaatcggtgccactgcaacgttggatggttttgaataggggaggaacggggaacaaattgtcttttaccactttgcaattgtcgccgacaaagtgtagcacctttgtttgggcgccccctgtgcagtgaaccatgccatgaatgtgacttcggtgtgcatctaacaccttctttataataggtgcataggtgcgagtaggcgagagtaccaaatgaccagcatcaatctccacgccttctatgctatcggtgagttgatattcaccgctatacaccaaatcatcaggcacagcattatcgtaactttcggggaatttttctgccaagtatttggcaaagacgtcgtgacgagcactggtcagaccgttacttcccatgccaccattgtatgttttctcgtaggtagcctgtcctgtgctactcaatcctacgatgacatcgccgggacggatgttggcattgtcgataacctcactgcgcttcatgcggcaggttacggtagaatcgacgatgatggtgcgcaccaagtcgcctacatcagccgtttcgcctccagtaggataaataccaatgcccatgtctcgcatctcttgcaacaattcatccgtgccgttgataatcgcggaaatgacttcactgggtatcaagagcttgttacgtccaatagtacttgatactaagatgttatctactgcccccacacacagcaagtcgtcggtgttcatcacaatggcatcttgtgcaatgcctttccatacaccaaggtcgcccgtctctttccagtacatatatgctaaagacgatttggtgccagcaccatcggcatgcataatgttgcagtagtcggggtctcctcccagtatgtcaggaatgattttgcagaaagcttgtggataaattcccttgtcaatgttcttaatagcgttgtgtacatcttctttggcggcagacacaccgcgcaacatatatctgtccatgtggttgtaagttttttattgttgacgagttgatgagttgatatgttgattgattagtattcgtgccaaaattcccatgagacaaaagcttgcaataagagcatctccaaaccattttttatggttgctccgtgttcggctcctttctttagaaacaatgtttcatcaggattgtaaatcaagtcgtagaggagatggtgcatgtccatggcttcataaggcagtggaggacaagtgtctgcatgtggatacatgcccacgggtgtacagttgacaacaatgcgataatcgttcataacggcaggtgtgatgtcttgataggtcaaaacaccttggcgaggggttcgagagacgaactttgtcgtaatacccaacgagcgtaagcctacgtcaatggcttttgcagcaccaccagtaccgaggatgagggctttctgatgaaaggtttctaacatgggttcgatacttctggtaaaaccaatcacgtcactattgtagccttttagaagtgttttcttgcctttgtgcgttactctaatgacgttgacggcaccaatttctttcgcttctggactgatttcgtctaaataagaaatcactttctctttataaggtatggtgacgtttaatccctttagttcggggttggaagtcaacacctcttcgagattttctattttgggtatttcaaaatttacatattgggcatctattccttcgttttcaaatttctcattgaagtaatcaatagagaacgaatgtccgagtggatagcctatcagtccgtatttgtccatattctatgtgttatcgttcgtcaatttgagggcaatggggtagcttattttgccttttgtgccaagtacattgtacaaatgccaaaggtgagtcgtgtaaactgtgcctttgcaaatcccgctttggcaaagatttgcagcattgtctcgccttgcggaaaagcttctatcgttgtggtgagatattcgtaagcacgcttgtccttggagagtagtttaccgtaaaagggcaaaaacgtgtgcgaatacatcttaaataactgtcgcatgggaaatgccacaggttgggtgagttccacaatactcacatgaccgccaggtttcaatactctatgtatctctcttaatccttgatcgaggtcttgaaagttgcgaatgccaaaggcagctgtgacagcatcaaacgaattttcttgaaaagagagtgctaagcagtcttcttgttgaaaagaaatgacatgcgataagcccgctttggcaaccttttgctcgccaatcttcatcatccccgttgaaatatctgcgcctatcagttttcgaggctgtaacatctgtgcagccattatggcaaagtcgcctgtacctgtggctatatctaacacggtttgtggtgtaaaggggcaaagttgttgaatggcttttttgcgccaacccttatcgatattccaagaaagacgatgatttaacgcatcgtaggtaggcgcaatgtggtcaaacatctgtgccacttgctgtttcttttcgccttcggcgtgataaggctttatgtgttcctgttcgtacatgcgttgatgaggatgagtaggtggggttgtggtggataagctgaccgattgacaagctcatagataaggaggagaatcgccccaagtctatgcgcaaatcaacgggtcagcttatttacgattgaaggaatctatgctttaagatattctttcacattgcgttcgatacgagcagccaagtcatcgtgctcatcagccttaacaaacttttcgcctgtgatgtgttcgtacagttcgatatatcgttcgcttacgctctcagcatattcatcagtaatctcaggcatcgtttgtcctggttcattcatgaagttatgttcgatgagccattgacgaacaaactctttagacaattgcttctgtggttcaccttttgccaacttctcttcatagccgtcggcatagaagtatctacttgaatcgggtgtatgaatttcgtcaatgaggtaaatctttccatcacgttttccaaactcgtatttggtatctaccaagataagtccttgtttggctgcaatctcttgaccacgtgcaaaaagtttccgagtgtagtcttcgatgaccgcataatcttctgccgaaaccaatccttgcttgataatctcttctttcgagatattcatatcatgaccctcatcagcttttgtggtgggtgttacgataggttcggggaatcgttcgttctctttcatcccctcgggtaatttcacaccgcacagttctctggctcctgccttgtattcgcgccatgcactacctgtgaggatgctacgaataatcatttcaacacgaaagccctcacacttgatacctaccgtaaccatggggtcgggagtagcaagtttccagttggggcaaatgtcttgtgtcaaatctaagaacttggcagctatttggttcaatacctgtcccttgaaaggaatacctttcggcaaaacaacatcgaatgcggaaatcctatccgtagccaccatgacaattttgtcatcgttgatgtcatacacatcacgtacttttccgtgataaacacttttttgtccatcaaaatggaaatcagtctttgttaatgctttcattgttgtaaattttatctttaatcggttgattttcttcattctcttctctttgctggtcgtatgtctcgtaggcatgaacgatgcgcgttaccaatttgtgccgcacaatatctttctgtcccagttctaccacagaaataccttctacgttgtgtaggatttctaccgcttctttcagtccgctcttctgatgtttcggcaggtctatttgggtaaggtcaccagttactatcatttttgtattccatcccatgcgagtaaggaacattctgatttgggcaggcgttgtattttgcgcttcatccaatatcactaccgcatcgttgagcgtgcgtccgcgcataaaagcgagtggggcaatctggatgatgtttttctccagcatgtcttggagtttcactgcgggtatcatgtcttgcagcgaatcgtagagcggctgtaagtagggatcgattttatctttcatgtcgcccggtaggaagccgagtttttcgcccgcttctacggcaggacgtgaaaggataatctttttcgcttgcttttctttcaaggctcttaccgccaaggcgatactgagataggtcttacctgtacccgcaggaccgatggcaaataccatgtctgactgatgataggcatcaatcagttgctgttgcttttcacttcggctcttgataggtctgcctgcaatgctgtacaccaccacacctttcactgcatcggctttggtcttatggtcgtgtacaatatctaagatatcttcctccgtaatggcgttgtacttcacaatatgctttcgcatcagttcgatatcctcttcgacctttgccatttcttcttcgtctcccaaaatacgaattacgttgtcgcgagctactatgcgtagttttggaaaaagcgacttcatcatttgcaaatgaccgttgttgacgccataaaatgctacggggtcgatgtcttcaagaacaatatgcttctctatcaatgttgtaaggtacttttaagtgatacttttatggaggtgtttgttgccttttaatatgatgatgcaaatgtacgaaaaagattacagactaccattttaccacttgagtttttttacttacagggataaaaagtccatgaattttgtcgatttggttcgatgtctctttctcttcttgcactttttctttatggcaaggatattctaaggaagttctcgtccatgattttcacttttagatgtagcttttcgttcggtagctccatttttatataattattaccataaagcattaaaaaatataaaaaacagaaacaaatcctaaatctcatgatgtttttcgtaactttgtgcttcagatatccaattcaatgaaaatttcaaaacaaaaatatcttcagggctttgcctttgttgtcgtcttgttaggcatggtgcgatgtatctttccacaggttgcaaccgaccgaagtcaaggtacggcacaactttcaaatgcccgccagctcgactctgcccaagccagtcagcaaactaatcgacccaacccatcgagtcctgccaacatgccaacgcaacgaaccacggcttctcgcttctttcgtgctgatgggagtgaggtgaaaaatcgtatctatagtgtttccaacttttccaaagcctttcccgaccaaaatgatgttcagttggcttcggctacccattggggagttgagcctgtgaccaatcgcgaagaggcagaaagtcgcaaggcagagttggtatatgtgggtgccaatccatttttttatgtagaccgtctgaagagcagcattccttatttggtgccacatgcagccgttttgctgcaagatattggtagtaacttctttgatagcttgcaaataaaaggtattccacttcacaaaattatcgtaacgagcgtcatgcgcagcaaggcagatgtagagaaacttcaaggacggaattcgaatgccaaatccaatagctgtcatctctatgggacaacctttgatgtcgcctacaatcgttatgtaaccgtgcaagaacctaacggtccgtcacggcgcaaggtacgcaatgacagtctgaaatgggtgcttagtgaggtgcttaatgatttacgtcagcaaaatcgctgccatgtgaaatatgaagttcatcaagggtgttttcatattacggtgaagtaatttgtggacgagtaagtagaaatattgtccttcggctcatcacttttccctttactttttatttcatttcgtaaggcttttgtggaggtagcggctttcctttttcatcatagccttgctctctcaccatccagcgttgttgagagcgtggggcatgagggttgagacatttcacggtctggcttaaaacataaccttcttttgtcttctcaatcttaaaaccacgaccaagttgtgtaaaatgtcgatttttagaatcgatacgccacagttcaaaccgctgttctaacgcccatcccatcttttctcccctgtctaagaccacaaacatgtagtcgccaccattactaatagacgtggacaccaccttcttataagtgtgttgattaaagtctaattcttcgttgatattcaacaccacatccaaacaaaatattttttcgccctgaatgtaatacaagcaatggcgctggttgtcggtgtacttcgccaacacggtagctccttgcggcaaatgtcgtgctgccacccgcacccgattggcaataggagtctgagctgccaaacaggtacacatcattaatatgagatagagcgtcttactgcgcttggagatgttcaccatgcctgcaaagatacttcaacttactgggaaaaacaaaaaaacaagaaaaaagtcacaccaactttcataacttgttaatttgtacaaaggcatgcgagtagttgaagttttttttatacatttgcactcccgactcaatcgttcttcttgataaaaacagtacatgatatggcaacacccaagaccaaaaaaacgactccgatagatactacctatgcgcatgttcaacctcaagcaaccgatgttgaacgtgtagtgttaggtgcattgatgattgacaaagatgccttttcggttgtttccgaacttatacgtccagagaccttttacgaccccaaacatcagaagatttatcatgctatccaaacccttaacatggatgaaaatcctgtggatatcatgactgttatagaccaactcaagcgagagggcacccttgacgagattggtggagcaccctatgtattagagttgagttcgcaagtggcttcgtctgccaatattgaatatcatgccaagattattgcgcagaaatcgttggcgcgccaacttatttcgtatgccagcatgatagagaccaaagcctttgatgaaacgcaagatattgccgagttgatgcaagaagccgaaggtaatctcttcacgctttcacaaaccaacatgaagaaggattacacccagattgaccccatcatcgcgcaggccacagatattttgcaaaaagcctctgccaatacgggcgaccttacgggcattccgtcgggcttcaccaaattagatgagattaccagcggatggcaaaagtcggatttggtgattatcgcaggacgtccagccatgggtaaaacgtcttttgccctgtctattgcaaagaatattgcagttgataataacgagcccattgctttcttctctttggaaatgaacaacgtacagttggtgaatcgtttgatttcaaatacttgcgagatatcgggtagcaaaattttgagcggtcagttgtcggatgaggagtggaaacgatttgacgtcaaggtgcgcaatcttacaggtacacctatttatatagacgacactccagggcttagtatctttgaactgcgtaccaaagctcgtagattagtgcgcgaaaagggggtgaagctcatcatgatcgactaccttcagttgatgaatgccaacggtattcgctttggtaaccgccaggaagaggtttctactatctctcgctcgctcaaaggattggcgaaagagttggacattcccgtattggcactgtcacagttgagccgtaatgtagagaaccgagagggattggagggcaaacgtccacagttgagcgacctccgtgagtcgggtgctattgagcaagatgccgatatggtgctttttgtgcatcgcccagaatactaccgattgtatgaagatgctaacggagtagacctgcgtggcaaggcacaaatcattatcgccaaacaccgtaaaggtgctacgggcgacgtgctgctcaacttccgtggcgagtttactcgttttgaaaacgtggacgatcggtattcaatgcctgttcgcgagggaggcgagtttgtggaatcgcgcatgaacgacggctttccgccgccacctccagacgattcaaccccttttaatggaatgacgtcgggggaaaatcctccattttaagagcgtaccacagagaggaaaggccgccttgcaaaaccataaaggcggcgaccaaaagttctgaatttacacttctatcgcacttcttttttccacttattttcccctctttattaactcaatgcttcaaatgaaacgttttacagaatttcataacttgctgataatatcaagcttgtgcgtgtgtgttcatttttattctttacctatgcacgcacaagaccatcaaacgctccgtagtcagctcaaggaagccaccgaggagttatcttactatcctgatagtgtcgatttgcggttgaaaaaggcagctctcaatctacagttggagcaatggcaatatgccaaagacgagtacgaccaagtgttgcgaagtcatcctgataacatcgcaggactgtattatcgtgcctatgccaaccaacagttgggaagatataattttgcacggttggattatgaaaatcttttgaaagtggtgcccggacatttttcggcacaattaggcttggcgctgctcaatcagaaggacaagcatcataccgaggcgatgaatcaaatcaaccgtttggtgaatcagtttcccgatagtgccgttgcttatgccgcacgagctggcatggagcaggagcaaggcatgacagaattggcagtatatgattataccgaagccttgaaacgtgatgcggacaactcagattacttgctcaatagggtagagctgtggctaaaattgggcagaaagcaacgggcaaaagccgatttggacaggctggtagaattaggtgtgccacgacccgcattgaaaaagtggtaccgacaactgtaacagcgaagtgtactgctcaccaaacagcggtacataatgctgacttattttgaaatacagtcttttcttttgtcctattattttaccaaaaatcgaccatctaaaatcttcaaaatagaaaaaatcaataggcaaatcaataacaaaattggactgattttaacaaaatagatgtcttttcaagttaaaatattactctaacgctcttggaaacactctttaagggtgttattcacatgcttcagcacacctaaagcatgcaaattgttagcttatctcaatgccttaaccgccaaaaagcggtaaaaataggattgaatagaggaactgcaagtataacatccttaacatcaacgaattatgaaacttgctcatttttcgcgtatttgcaaccaactttgatgttggttgcaaatacgcgagttatgagaggcactttgtaaagaaaattctgaatttattattcatttatgtagcgtaccaccaattctgcaaatgaggtttttggggcatttttgttggtgattttgggcgtaccaatatcatccaacaaagaatgagttgtggttgctccttttcgtcataaacgttgtttttatcaatattttatggaagatgagtaaatcaagcggtgaaaatgataaaggttgtcaatgcttagttcatgctttatgacagctttatctccaaaattttatcacttaaaactcgcagttcttatccttttttgttatatttgcatcaacacactgagagaacagtggagaagtgaaacttataaaacgatacaaattatgcaaaaagaacgaattatttcggcaaccatattggctgtcagcattgtaatattgggttttgcactcaaaggtggtatcgataactttgtgaataaagaccacaaagtgacggtgaaaggactttccgagcgtgaagtagaggcggacaaagtgacctggcctatcctgtcgaaggagttgggcaacgacttaccagagctatatgagaagattggacacacgcaagccattattaagaaattcttgttggacaacggaatcaccgaaagtgaaattagtgtcaatgcgccatcggtcattgatatgaatgccaatcagtattcaagtaatgagtcgcgttatcgctataacatcacctcatcaatcacggtgacctcaaaaaaggtgaagttggtgagacaaattattgccaagcaaggcaatttgttgaaattgggtgttgccattgttgaaggaggatatgaaaatcctgtgaagtacgaatacgttgctttcagttcgatgaaacctaagatgatgcaagaagccatagagaatgcggagaagaccgcacaacaatttgcggagaacagtcatagcaagctgagcaagattgtaagtgccgaccaaggacagttttctattgaagaccgcgattccaatacaccttatattaagaaggttagggtggtgaccactatcacttattcgctaaaagattaagcatcgtgtttgcatgcaatgcgctgaaaggcgcaggtgtgcgtgtttgacagtactatacaaatggaatgaggtgcagaaagtgtaattgctctctgcacctcttttttcatttgccagcttcatgaatcgttacacgatgatgactttatcagcatggtgtcaaccagcgtttactgtacctgaacgtctttgccaaacggattgagagccagtcttgccattttgaaatgctgatggccaaaggggatgccgataatggtgaggtatagacagacgccaaaaaagacatgtgttatactaatccaaattccagcaaacacaatccatatcaaattcatcaccgcgttgagacaaccgttgccttcggatgtgcttaccaccttagagccaaagggccaaaggatgaaaaagccaattttccaagcctgtcttccaaagggaataccgacaatggtcagtataagaaggcatcctccaaggaaatattgaagggcagcttctacacctccaaagacaagccaaaggacgtttccaatcgttttcatatgtacagattatttgttttttagcaaatcgcgaatctcttcgagcaacgtctcctctttggttggtgctggagcagcaggctcttctttcacttcctcttttttcttagagagcgaattgatgcccttgatagccaaaaagatacagaaagcaataatcaggaagttgacaacctcttgaataaaattaccatagttcagtgtgaccgcttccatggtctttccatcctcggctaatttctcacccagtttgatacttaaatcggtgaagtcgacccgtcccaaggcaaaacctaaagggggcatgatgatgtcattcaccaatgaggtgacgattttaccgaaggcaccgccaacgataacaccgactgccatgtccatcacattgccacgcatggcaaattccttgaattcatttaaaaatttactcatagtcaattatattttgaatcatatcacattaaaaatctcatttttctgtcttaagtagtcattatgcaatgtacaagtgacagaatgacttataaacctttcttttttaagaaatttaagactaattgccactgcaaatatagaaaaaaaatgtaactttgcggttgaaaagaagaaaatgtttcagggacgatgtcttcttcgatctacatataaagttgtaaggtaaattaagattttgttcaatagcaataaaaaaatatttattttttaaccctttaataaaaagaaagtaaaatgattaagattggtattaacggatttggccgtattggtcgtttcgtattccgtgcttctttggaagaggcaaatgctaaagacgtagtagtagtgggtattaatgacctttgcccagtagattacttggcttatatgctgaaatatgacaccatgcacggtcaattcgatggcactatcgaagctgacgtagaaaaatctcaattgatagtaaacggcaatgttatccgtgtaacagcagaacgcaatccagctgacttgaaatggaacgagattggtgctgaatacgtagttgagtctactggtttgttcttgaccaaagagaaatcacaggcacacatcgacgcaggtgcaaaatatgtagtaatgtctgctccttctaaggacgacactcctatgtttgtttgcggtgttaaccacgataaatacgtaaagggtacacagtttgtatctaacgcatcttgcaccaccaactgcttggctcctatcgctaaggtattgaacgacaagtttggtatcactgacggtttgatgactactgtacactctacaacagctacacaaaagactgttgacggtccttcaatgaaagactggcgtggtggtcgtgctgcttctggcaacatcattccttcttctacaggtgctgcaaaggctgtaggtaaggttattcctgagttgaacggtaagttgactggtatgtcaatgcgtgttcctactttggatgtttctgtagtagacttgactgtaaacttggctaagccagcgaagtacgaagaaatttgcaaggcaatgaaggaagcttctgaaggcgagttgaagggtatccttggctacaccgaagaggctgttgtttcatctgacttcttgggcgatgctcgtacctctatcttcgacgctaaggcaggtattgctttgaccgacaccttcgttaaggttgtttcttggtatgacaatgagattggttactctcacaaggttgttgaactaatcaagcacatggctaaggtgaatggctaattaaaaatagtcgtttaacgataaatatgccgttcgatttctgtcgaacggcttttttttattatatttgtagcgtgaagttgttaacaatcttaggtcctacggccagtggaaagactgcctttgctgcccagcttgctgtaaagatgggaggcgaaatcattagtgcggacagtcggcaagtgtaccgtggaatggatattggcacggggaaagacttagctgattacgaagtacatgggtacagcgttccttatcatttgatagacattgtcaatgctggagaaaaatataacctctttcaatatcaacaggattttcatgtcgcttatcaggacatcgtgaacagagggcgacagcctatcttgtgtggaggaacaggactatatatagaagctgtgctgaaagggtatgcactttcgccagttcctcaaaaccaagaattgcgcaacagcttagaaggatgttcgttggaagaactcaccgagcgactcactcggttgaaagcacagaacaactcaacgatgcacaaccgttcagacgtggatacagcacagcgtgccattcgtgccattgagattgaaatgtacaataaagagcatcctcttgagaatcgaagccttcctcccatagagacgtgtatcatagggttagatattgatcgcgaaagcagaagagcaaagattaccaaccgactcaagcaacgactcaaagaaggaatggtagaagagatacaaggattgttggcaagaggaatacctgctaacgatttgatatactatgggttggaatacaaatatgtaaccgaatatataataggagagctgtcatacgatgagatgtttcagcgtctcgaaatagcgatacatcagtttgctaaacggcagatgacatggtttcgaggcatggaacgcagaggattccagatacattggatagacgctttgttacctacttcagagaaaataaaacaagtacaacagatatatggcaattgacaacaatcgatggggcatcttatattgtccaaagacaaacgctttcagaccacaaaagcgctgggaaaagatagagaaatatctgaaggaacagcaggtggcttatgactatgtgcaaagcgaaagtgcaagtagtgtgcagcgactcatcaaaatgttcatcaacagtggctacaaaaccattattgtggtggggggagactctgccttgaacgatacggtgaattgtttgatgcaggtagatgcagagacacgcaaccaaattgtattgggattgatacccaatggactaatgaacgactttgcacacttttggggaatagaggaagatgatgaagaaaagcttgttaaagcgttcaaacgccgtagagtgaagaagatagacatgggctgcatccgttacaccaatacggaaggggttgcgtgtcgacgctatttcctgaactgcataaacattggatatgtggcttctatcatgaatttgcggcgaaaaatgaaccatatctttggttcgcgcgccttgtctttcttgttttcgtttggcttgttactcttccagcgtttagattataagatgcacttgaaaatcaataccgatgtcatcaaacgcaaagtgatgaccgtttgtgtgggcaatgctttggggtatggacaaacacctaatgcagtgccttacaatggcctgttggatgtgtcaattgtctatcatccagagatgacgcaactctttgagggcatttatctgtttttacgtggaaagtttctgaatcaccgcagtgtgcatccttatcgtacgaagaaagttgaagtgtttgcagccaagcgtgcgatggtgggcattgatggacgactcatgaaaacgccagtcaataagtttactatctcgattgccccagatgtcatcaacttcttgctacctgattagaacaaaaaaaggaaagaaaaaacaaaaaacataggaattgtttcatatttactaaaaaattgagtaactttgaaagcgcatgataggaatctctaattaaatataagaggtgccgcatgaaacgttaaatctataaaaaaacataaatcacacactaatataggcctatgagttacattaagtttgaaaaggccctgatgacgaatttggactattcgctccaaagagaaatactgcgtaccaatcgatcgggagcttatgcgtgttcaacgattgtagattgtaataccagaaagtatcatggactgctgaccgttccaattcctgatatcgatgaagacaaccatgtcttgttatcttcgttggatgtaaccgttatacagcacggtgcagaatttaatttaggtcttcataaatatcagggaaatcatttcagcccaaagggtcacaaatatattcgacagtttaattgcgataaagttcctacgacgatatatcgagtgggaggtgtcttactgaaaaaagaggtggtgtttcagcactatgaagataggattctgatttgttacacattgttggatgcacattcatcaacgacactcaggttcaaacccttcttagcttttcgaagtgtgcgacagtttacacatgaaaatgcaacggcaagtcgtgcctacgatgaagtacctaatggcataaaaacttgtatgtatgcaggttatcccgatttatacatgcagttctctaagaagaatgagtttgtttttcaacccgattggtatcgtggagtagaatatcctaaagaacaggaacgtggctatgcgtcaaatgaggatttgtacgtacccggatatttcgagatgggaattacaaaaggggagagtgtagtctttgcagcttctactacttcaagtgataccacaaagatgttatccgtttttacacaagaagtagaatctcgaagtcctcgcaataactttttccattgtttggtgaatgcggctcatcagtttcatattcgagcctcagaagatgaacgctacctcattgctggctatccttggttcaaatgtcgtgctcgtgacacctttatagctttgccaggattgacgctgtctatcgaggaaaccgactattttgagaaagtaatgaagaccgcccttcaaggtttacaagaatttatgcaaggagaacccctctctgttaaaatctatgagatagaccaacccgatgtattgctgtgggcgatatgggcgattcagcaatatggtaagtcggaaggattagagaagtgcttatcactgtatggagaaacggtacatcaaatcattgaatatattatcaacggtcgccatcctaatctcagtttgcaatccaatggattgttgaaaacgaatggtaaagatagacctgtgacttggatgaactctactgtgaatggacgccccgtgattccacggacaggatatatcgttgaatttaatgctttgtggtacaatgccttgaaatatgtatcggcgttgtgccttgcagctcatgatcaggaggcagctaaccactatgagtcgatggcagagaaatgtggagaagcatttgttcagaccttttataatgattgtggctatctcttcgattatgtggatgagggctatcaagacaagagtgttaggccaaatatggttttcgctgtggcttttgactattcacctttgacacaacaacagaaaaaaagtgtattggatatttgtacccgagagttgctaacgccgaagggactgcgctccctttcgccgaagagtgtgggatataatccaatgtatttcggtccacaaacacaacgtgactatgcctatcatcaaggaacagcgtggccatggttaggtggcttctatatggaagcaaatttgaagctctacaaacgaactcgtttgagttttatcgagcgtcaaatggtaggatatgaagatgaaatgatacgccattgcttgggtacaattccagagttgtttgatggcaatccgccctttagtggtcgtggtgccatttcgtatgccattaatgtggctgagattctgcgaacacttgagttattggaaaagtataaatattaaataaaggaggacgaacagatgaaagtattaatgtttggatgggagtatcctcctcatatcttaggtggtttaggcactgcaagctttggtattacggaaggtctgcatgctcaaggcgatatggacatcactttctgtttgccaaaaccttggggcgatgaagaccaatcgaatgcccatatcttggcaatgaacaatgtgcctgtggtatggcatgatgtagattacgactatgtcaaaggaagaataggagcgattaccagtcctgaggagtattatcagctacgtgaccatatttatgctgacttcagttacatgcaagtgaatgatttaggatgcatagagttctctggaagatatcctgataatttacatgaagaaatcaacaactattctattgtggcaggtgtggtagcacgttcaagggatttcgatattatccacgcacacgattggcttacttatcctgctggaattcatgctaaacaagtgagtggcaaaccgctttgcatccatgtgcatgctacagactttgaccgtagtagaggaaaagtcaatcctactgtgtatggcattgagaaaaatgggatggactatgcggactgtattatgtgcgtgagtgaactgactcgacaaaccgttattcatcaatatcatcaagacccacgcaaatgttttacggtacacaatgctgtctatccgcttcgacaggagttggaagatattccacgccccaatcatgaaggaaaagagaaggtggtgacattcttaggaaggttgacgatgcagaaaggtcccgagtattttgtggaagctgctaacatggtgttgcatcgtacgcataacatcaggttttgtatggctgggtcgggcgacatgatggaccagatgatttacttagctgcaaagcgtggtattgccgaccgttttcactttcccggcttcatgcgtggcaaacaagtctacgaatgcctgaaagcctctgatgtatatgtgatgccatctgttagcgaaccctttggaatctccccacttgaggcgatgcaatgtggcacaccctccatcatttccaagcaaagtggatgtgcagaaatattgcacaattgtatcaaggtagactactgggacatcaatgctttggcagatgccatgtattctatttgtcacaatgaaagcttgttcaaatatcttcaagaagaaggcaagcgagaagttgaccagattacgtgggaaaaagtaggattgtggattagagaactttacgaacgcacgatgggatggcgataagttctatcctacagaaaagatattcatcagtataaatgataaactcattagattatgaaaacaatttgtctttatttcgagatacaccaaaacatacaactgaaacgttatcgcttttttgatattggtaccgatcattactattatgacgactacgagaatgagcgtatgatgaccgagattgcagaaaagtcttatatgccagctttgaacaccttgttagaaatgattcattcaagcgataagtacttcaaagtagcattctctgtgtcgggtgtggcaatggaacaaatggaaatccacgccccacaggtattggagaagttgcaagagctgaacgaaacaggctgtgtggaattcttagcagaaccctattcgcatggattagcttccttagccaatgaagaaagttttgcacaagaagtgaaacggcaatgtcagaagatgcacgaatactttggacaacatcctaaagtcctgcgcaactcgtcgctcatttatagtgacgatattggattgcaggtagcaaatatgggctttgaaggcatgttgacagagggagcgaagcacgtattgggctggaagtctcctcattacctttatcattgtgccttggcaccccaacttaagttgctgttacgagatgttggaatgagtgatgacatttcgctacgcttcaataacagagactggccaggctatcctttgtttgccgatcattatatagatcgcattgcggatctaccagaacgtgagaaagtggtcaatatctttatgaacttgtcggctattggaattgcacaacctctgaactccaatatcttagagttcttcaaagcgttgccagcctgcgcaaaggaaaagaaaatcactttttctacaccgagcgagatatgcgccaatatgaatactgttgacgcattagacgtgcctgatacgttgagttggtttgatgaagaacgtgatgtgagtacttggttgggaaatcccatgcagcgtgaagcttttaacaagctctacagtgttgcagatagggttcgcattgccaacgacccacgtattaaccaagactgggattacctacaagcgagcaacaacttcaggtttatgaccacaaaatcatctgctgtaggtttcaatcgtggtatttatagcagtgcttttgatgcctttaccaattatatgaatatcttaggagattttatcaatcgcgtaaatactttgtatcctgaagatattgataatgaagagttgaactctctactcactacgataaagaatcagggcgaggagatagtgatgaaagagaaagaaatattgcggttgcaaaacaagatagagaagattgagaaagagagtggtaagttgcgtgccaagttggaagataaagagaaaacaaccaatgacaagccagccactactaaagtagaagagaagtaattcgatttgcaaccaggcatctatagaatgcctacttcaagaaaatagccagttgaaaagaaaatgcttttcaactggctatttttttttctaaaggtgtgagcaatgcctcgctaactttattttattttgtaagaaagtccaatggtgccgtacacgggataaagcgtttgctctatggttttgaatgcgcttttatgaatacctgtcaatccccaattcacatcagcgtacagtccgatgcgacgatagacgtgaaaatcaacacccgtcactataccgaactgaaagttgcgcatgtccgaagaaaagtcgtagtcgccgcgcgttcccagatcattgcctaattctatttttgcaccagtaggagagccaacacgcaaataaccattgtaagcgttgcccgtaaacgatttggtaagcagatacgagccatacactccagcacgtaaattgatacggggatgaacgtgataacttacttgcacgggaagtgtcaccatccattgccgtacctcggtgtgtacatatccagtaaacatgccttccatggcactttgaccttgtaccattgccatgtgataatttttaaccctggcatccaccaacatatccttgttttcaaatcgaagacctgaactccatgaccaactttcgttgatggcttgcgtaccatctaattcaaataccgagttgttgggcatcttatagccttctaatgaacgaatagaagcgggtaacccaaagggcgcagtaccacctaaattatatcctattcgtgcggttacttctaattgatgccaccaagattctgccaaacaggacagggaagtaaatatactcaaaacagtggctaaaataatttgtttcttcttcatcttttattactcctctgaagtacaaataatacgaatatcgtcaatacatagttcgcttccaatggcaccttcaaacttggcaccatcacggcttgatgagaaaacaatcgccaaactatatcctctattctctacgatattctcatcaatgggttgatgatattggaaagatatgtcaaaaggtgtccattcagaggtcgtttttatattctccatttgggcaatagctacaatgtgttcactggttaggatattgttaccgtcgagaactatttttttagatttgccctcgccatcgccctcaactactgtattacgatagagtacggcgtatattgctgcttggtcggtgcgatctttcaaaatcttttgttgttgattctgaaagtttttgccgggttgatatttgtaccagcctgtaaacttgataggttttttgtcgaatggaataccaaactgggttgctttgttgggatctaccaacgattgtccagcatcgaatttaccaaaaaacatatttcctgcagcggtaggtttaccaaacatagctcccaaagctcctgtactgcgagttgtcagtcgaacataagcaccgtggtgtccaccttctgaaactggtacactgggatattcatctgccgatttgtcacccgcagcaatactgaaggcaatgttacccgttgcccaataatcggtctcctttccattttcgtcaaagtcataccacaaatagaactttttgtcggtaggttctattctgaaatgttcaaaatcaaagtgaatggtatccttcaccgtttgcgaagttgggataaaactaaccttgtatcgtctgctccattgtttatcttccgaagttacagtatatgtaacggagcctttgctaaagtcgtgtgtgcttccgtttgctggctgaatggttgccccttctgttatcttgaattggggagcaatcgctttcaaatctgctttacgtcttaccttaaagttaatgatactatctcctgacaacacatcaatttgtcgctcggcctcgttaaaaaacatctcttgcaattgattgtcagcaactctcacttctaaaatgtcgcattcggcattcagaggttcttctttgaagcacgataccaacaggctgcacactgcaaccaagcataaattgcgataaaatttcattgatataacactttattatttcgttgcaaagttaaaggataattttggatggcacaaacgaaatgttcaaaatatagccttttctattccaaacgataccaattgaagcaagatacaagcacaccgttcattctcttgagaaacggtatttttactacgaactacaccaacccaattgtatatgcagcgttgttagtatgctgtatggataatgaataattgctgaattttctttacaaagtgcctctcaaaactcgcgtaaaaacaatcaacggcaatgttggtcgcaaatactcgaaaaatgagagactttcataattcattgatattgaacaaattacgactatactatttcgttacttgccgatttttagccttttttgttcgctaaagcattgatctaagctaactatttgcatgctttaatgccgctgaagcatgtgaataacacctttattacatgtttccaagcgcattaactcaatgttctaacgtttcgagacgtttattttgttaaaatcagcgcaattttgttagtcacttgcctattcattttttctattttgaagattttcaatggtctttttttggtaaaataacaggacaaacacgtctcttcattttatcaagaatggtatgtttttttattgaatgagtcgtttgttgtcaaaaacaattatgtccttttatattaacaacgaattgaaccaatacaacaaattcagttgttggtatcaatgaacgctggcgttcaccaaataaaaacaaatttagcaagaccatatttttcttacaacaaataaaatttttgcgagaattgacgacacacccgtgtcgttccgtgcccttccattgctacaatgagaaatatttttccgtttcttcgcaacacaaggtgagattgctggtctaacaaggatgtttttttaacaatgaatgtgaatttggcaaagacgtacaacatgtttatgttggtagatttgtttcatttgcagaacgcttgcgttcattgtcttatttagttgattcgttacattggttttatttgttgtttaacaacattgtccttatataaaaaatccgttaggttttaggttgttttttagttgtactcaacaacataaagcctaattaaatatcgctgttgcgcataggtcttggtagagacgtgaggaggactttccattgcttattccgataacataagtttatttggaaagaagccttatccatcatcattcccgatttcccaatcgaatcaagcaacattacgtttttcacttttacaactactgtggctgtcgtgtctccagattgatagttaatatcttcgagttgatgtgaagctccttcgtcttgagcttttagcaaatcaatgtcttcttgcgtgatttgcgaacctgcatactcaatccatttctttgattcgggagtgcaatagggcaaagcctcgttcagttgccaattaaagaaagtttctgcaaaaccattggcagcctctttgagttggggttcatctttatgcgatgaacaggctgtaatcagcaagccgctgacccatacgcacatactgaaaatgattaactttactttcattcctttcgctttcctaaatcatggcaaagatagctaaaaatttgcgcatatcgtttgattttaatacttttgtaacttcaaatttatattcatgttgcaatttatatgcatgggaagcggtagcagcggcaactgttattgtttatttacagagaacgatggactgatgattgatgctggcttaggcgtccgaacattgaagcgatcgttcaaggaaaacgggctgtctctttcccatattcatcatattattatcactcacgatcacgccgaccatatcaaatcggtgggctcgttgagtcgcgaattttcgctgcccgtctatgcgacagccaaggtgcatgacggtattgagcgaaacttttgtgtacgaaacaaggtagcacccaacttgaaacgatgtttcaccaagcaagtaccacttcaggtgggcgacttcttggtaacacctttccatgtgccacacgacagttgtgacagtgtgggctatcgaattagttgccagggaattatctttgttctgatgaccgatgtaggtcatattactgacgagatgaaagaattcattgcagaagccaattacttagtcattgaagccaatcacgatgaagatatgttggcacaaggaccttatcctgcacacctgaaagccagaatagccagtcaaacaggtcatttaccaaatagtgaatgtggaagagctttggcagaaaacatgacggcggagttgcgacacgtttggctgtgccacttgagcgaagagaataatcatcccgaattggctcgtaaaacggtggaacaaattctgcgttcgtatggcattgtggcaggaacggatgtccaattagatgtcttgaagcgaaaatctcccagcttgttgtaccaactttaattgttgggatatgggtttttcattcaacaacaaattgaaccaataaaacaaatccgtttgtaggaatcaatgaacgctggcgttcaccaaatgaaacgaatttagcaaagtcccacaacatgttgatgtcggctgatttgtttcattcgcagaacgcttgcgttcattgttgtattgcgtttattagtttcttttgttacatttgttgttcaacaatattactctacaatgaaaaagatgggtagttggtgtggctgttcgcaaggatagtttctgttgatagccctggatacgacaagaagttttgttcaaataaaaactgctatgccatcatttctgtttgtaacttcttgatagatagcaggatatatcttgacagacaggtaaaacatttatccctgtctgtccttctgtcgactcttaggagtcattcaccgatggagtttattcagcagccgttgaagatttcaacggattccaaccttgtgctttcaaggcaaattcttgattgtctcgagtgactaactgcgctccaaggttggcatgggtaatatgtccaatcagtttgatgccttccaaggcttgtattttttcatggtcaccaatgggtacggtaaacaataactcgtaatcctctccgccattgagtgcgcaggttgtgacgtttaggttaagttcttctgccatcaccgctgtttgatagtcaatgggtagatttttttcatagattctgcaaccgcaattgctttctttgcagatgtgcaacaactcgctgctcaagccgtcagagatgtcaatcatggctgttgggtggatgtgtgcagctcgtaaggtgtcaataatgtcacctctggcttcggtttgtagttggcgttgcagcaaatattcttttcctgcgaagtcgggttgaaagtttccgaggctgttcaaatcatgggtgagttttgtgacaagcgcttgattcttttgctctttggctttccgaattttcgaacggatttcgtctacctgtttgtagtacaccgacttttcacgctccagcaacatcaatcccatataagcagcccctaaatcaccgctcacacaaatcaaatcagtgtctttcgcaccatttcgataaacaatctcctctgactttgcttcaccgatgcaagtgatagagatggctactcctgttcgagaagaggttgtatctcctccgacaatgtctactttccacttgttgcaagccatgcgcaaaccattataaaaggcttcgatatcttctacactgaaccgcttgtcaatggctaagctaaccaacatttgccttggcgtgccattcatggcaaacacatcactgatatttaccattgctgctttgtaccccaaatgttgtaagtcaatgtaagtgaggtcgaaatgcactccttccattagcatatctgtggtggtaagcacttcactgtggggatagtgcatgacagcacaatcgtcacccacacctgtcagggttgaactgttttgtagttgaatgtcttttgtgagttgttctataagtccaaattcgcctaatttagaaattgcagtcatgtaagaatgatttgtgagtaaataagtggttgttttgaatgaacaaaattatctattggtgatatgaaatataaaaggagatgcgctaaaacatcgaagaacgtggcgtatgatagtctccatttttaacagatggtgtgccttcgttccccgatagtttcaactgtggcggcagtgcttagctgcgcttgataatttctctcatgatttcggtcatcagcggttgtgccttgtttgcagcctcttgcacctcttcgtgagacacttctacgggcttaccctcaatacccaggtcagtgatgatgctcataccgaagaccttgatgccgcaatggcgtgctacaatcacttcgggtacggtgctcatgcctactgcatcgccgcccaagcggtggtacatagcatattcggcaggagtttcaaaagtaggtccctgtacacccacatagacgccatgaaccacacgaatgttcttttcttttgcaatgtcgtcagctaattggcgtagatttttatcgtaagcctcgtgcatgtcggggaaacgtggacctgtggggaagttctttccatgcaaaggatgttcagggaagaagttgatatgatcgtcaataatcatcaaatcgccaatttggaatgaaggattcatgcctcctgacgcattagaaacaaataatgtttcaatgcccaattcgtacattactctttcggggaaggttacttccttcatgtcatatccttcgtagtaatgaaatcttccttgcattgccatgatatccttgccacctaatttaccaaaaatcaatttacccgaatgaccttcaacggttgatacggggaaattagggatgtcttgataaggaaattcgtaactatctgttatctcggaagctaattgtcccaggcctgttcccaagatgattgctgtctttggacttgtcgtcatcctttcttttaaccaggatgctgtttcttgaatttttttgtacatagctaataattttatggttgaatgcttcctcgctgtctaagaggaatctaatctgaatcggtagaatgtgtaaggctgcctttacctcatccgtcataccttcgatgcctgtcaaacgactggcatctttttctgtggtaacgatgattttgggcgcctccatctttgcaaatgtgtcattcaagtgcatgatgtcgttggaggtgaagcggtgatggtcggcaaaagccattggaagaatgtgcttacagtactttttgaggtcttccttcatgtgctggggagaagcgatacctgtgagcaacaatacattttgttgtttgagcgaccgtaaggaacattctttcttcgtgtcgaaagattttaactttccgtattctaaggcagtaaaaaataacgactggaaagggtagaggttaagattctttgtgagaaccctaaattccataggtttcaaatcttttggacacttggtaacaatgacaacatcggcacggtctttggcagatagtggctcacgaagtctgcccgcaggcaagagttcatcattcatgatgaaacgatgatagtctaccaacaggatgttgataccaggcttaacatatcggtgctgataagcatcgtccagcaaaatcacatcaacatctcgtgtctcttcatctgttgtcaggtgtgctatcccatttcttctattcttatcaacagcaatatagatatgtgggaacttacgtttcatttgaaacggctcgtcaccaatttcctgcatgggagtatcttcatgggcaagcacatagcccttgctttgacgtttgtatccacgagacagcacagcaactttcaccaagtcgcccaagaggcgcactaaatattccacatgaggcgtcttgcccgttccaccaacagcgatattacccacggagatgatgggaatatcgtatgcctgttgtttaagaatgcccatttcaaacatttgattacgcactctcacccctaaaccataaagccagcttagcggatagagccattcgttaatcttaatgtaatctccttcggttctcattcaaaatagattaggatgctttcttgtaaaattgtctatgacagttgtctgcctcacaggcggtatcaatgtgaataccctgacgaattactttatctgatgtttagataaaaaggaattctagcttgtaccatgttttgctgattcatggttttcagtagtgcaaacggttcgtaatagtcgcccaatgcagtgcgcatttgttcgtccaagtagtttccaccgccagtcatcttaaacaattgttccaaccaatcgtcccctccaggataattggatgtatgatatttgtctatcttcgccagcttggcagccttagcgatagccttatcaagtcctcccaactcgtctacgagtttaattttcaacgcatcttgtcctaaaaatacgtgtccttgtgcaatctcttcaacttgatgaatgctcatctttctaccatctgccactcttttacgaaacaaattgtatcccctgtcaatgtaacgtgtcaagtatcctatttcttcttcgttcatggggcgtgcatttgaacccatcaaagcgttgcggttggtctttacctcatcaaactttatgcctaatttttgcgtcaagagttgacttctgtcgggtatcatgccaaagatgcctatactgccagtcagcgtagtgggctgagctacaatccagttggcgttgcaactcatgtaataaccacccgaggcagccattccacccatggacactacgactggtttcttctttttcagttccgcaatttggtgccacatctgctctgacgcatatgcactaccaccgccggaattgattctcagcaccactgccttgacgtcatcatcgtctgcaagtgcttccaagtctttgcaaacagcaggtcccacaatggcgtgctgaccaccaaagatgccaccagtaatagggttatcaacgatgttgccatacgcatagtagacagctatctcatcaccatcgctcttttccttgacattttttatctcggcaatactcacttggttaatggggtcgtccatatccaaatcaaaagtcttcttcacttccttcttcacttcatcggtatagagaagaccgtcaaccagttttgcagaaacataatccttaggattgttaaaagtgatgagactatcggcgtattcatttagtttgtcgacactaatcttgcggctctggctcaccgcttgacatacgtttgcccacagaccgttgatatatgcttgtgtttgttcgcgattcggctcgctcatcttgtctgccgtgacgttttcggtagcgctcttgtatttgcccactttgatgacttgaaaacggatgccaaacttagcgagcaagtcctttatgaacattggctctgctccgatgccatgccagtctatcataccttgcggattgagaaagattttgtctgcaacagaggcaatgtaatagttgccttgtgagtaactgtctgcataggcaacaatcttctttccgctcttcttgaaatcgagtagggcgttccgaatctcctgcctactggcataatcagcaacgaacataccagattcgatataaattcctttgattttgtccgtttccttggctttcttgatagcggagagtatctcgtctaagcctaaacttccgaaagaatcttgtgcaaaaagcccaaatacattgtcgtcactttgctcttgaagggtgcctgaaaggttgagaaccaaaacactgttcttactaacattttgtgtggcctgtgtggatgttatcattccgataatgctcatcacgcctaaaatggcaaggataagcccaactgcaaatattcccacaatagtggctcctacatatttgaaaaattctttcataagttgaaaattatagttactgatgcaaatatagttaattttattcagtatgtcatgtaaaactacttttttttgcgcaatctatcgtacatttgtggtgatgaaaaaggttattgtcatgggtgcctcgtcaggtatggggcaagcgttagccaccttgttgtacaaagatggttggatagtgggcgttgcagcacgccgtatcgaagaaatggagcaatggaagttggaacaacaacagttaaatccatcaactactgctatggatggacaggataatgaaagaatcttcactgcccaaattgatgtttgtgcgccagaagctccgcaaacattgctcgatttgatacatcgtatgggtggaattgatctttatattcatgcttcagggataggtagacaaaatcctgaattgcaagaagatatagaactaaacacggtagaaaccaacggtgtaggattcactcggatgattggtactatctatcgttacatggcagtcaatggaggaggacaaatagctgtcatttcttctattgctggtgtgaagggtttgggtgctgctccagcgtatagtgcaaccaaagccttacaaaatacttatgttcaggctttggaacaacttacaaataataaaagtctaaggatacattttaccgatcttcgtccgggatttgtggacaccgcattgctaaaaggtggtgactatcctatgctgatgaacccgcaaatggtggctcgtcacatgttgaaggctatctatcgcaaacggcatgtttgcatcatcgattggaaatggcgcattttggtaagtctatggcgttgcctgccacgttgtatttggcgacacttcagactggtgaagtagctcacaattatgactatgaggaataaacgtcttgaaagctcttccttactccctcgcttatttagaaacaccacatcacttataattataaatgatgtggtgttttgcaaataagcgtatgccgacttacagatgatgaatcgtgtattgcaattgatctcctaagccaatggtgtatccttgcgaacaaaacactactcggttaaacgtgtcagcaatcaaaaagataggaagttgacgtgcatccttcagtttcatttggttgacaatttgcttcttgatactgccagaagcgtcaattccgaagatagttctcttgggtaattgtccaaattcgttagccttaaacttcttggcatcttcttccgactcaaaaagaagcacgaaaggacgattccaacgatcaaattctgcctttaatttagcaatatctctcagggcgtggttagtgggttcttgtcctacgccaatgatgccaagcacataatatcctctgcctgtctgtgaaagaaggctcacttcctcatggttgagtgtgaattttgattcgctatcaaagttccctatcacactgatttctgtggtcgaggtgcgcaaatgcaaatcaagcgttgtcgtttggtcctttttaatattaaaaatctgataagtggcttttacatttccgcttgccatacgagtgccactcacaaggatataagttccttcatctaacttcgcaccgttttcaaaggtgcttttccaagtggttccacctcccatatcaacctgtccttcctcaaaattgagcagcgttggaatgccattctctattttactaatggtgaaatgcgtgtaatatttcggattttccaaatacgtggaaggctggtagttgagttttagcaccccttgtggagcggtaacctgttgtttcgcttcaaaatcaacatctacccaagcctcatgggtgcgatattgaaccttggaagtaaccacatctttgcgagcttgaatattgagactgcgtgccaagtcgacaaaaaagatgtcgcgtgagcgagtgtcagtcagtctcgattgccatacacccataggcgtttgtgcaatgcgtagagccgttttatcggaattgatgcggatattcttctgcacccattctaccagcaatgcggggttttgttgaaatctttcgatggtagcggcatcgaagacttgttgcagttgctgtttgaaaggtcgtattatcatttcgttctccactcttggacagagttggtcgctctttgcgttgaaatggtcttcgagtatctccataggcatatcacgcaaatccttgtcactcaatgtaccaagcaacgccaatgccctctctttgtgtagaatatgttttttgtaaaacgcctcaattgttttccaattgccacgagctgttactaaaaattttgaaatctcatcatcattggttggttgatagaatgttgcttcgtacgccttccgtatactgtcttctgttgcaagccgctttttgttatgagcaatcatctcttctgtgagggtaggcagcacggcttgttctattggaggtacgatatcgagcgaatcgagtgcgaaagtcatttgttgaccatcggttgaagcatgacgtttcagtactattgtgacatgttggtctttgccaaacgaagccttggcgaaaccataatgtccgtttttggatgcccatatcaataagtctcctttgcctgcggtaagaaaagtttgtcctttttcatccgaatatttggtgactgcggtataaaattcggcataattgtaaattttgaactccactttggcatgatttacagggcgttgttgctcatcgacaatggtaaaatcgacacgtgctgtctttgcataattgtcgataaggttgatttctgtgaagtttgaggtacgtaacaccacctcttcaggaccgtgataatcgccaaaaactcgggtgtgcatcagcattgcccgtgatgcaggagcgttgaaccaaccaaggttgaggacgggttctggttcgcatgcacccaaaaagtaccatttcccgtctgcccaagcttctacccaagcatggttgtcatctgtgtgcgcccagcgtggggtgtacacctgacgggcaggaatacctacggcacgcaaggcagcaacggtaaatgtactctcttctccacagcgtccttgcgcatttttcatgcaagcgagtggcgaaagagtgcgcccatcagacggcgtataggttacatgttcatggcaccagtggttcacttcgagtatagcctcttgcatactcatccctttaattctgtctttcaaggcttgatagaatatttttctcgaattgtccaagttctcattgttcactctcagcggcaatacaaagtggcgaaacaataagtcgggaacagtagctccccacggcatctcgttttttatctgaaaagtggttcggatattgtccaaataaaacgctgtggggtaatcggtgacgtctgccacaggcatgtaagcgtacaaaaactggagtgcttgtagttctgtgtcattcacattcagtcctttaatatcaaagaactggtttccgatgatttgcattctgtctttgaaaaccaatgctgtctggttttgtgcctgattattttcttgctgcaaagtggcattcgcaaattgacagcaaaggagtgtcagtacgacaagtaggtattttttcatgtcaaaaaagatttaggtggtgggttccaagagtgcgagaattgtatttcttactcggtcttcagaagtaatttcgatataactatcatcgttgtttgtacttcccatgtggagatttgggttggtaaaggtcatcaaactattgactttcttacgggcagaaaaatgaaattctttgatatttgtttcctttgctattcggtaaatattctcttcgttcactccgctacctgccatcagtcggattcttccctgtgccttgagctggagttcgcgcaacaattccattccctcttccgcagttggctgcaaacccgaagtgagtatgcggtcaaaacctaagttgatgatttgctccaaagcttgaaaagggtctttacagcgatcaaaggcgcgatgaaacgttgtagacatccccttgcaatgcgttaggagcttgcgacataatgcctcgtcaaccaatccttcttcggcaagacaaccaaatacaacaccgtcaacgcctaactccttacaaatatgtaggtcttctatcatgcgttccacctcgatgggcgaatagaggaaatcacccccacgagggcggataatcacatggagatgggtggacttcaggatttttcgagccacctttatctctccataagatggggtagtgcctccttcaggaatgcttgcgcagagttctacacgatgtgcaccgccttcttgtgctgccaaacaactgtcaacaccattggcacaaacttcaaattgataatcttgctggttcatataggataaaaaaaagaaacatctacaaactcacatacggaatttgtagatgtcgttggttattcaacaggtatcttctcaatgcgacgaacatggcgcccaccttcaaattctgtgttgaaaaattcatctaagacttgccatgccgtttctttgtccatgtaccgacccggcaacaccaatacattggcgtcgttgtgcattctggtcatgtgggcaatctcgggttgccataccaatgcagcacgtattccctgatgtttgttgagggtcatgctcatgccttcacccgaaccacagacacctatccctgggtagacatcgcctttctctacggctgacgccaacgcatgggcgtattcggggtagtcgcaagaagcttcagaatgggtgccgaagtcttggtaggcaatgcctttctcatcgaggtattctttaatgacctcctttaatccgaagcccgcatggtcactggcgagtccaactttcttaatattcatgacaacttactttgctaaaaaatccttcacttgtttgtaaacgttttctgccgtaaagcctaacttctcatccaataccttataaggtgcagagtagccaaagctttccagtccaaagactttaccgttggctcctaccaaaccttccaaagtaacaggaagtcctgctgtcaagccaaatatcttggcattcttgggcaaaatttcattttgatattcgcagctttgtcgacggaaaagcccctcagaaggcacactcacaattctaaccttcactccctcttttctcaagagttgtgatccagccaccaaagtagatacctctgaaccactggctaacaagataacatcaaacttttcatcgctaccagccacgatatatgcgcccttccttgcctcttggtagggcgttccttcgggtaagttctcgatgttttgacgtgaaaagattagtgctgttggggtttccatgttctctacagccatttgccaacatactgtagtctcttcaacatcagcaggtcggaagacacggacagcatctttcccactgtggtttttgagtttttccattaaccttatttgggcttcttgttcaacgggttcatgtgtaggtccgtcttcgcccacacggaacgcatcatgactccaaataaatttgattggaacctccatcaacgccgccatacgaatggcaggcttcatgtagtcagaaaagacgaagaacgtaccacacgcaggaattactcctccatgtagatacatgccgatgcacatacaagccatggtcagctcactgacacctgcttggaagaatgccccactgaagtcgcctttcaccatgttttgtgttttcttcaaaaaaccgtcggtcttatccgaatttgacaggtcagcggacgaacaaaccatgttcggcacttgttcagccaagaggcttagacatgcagatgaagcgttgcgggtggcagcaccagctttgtgagtaaggttactccagtctactttcggtgcatttcccgagaaccattccttcatttgggtggctttttctgggtgctgagccttccattggtcttctgcagcatggcgttgcgcaacaattttacgcagttcctctgcacgattgtcatacaatgcttgcacatcttcggcaacggcaaaggggtgatggatgtcaccacctaagttttcaatcgtgtttttgtaagcatctccgcctaaaggtgcgccatgcgtcttgacattgtgctcataactactaccgtcggcttgtaatgccccttttcccatgatggtattcccgatgatgagtgtaggacgttctttctcttgaagtgccttatccaatgcctgacgaatttcagctacatcgttgccgtcgatagtaatgacgttccagccccatgactcatatttcatcgctgtgttttcagcagttacggcattgcattctgtggacagttgaatgtcattagagtcatagaacataatcagattgttaagacctaaggctcctgccaagcgtcctgtgccttgtgatatttcttcttgaatacccccatcggatatgtaagcataaattttatgctgcatcatgaccgagcctaactttgtttctaagaacttttcagcaacggcagcacctgcagcaaatgtgtgtccctgtccaagtggacccgaagtgttctctattcctcttgtcacatcccgctctggatgaccagttgtaggcgaaccccactgtctgaaattcttgaggtcatcaatagaaaacttgccttggagtgccaatgtcgcataaagcatgggtgacatgtgtccgggatctaaataaaaacggtcgcgccctgcccatgtggcattatctgggtcgtatattaaatactccgaaaacaaaacattgataaagtcggcaccgcccatggcaccaccagggtgaccagagtttgccttttctaccatagacacagcaagcgttcgtatgttgtcagccgcacgtgtcattaactgaatgtcgttcatatgattgatgttatgatgttgatgttcttgtaaatagtacttagtggttatgtgaaggaacggcaaggatacgaatgatgcttaccgttctttttgcaaagatagcattttgtgctgacataggcaacgaaagcgatgcgtttttatccataattttcggtatagaatgtttccaccacctatcttatattcgttcctcgcatcttgataagagtggtgcatcatctacatctcgatggatagacattaaaataattttcaagcgatgtacctttttatgatttatattgcttatatttgcaatgaaataactttgatgaatgacaatatgaatcaatcacacaaccatttggtaattatggcaggcggtgtagggagtcgcttttggccgatgagtacagaggaaaagcccaagcagttcattgatgtgttgggtgtaggcaagtcgctcttgcaactaaccttggagcgttttaaggatatctgcccgttggatcacgtctggattgtcactaacaagaaatatgtgcgtaccgttcaagaacaacttcccatggttccagctcaaaatatcttgcaagaaccgatgcgtcgcaacactgcgccctgtattgcttatgtgagttggcgaatcaaagccattgattcaagtgccaatatcgtggttgcaccgagcgatcatattgtaacggatgtttttgagtttcaacgtattattaagtctacgttaaagtttgccagcgaaacggatgccatcattaccttaggaatgaaacctcactatcctgagacaggctacggatatattcaagccgacttgtcaacgagttcattgcgcaataaggagattttcagggtggataagtttcgtgaaaaacccgatttgcaaaccgcccaaacgtatattcagcagaataattatttttggaatgcgggaatttttatttggaatgtgaagaccattatcaatgcctttcgagtttatgttccagccattgccaatatttttgaaagcatgatgaacgtgtacggtactgagaaggagcaagaagtgatagacgctcgttatggcgaatgtgagaacatctctatcgactacgccattatggagaaggcggaagagatattcgtctgtcctgcgaacttcggttggagcgacttaggtacatggagctcgctgttggctcataccaataaggatttgtatggcaatggtatcattggtgaaaatattttcttatacgataccaaccgctgcatcgtgcacgctacacaatctaaaaaggtggtcattcagggactcaacgattatatcgttgtcgaaaaagatggcgtcttgttgatttgcaagttaagtgaagagcaacgaatcaaacaattctcggaagagtaagcgcaacaaaggcaagagagggtagaggcgattgcgttgcctcgcagttctgaaagcataaaattctgagaatttttagcgattttttatgggtgcgaaatgatgaatttttttaacaaaggtacttccataacttccatatttctaagcgaatgactatttggtcagaaatattcgagttttgaggcatgttttataagtatctgactgatagttacttgtctttaattagcagtgaaaaagctcatcaggtaggtggttgaagcattgacatagccttgaaaagtggctctttttcgtctgttttggctcttcatccagtcattttaggctgttatctcatgataatagtggtgttattcacatgggttagtggtacaactccattatgataagcttgttgatagcatgacttaagcaaataatgcgtttagaaagcggatttttggctttgatatatttctattttgcaactgctgaagtgttaaaaaacggtatttttattttacatttccgtccatttttctatccctgtttgttcgccattcaaacaccctagtttttgttttagaaattgtgtgaatggagttgttgacaatgaagacagaaaataataaaagttaggaaaataaaaaaaggcaacggtcttcacagacgatcgcctctaatcttcaataggtattagtcctttaaggtaaaaagattgttttcaggataacagttgcaaagttagcgttttttttaattcctccaaatgtttttccatgttttttttacaatataaaattgtgtacccacacagcgagaattatcggttattttttccaaaaatctttattttcttgtcatgtatcaagagaagtgaagtctgaattcatcactattcacatttttttaatgccgttttatttgaatttggatagctcccatcaatggaccttcattctgaccttcaaacatcgttattctacatatattataataggtgtatagccgaatgacgttttttgagaagtgttgttagatggtagcttccacatcctgatgtcgtaataatgcttaaattagtgattttttttgcttctaagcgattttattcaaaaaaaaatcgtactttagcccatgaatacaacactacaaaacgccgctaagcgaattaaaatgcccttgtaggcaatttcgtggttaaaaataacgttagaaaataagaaagtacacgatagaagttctcctgttatcacaatagttgacttctacattatggatataataaaacattagaattagagaatggacgaaaatcaaacagttgatcaagacagaattattaagattaacatagaggaagagatgaaatcttcctacatagattattcgatgtctgtcattgtagcacgtgccttgccagatgttcgggacggatttaagcccgtgcatcgccgtatattatacggaatgttaggcatcggcaacaccagtgacaagccctataagaaatgtgcgcgcgtagtgggagaggtattaggtaagtatcacccccacggagacagttcggtgtacggcgctttggtgcgtttggcgcaagattggaacatgcgttacacacttgtagacggtcaaggaaactttggtagtgttgacggagactctgcagctgccatgcgttatacagaatgtcgattggcaaagatgggcgagcatatcatggatgacttggacaaagacaccgtggatatggctaacaactttgatgatacgttggtggaacccactgtaatgcctacaaagatacctaatctgctggtaaacggtggtaacggtattgctgtgggtatggctacgaatatgccaacgcataacctgcgtgaggtaatcgatggttgttgcgcttatatcgacaaccctgacatcgacttggaggacttgatgcagcatatccaagcacctgactttcctactggaggttatatctatggattacagggtgtaaaggatgcgtacgaaacaggacgtggacgcatcatacttcgtgccaaagcagagatagaaagtgatgagagtcatgataaaattgtcattaccgaaataccttatggcgtcaataagcaacagctgattgagtatatcgctaacttggtgaaagaaggcaagctggatggtatcgccaatgcaaatgacgaatcgggacgccaaggtatgcgtatcgtgattgatgttaagcgtgatgccaatgccaacgtgattttgaacaagctcttcaagatgacagccttgcaaagttcgttctcggtgaataacatcgctttggtgaatggacgtccacgtttgctaagtctgaaagagtgtgtgaagtattttgtggagcatcgtcatgatgtaaccattcgtcgaaccaaattcgaactgaagaaagcacaagacagagcacacatcctcaaaggtctgattattgcttgcgacaacattgacgaagtagtacacatcattcgaggcagtaagacgccagccgaggcacaaaccaatttggagaaacgctttgacttggatgagttgcagagcaaggctattgttgatatgcgcttgtcgcagttaacgggtttgcgtttggaacagttgcatgcagagttcgacgagttggagaaactcattgcttacttggaaaatatcttatccgatcctgaactatgtaaaaaggtaatgaaggacgaactcaatgaggtgaaagaaaagtatggcgatgaccgtcgtacaaaaattattcccgatgagcatgagttcaatgccgaagacttctatcccaatgaccctgttgtgataacggtgagccacttgggatatatcaagcgaacaccactgtccgacttccgcgaacaggctcgtggcggagtagggtctaaaggtgctactcatcgcaatgccgactttacagagtttatctatccagccacgatgcatcaaaccatgttgttcttcaccaagaaaggacgttgctactggttgaagtgttataatattcctgaaggaacaaaggactcgaagggtcgtgctattcaaaatttattgaatatagaaagtgatgatgctatcaatgccatcttgcgattacgtgggttggacgatgaagagttcatcaattcgcactacgtagtgttcgccacaaagaatggaacagtgaagaagacttgcttggaagcttactcacgtccacgtaccaacggtgtgattgctatcaatattgccgagggcgatgaagtggtagatgtgcggttgaccaacggtgagaacgaactgattatggcaaatcgtaatggtagggctgtaagatttgatgagcgaaccattcgtgtcatgggaagaacagccaccggtgtacgcggtatgcgccttgacgacggcgacgatgcggtgattggcatgattgttgttgatgatcctattaacgagacagtgatggtggtcagcgaaaatggatacggtaaacgtactttagtagaagattatcgcaagaccaaccgtggtgggaagggtgtgaagaccatgagcatcaccgacaagactggacgtttggtagctataaagaatgtgaccgatgacaacgatttgatgattatcaacaaaagtggtatcaccattcgcttgtctgttgcagaatgtagagtgatgggtagagcaacacagggggttcgcttaatcaatctctctaagaaaaatgacatcattgcaagtgtgtgtcgcacgatgagttcggaattagaagcttcttttgaagaagataaccgttcagagtgggataaaacacaagatgaagaaaatgaatcgagaccgtcagagcttgctgaagaccaggaagaccatgcgcctttagtggattttgatgatatcgaagacgaaaatgatagtgatagttaaattaaaaataaattttaaaaatgtaagaatatgaaaaaattaatgttcttagcagccatggctttaggagtctcaacggcatttgccgctgatagtgacgcattgaaagccatcctgtccgcaaaaacatttgttgaggcagaaagtttgattaaatcaaatttatctcaattgacaagtaatgaagagaaagcaaaggcttacaacaagttggtagaccttgcgatggaaaaagtaaacaaggagcaagaaatcattgagaagaacatgctcgctgaacaactgaagaaaggagacacacaaccttatgatacagttggttactacgatgcagtgtacgctgccattacagctggtgtcgaagcggataagtacgatatgatgccaaatgcgaaaggaaaagtgagacctaagtttcataaaaacaatcagacgcgtttatttaacatccgtccacaactgatcaatgggggacaagaggcaagtaaaaagaacgacaatcagagtgcaatgaaaaactttggtttgtatgtaagttcgtctgaagccgatttattcaaggatgtagccaacaaaccagcttacgaccagtatttaggagaagtggctcgtgtggctgccgtttatgcttaccagaataaaaaagtagatttggcacatcaatatgtggatgtagctctcaaggatacagcgcaggatacgcataaagaggctttgaacctgaaatcgtacttgattacgcaaggtttgacatctaatgcggactcgctgaaagcaattgagagtctgaaacagctctatgtacaagagaatggtagtgaccaagttttcggttctttgagtgccatgtacagtaatatgaacaagaaagatgaactgaatcaactcatctcagagaagcttcagaaagatcctaataactttatggcattgggaatgaaagcgcagtctgctatgaatgcaggtcaatgggatgaggcgattgctggttataagaaggcaattgctatcaatgacaaggatgcgctcgtgctcacctatttaggtttctgtctcaactcaaaagcacaggcacttaacacgccacaagagcaaaagagtttgtacacagaatcaatgggatatttagagaaagcacgtgacttagacccaaataaagagcgtgccaactggagttatccgctatatcagtgctactacacgctttacggagctgacgacagccggacaaaagaaatggaaaagatggtgaagtaagtttaatctctttcattaaagaatagcaggaggtatatgtaaagatatatctcctgtttttattggttatcaaaacatgtgcagcatccgcttcggtatcagctcatgtcatgcgcaatttcaatgaaagagccgtgaggattggggcataaaagagtcggtgaacttattctgaaccgcactcaaacggcttgttatttattcgtagcgaggttaagcatctttagtagtgtcgttggcagttctaactttatgctgttaatgatatcctccaaggttttatggatgtccttttttcgtgtttgggcgatgcttttggttgctggtagtgcggtactttttgttttgttcttcagtaaaatttgggttatatgaaggtttccccttctttttacggttcgatgagtgctgctgtttctctttcccttttcggacaaagaatttaggtgtatctcccaataacccttggatgagttcttgtttgcccatttttctcagctcacgctcaatattctgcctttcttcggatttataccaaaagaagaattgccgttgagcaagtttatcttttggcgattttgcactgaaaacaggttctaaggtatagggatcatatcccgtgtaccacgtttctgtactcaccgtcatgggcgtaggtgtgaagtcttgtacttgctccagttgaaagttgagtttctttgtcttcacagcaaggtctgccatgtctgctgcatgacaaccggggtgactactaatgaaataaggaatcaactgttgttttagattttcttcttgattgattttgtcaaaaagctgtttgaattgctcaaactgtttgaatgaaggtttgcgcatcaattgcagaacatggtcggacgtatgttccggtgccaccttcaatcgtccactgacgtggtttcttatcagttctcttgtgtatcgttgtgcagcttcgttcgtttttgcatccttactcgtgtgtaagagaagatcgtaacgaaccccactactgacaaaactctttttaatgcctggtaatgcgtctacggcatgatagatttcaagaagtttgctatggtctgtattcaaattcgggcatatctgtgggtgaatgcaggagggacgtttacagtgttcacaggctttgtgatttttcccactcatgccatacatattggctgaaggaccgcccaaatctgaaagataacccttaaaatcgggcatatcaatcacctttttgacctctgatagaatactttctttcgaacgacatgccacaaattttccttgatgagcagaaatagtacagaaagcacaacctccaaaacagccttggtgaatgttcacagagaacttaatcatttcataagctgggattcttttacctttatacttaagatggggtacacgtgtgtaaggtaaatcgtaataagcatcaatctcgttcgtggtgagtgtggggtaaggaggattgactacagcgtattggtggtctaccttttgaatgagtctttgtgcatgtatcttattcgactcttcttcaatatgcttaaagttttctgcttgagcccttttgttttgtacgcattcttcgtgactattcaggagaatatcgtcttcccctatacctccttctatgtcatccttttgggctaaataaactgtttgcggaatgtcgtggatgtgctgtatctgctcgccagccgaaagtcgctcacataatgtaagaacagacttggctcccatgccgtataaaatcatgtcagcaccagcgtcgcacaagatgcacttttgaagtttgtcttgccaatagtcataatgggtgagtctacgcatggaggcttctattcctcccagcacaacaggaatgtcaggatatagctgctttaatattttggtgtaaacaatggtgggatattctggtcggcaatcatgacgaccgtcagggctataggcgtcttcatgccgaagtcttttattggctgtgtacttattcaccatggaatccatgcatcccggagagatgccaaagaataattttggctttcctaacttcttaaagtcacgatagtctccgtgccagtcaggttgcggaacaatggcaacacgataacctgcggcttctaacatgcgcccaatgactgccaccccaaacgagggatgatcgacgtatgcgtcacccgaaaagagaatgacatccaattgatcccatcctcttaattgacattcctttttagtggtagggaggaagtctgtaagttgataattcttcaacgaatattgcttttaattatttttgtcgaacacagtgaaatgagtggtatctctaacgatgaagaactccttcacaagtgtagagttgaccttattcacgtgtaatcagtgaaaaaagaaagttcataagcgaatatgaatggtactcccaagaacagtagggcttaggctttacaccgttcatttgtgattgtctcttcgatatttcaccatgtctcacctctcatcaatgtttaacggttgtctttctcctcttcattcacagcgtcgttctgctcttgttggttggtccagtcaatatataacaaaaccaattggtgaagtccaaaggctttcatgtttggatgataaatcacgtctaagcacaaatcgagcagacttttatccaagttggcttccgattctaaaagagagcgcacatttagtttcagcttgtcaagtacctcttcatcaataaaaccagtactgtctacaagattacgaaacagagaatatttcataatggtggctaattgctcatctgtaatctccattgatcgtgtacccgatggattcgtttggattttgtacatgatgttgtgatccataaaatttaaatttcccataaacgatattgtattaaaaggtatatattattttgaatgtgcacacagactgatgctcgagatgtcaatcaaggaggtatttgagaataccattcatgacttgttttttgctattttggtctataatacactcaaaaggaaatcccatagtgaaacatctatagtgttgatctttataagctacggcagcactggtgccgttaccgtactgcattacgcagtcggcacccggttcgggcgatagaacttcaggattttgggctgcataatggtcttcatttggcgtatgataaaaattcatttgaagtcctaatccttgcacaacattattttgttgcctctctaaagttggggtatatgaaactttcaaaaccttacttagaaaggctttctcagtgtctaagaacatatcagagccaatatatgaaccgctgactaacagtgctcctccatgttcggcataagcttgtagcatttgctgcaatcgaggcgtaaacgttttataaaacttcaacgcatgagggtcatacttctgcaaacctaatatgaaatcaagacacggatatttttctaatttcaccttatttgtcagaaccgcatccatggaacaactcacgacattgtattgcttggtatcagcgattgcttcggtatggtcacgaacatagtcaaaggtgttgcccatgataaagttaccagccaattcatttccgccaaatcccaaaccgctttcagtgagcgaacccatggtcgatttggtgaaaacagtttgacatcccgcccatccagcagtcttcccgtaagagacaccgatatcttggttgaggtcaaagccttgagagaatgcatcatctattaccttgggagcagacaaacgattaaatccattcaccaccaagatagtatgtttcgccgtaggagagtagtatgccgatagaatttctgtggcaaaactttctccgcctttgttacaagcagtgattttgaaatgatagggtacgtttggttctaattcgatagcgtaggaagtggttttgatatttttaccattatcaaacccactggtgcctgttgacacatatacgttgtatgatttaggaaaggcagttggttccttgaggtctgattgaggctcccatgatagctttatccgattcttaccagtaaatcgaatgttgaaattttgaggaggaagcggctgaaccacataactcttcccgtgctggttgttgatatatcttaagatggtcttgtagatggagcgagcaaatacaaacttgaaatttggatcctgtcccaacttcatgtcaggaaagttttggtgcgacatggtttccaaaatagctgaaggcatttctggcaatcgtgtttccgaataattccgatcccataaatatcttttcgtccaactttgtcgactcgtagtgaggtcgttgacagcattattgagaaggtcttctgcgaaatctttgctggtcattcttgaaataccagcgtttaagcgtccaccgttatagtttgttgtacagatggctaatgagccgattaacgatttaccgtcaaacgaatagcccgcatcactatgaacagctaacgcaagttctatggggacgttaagtcccgatagggtaggaacgtaacaactaccacctgccagccagttggtcatcttagatcgcacgttgacatcatcgccataatcgttttcgcccccattaccactatagatactatatggcatacccgcccattgagcataatatcgtgctccttctattgcccgaggcattccactaatagttccacctcgttgaatatttcccatacctccgccaaagcgaactgcatccgtagtaaccacacgatgtttctttcgtgactgattggtgatgactacacggttataaggattgtcaccagcgtcgaaatcgaatgttcctaagtagacccatgtgcctcctcccatttgttgattcaccgagaaagtggtttcttgtcccttatgatacacaatatattgtgcatcatcgacacttttctctactgtttgatagctcacatacacagcatatttcccagcttgaggtagacttggttgatatgaaacaagacttgggttctttcgtttggtggatggggccatcctacacgttccttgttgaaacggattttcaccatcgctgtagattgatttgcgatttgcaaagcccttttgtggtgcttttccccaatttccattaacgttgatttccagataggatgtgccaggtcgctcgtcatcgttgtccacaatcacttcatgtttctgccaatctctctcccgtggggtaaatacgttggcaccagcattttctaacataggaatcagatacggcactacaatcgtttgtgtgaataagtcttcagttgttccaaataggtttgggcgttgccatttccacttttgtttctgctggtcataataataaccatggcttgcccataaggaaatatgtctgtcttgtagtcctttgctaatcttgttatccttagagaggttcgttacccatgcccttccatggtgttcaatgtcaccccaagctcgtgtatgtgcactgttagattgcgcagcaagcgttatcgaggcgctgatgcaaagtgttaaatgaataaatcgtaatgtcatgctgagagatctcccgttgaaaatttctctggatgcttacccttaaaaccaacgaaatattgtttgatttctttcatttcacgttctatatcacctgtaggcatcaacatctttgtgcattgtattttcttttgttcaaagtctacaccatataagaggatagggatgttcgccttgagggcaatatagtaaaaacctaatttccactcggtgtttaatgagcgcgtgccttctggtgtgatacacaattggaatgtatcacgtttgttggctattgcagctaattggtcagtcaaactggtatgcttggatcgccacacaggtattccacccatttttttgaagatgattttgaggggtcctacaaacatttctttcttcatcaaaaagtttgatttcatcccttctgcatgcatatagagctgtcctatcacaaagtcccagttgcttgtgtgtggggctaagcaaataatatatttctttggatgctctactgtaacttctttcttccagcccatgacatgatacaacaaccagccacatagtttgttcagcatagaaataatgttcaattaataaatgttagcaatctgatcgacaatttctgcaacagatttgtcaaattctttcgccaagttttgataatatttcttttgctccatgcccggttctggatgagatacacgtcgtatgaactgattgtgtaccatcaaaatggacttcaacagtgcatccacatcgtctttggcaggtttaccactatatagggatgccgcaatacactctgcgaacaagtcactacaagtataattaatcgttcgctttaaatctcttttgttagccatatcttgataactttatagtttgttgttgatgatttcaaagttcaaagataaaaaaataatccgtaactccaacgtcttgctcttaaaataacatgttttatcatttaaatgtttctatatctcaaagaaaaagagtaaatttgcattcagtaaaaagatttacaatacgtattattcatacataacaaaaaggtaaaatgaaaacaagtgcattacaagttgaaagagctgcttatcagcctaagttgccaaaggctctccaaggcgctgtaaaggttcaggaaggcgcaccaactcaaagtgttgatgatcaagaggaaattcagaaactgtttccacatacatacggaatgcctctcgtagagttcgttcccggtgaacacactgaaagcaagcgactcaatgtaggtgtgatattgagtggaggacaggctcccggtggccacaatgtcattagcggtctgtttgatgcagtgaagaaactcaatccagaaaaccagttgtatggcttcttaatgggtcctggtggcttggttgaacatcactatgtagaaatcacaaaggaattcttagacccttatcgtaacactggtggattcgacatgattggttcgggacgtaccaagttggaaaaagaggagcaatttgaaaaaggtctggaaattctgaagaagttagacatcaaagctttagtgattattggtggtgacgattctaataccaatgcctgcgtacttgcagaatattatgctgctaaagaatacggcattcaggtgattggctgtccaaagaccattgatggtgacttgaagaatgaacaaatagagacctcatttggctttgatactgcaacaaagacgtatgcagagctcatcggtaacattgagcgcgattgcaattcggcacgcaaatactggcatttcatcaaggtgatgggacgttcagcatcgcatattgctttggaatgtgccttgcagacacaacccaacatttgcttgatttctgaagaaatccaagagaaggatcaaactcttaatgagattgtggaaaatatagcttctgttgtggctcatcgtgcgcacgaaggaaacaacttcggagtggttgtaattcctgaaggacttattgagtttatccctgccattggacgattgataggagaactcaacgatttgttagctgcacatggtgctgattacaaggatttggataaggatgctcagcgcaaatacatcttagaacatctgtcagaggctaaccgctctacgtttgaaacgttgcctgaagatgttgcacgtcagttgagtctcgaccgtgacccacatggaaatgtccaagtgtcactcattgaaaccgagaaactgttgtcgaacatggttgctgcaaagttagagcagtggaaaaaagagaaaaagtacgacggaaagttctcccctctgcatcatttctttggttatgaaggtcgttgtgcagcgccatctaactttgatgctgactattgctatgcgttgggaacaagtgctgtccagttgattgctaacggaaagacaggctatatggcaattgtgaagaacactaccagttgcacagatgactggaaagctggaggtgtgcctatcactatgatgatgaatatggagcgtcgtaatggtgaaatgaaacccgtgatacgtaaagcattggttgacttgaacggtaaacctttcaaaacgcttgcagaacatcgtgaagagtgggctaagaaaacttgttatatttatcctggtcctattcagtattggggacccagcaaggtttgcgaccagacaacaaagactttgagcttagaacgagaataattgctgtgcacctgtttcaggttggtaaccatagatcgttgtgttacttcgatcgaagtttgccgtaaattgcatacaacgctttccctcaatcggtttcttgtacatctgtttgttgggagtaaacgcaacattgacggttcatgtttccatgtagacgtggcgaacggttcatgtagtgatgcaattttcattgaaacagtgagtgtaactattattcgtttagaataaatacccacaaatagaatctgcttttgtagtacaataaggcattgcaaagcagattctttttttgaattactaaatttaatgactcctaataaaacaagaaagcgtcgccgtacatctaagaatcgactgtttcgtcgatatccgaggtgggttatatgggtaggaggtatgttctttgccttcttctatatgtggtttttttatgagttttttgtcagtcctaccggtttcagatggcgtgctctcttcggtgatcccgattatccggaaggttatgagatacatggcatagatatttcccattatcagggagagattgattggcatcttttgaagcatgccatgattaaagggtgtccattacgctttgtgatgatcaaggcaacagaaggcgctaatcgtctcgatgacaattttaacgacaacttctacaatgctcgtaagcatggacttttaagaggagtgtatcatttttggagcaacaaatcgtctgcacgtgaacaagcttattattttctgaagcaagttcatcttgaggatggcgacttaccaccagtgttagatgtcgaacacaagccaaaggacaagtccgttgaagaatttcaacgtgacgttttgacctggcttcacattgtggaagacaagtatcatgtgaagccaatcatttacacctattataaatttaaggatgcgtatttaagtgcgcccgtctttgatgattatccttattggatagcccattattacgtggagaaagtagagtataaaggggcatggaagttttggcaacatacggatgcaggacggttgcctggcatcaagggttatattgatttcaatatttacaatgggtcttattacgacttgaaaaagatgacgattggtcagcaaaaggatatgtggtaaggcaatctgcaactcatgacaagtgaaattgcaacccacattccagtcatatttttgccttgaaatacccgaagtgaactttgcgcatgagaagagacatgggcaatgcgctacacgcaaagaggtagccgcatttacgcaatgacttcatttccgtatagaataatcaatgtttttataaacgataggggattggctgtcagtgtattaagcttacttctctttagtaaacattaggcaacaccaatcgtcctcggttttcctattgcgttctaccaatcccaactgtgtggctttctctatcaacagatttgcgtccgcttcataaaagccactgagtagcagtattgcctctggagacattaattcaacaaacgaagtcatgtcttgaagcaagatgtttcggttgatgttcgctaacacaacatcaaacaatccagacacatgcgataaaacttgtgcattgccatgaaacacttcaaggttggtaacgttgttcatggtagcgttgtgcagggtgttgttcacgctccattcgtcaatgtcgtaccctatcactttgcttgcccccaatttactggcagcaatgctcaatatccccgtaccacatccacagtccaaaacacgctcctccgacaatcttagcttgagtaacatggaaatcatcatgcgagtagtctggtgattacctgtgccaaaggcttgtcgggcttctattccgatataaattttgttgtccgttgctgggacaaatgctgatttagcatcataaataatgagctgttcgtcgattgcaatgggtgcgaaacctgcattctcccaaacctcattccaatttttgtcttccatatcttcaaggtgataggtaaggtcaatctcttggataggtatgtttttgagcacctcttttaagcactgttcatcgaagctctcggcaggaatgtacgccttcaagccctgttgtgtttcttcaaacgattcaaatcctacttcgcccaaggcatcagctaaaaggtcctttgctgtttgtaccagtgcaggctgacctgaaatggtacagttggctatcttataattcatcttgttaagttaaaatatttcacaaaggtataaaaaatagggaaaacctccctatagttagggaaattccttatatttgcaataattaattgtttacatttgccatagaaataatgtataagaaagggagtgaaagatgaaaaagatagctttgttagccctgctcataggaacgatgccattaggtatgcaggcacaagacgatatgtatctaataccgtctaaatctaaaaaggtcgctaactcctctgttgtcaccaaggacagcaaggtaacatatagcggtagtgatcgagatgtcgatgaatataatcgtcatggtaagttttggagtcattaccaaaagattggttccgatgatcgtggcaatgatattatagaatttcaaaagggtagaggcatctatcccgattctacctatatcgataccacctttgtaggtcagtattacgacaccatgattgatgatgacgattatcgctatacccaacggatgagccgctgggatggatatgatgacccttggttctatacgagccgacgctggcgcagttatccatattggcgtgcagggtggggctggtatgacccttggtactatggttatgcaggctattacgacccatggtatgacccatggtatgctggttacggctatccttatgcgtatggctactacggatatggctggggaagcccgtactattatagcagatactacggttgggcaggctatcctgtgcggtatgtttatagaacaggtcacacgggtacgctgacttactatgatcgctccaactttcgctcgtatgatggacgtggttatgactcggcaaatcgcaaccgtcgctatggtagagatgtacgaagatatgacaatcggtataattcttcaggcaacacggtaacctttggctctcgtagaccaagtccaagatatgattctcctaccaattcagggagacgaaacactacgcctaccttccaaggtccaacaagaacgccaagcggttcgtttggtagtggctcgtttggaggcggcacacctcctcgtggctcttctggtggattccatggaggtggtagctttggcggcggacgtcgataatgtaagagagataaaatagatgatatgcgtatttataataggatagagatgaaaaataaatatatactgtctgcgctattgttgttgggaacaacgacaataggtgcgcaagagacttatgagaatacaaaattgatagacaacgaccttaatggtactgcacgttatgtaggtatgggtggggcgttagacgctttgggagccgatatttcggtgataggttctaatcccgcaggcttgggattgatgactaaatcacgtgcagaggtgtcgtttggcttcgtgtcgcaaccgggtgtctctgcttttcagcaaggcaatcctacgaatgcaagctttgatcaggtgggatttgtttatgtgatgcgtaatccgagaggcgataatagcggactaaattttgcggtgaactaccacaaaagccgaaattttgattacattttgtctgctgtaggtgacttaaagaatgcctcacaaaacacgctgtcgttcttaaaagctatttatggacgcagagcagaagacggtacttctatcttttatttggaaacaacgaagaatgggatgattcgcggtactcatcctttcacctcgcaattggacaatctgtactataacaacctaatggtggatcataacaacgctgtatcttatagtacagccacaggctatgatatgcaacgagcgcatacaggctacatcggtacttacgatgtaagtgtgagtggagccattagtccccgtttctatttgggtggaaccattggttttcatgatgtacattatacaggaactggcgagtatgtcgaggatttggtggatatatccaacaaaccactgactgccttgatggttcatgacgaaaaaaccatcacaggtatggggggagatttcaaattaggtgctatcttcttgcctatagagaatagtcctttccgtattggtttgtctgtggcttctcctacattgtataggttgactatcaacacgagagcttatatgaggcacaatcttagagcttcacaatctatgcaaaatggctacctcggtggaacaacgaacgaatcttatagctttaagattgatacaccatggaacttcggtatcagtcttggtcatacagttggtaattatttggctttgggggcaagttataattatgccgattatggaagtatgaatacacgtgttaacgaaggcggtgggtacgactggtacacggattcctattatgaaaacagtagtgacgatactaacatgaatgagcatacgaagcagacgttaaagggtgtctctacaataaaattaggtgctgaatttagacctgtcactaatctggccttgcgtgcaggatataattatatatcacccatgtatcaaacaaatgccttcaaagatggcacagtagattcgtacggctctaattatagtacagctactgattacgttaactgggattcgacaaaccgtttcacgttgggtgtaggctatcaaatgaagaattttaacattgatatggcataccagtatagtgctcaaaatggggacttccatcctttcatggatacttatggagactattattatataaatacggcaacgaaatcgttgcaaatggataaaattgacaactatgcaaatcctgtaaaggtcagcaacaagcgtcaccagctgctgctcaccttaggttatcgcttttagaatagttgtctcatcaatagttacgaacccaaaaagagaagtttatcacacagtttgataagcttctcttttgcgtaataacctgtgagaagacttttctcttctattcatcttatagttttttgaacggacgaacgagtcgagcatcccaactaaagcatgacaacgactccccaacttagtttggaatgaagtacaacttgaataaaacgaaagcactttccaaacatgttttttgtcctgaacttttaccaaaaaacgaccattgaaaatttccaaaatagaaaaaaacgataggcaaacgcccaacaaaaatgggctgattttaacaaataaaacgtcatttggcgttagaacattgaattatcacgcttggaaacatgtattagaggtgttattcgcatgcttcagcggcattaaagcatgcaaattgcgagcttatctcaatgctttaaccgccaagaaagggtaaaaattggaaataaaggagggtgtttaattgtaatgtccttaatatcaatacgttataaaccttgctcatttttagcgtatttgcgaccaacaatgacgttggttgtaaatacgcgagttatgagaggcactttgtaaagaaaattcagtaattattatccacttctacaacgtaccaaccttattaagtaagtcattattttgtgctttcttatggtattaataacattattcaatgaaagaattggaactttttttgtagaacgattgtttacatattttgccaagttagatattatgtgtaactttgtctacaacattaaatcacgattattttgttagaaagagaagtatcttttccacctgctcatacggctgagcatctactcaaccaactcatgacgcgcaagtttggatgtaaacgttcagacaatgcccatattgagcgaaagaaaagcaagatgacttttcggttggagagcaaacctgacagacatgccgaaaaggaaatagaaactcgtatgaatgagttgatacagcaagacttgcccatcacctttgaagaggtggacagacaacatcttcctgaaggtgtcagtttagaccgtttgcctgccaatgcgcccgatttaatcaggatttgccgaattggagattacgatatttgtgcctgcataggcaaacatgttcgttccacccgtcaaattggcaaatttgagttgttgggaaccaattgggatgaacatcaaaaaacgtacagaatacgctttaaggttattccttaaaacttacttttttatgtgtatagaacccttcgctttatcgtataggggttcattatccaaatcaactgtagatgaataagtttctgaatcttcaacataaagataaaaagcacacccatagctccaataaagttcctcttttggcgcacctcagtatgttcaccgcctgcgctatatggggactaatggcacccattggtaaagatgccatgtccaatggtatcacaggtgtggccatggtgtcattccgtgtgttgggaggagccatcctgttttggatgacgtctttctttgtcaaaaaagaaaaggttcctctccatgatattctctggttcataggagcagccgtttttggcttggtttgtaaccaatgttgtttcaccatcggtctaagtctcacgtcccctatcaatgcaagcatcgttacaacttcgatgccgatatttgccatgttattggcggcactcatcttgaaagagccgataacaagtaaaaaggcaatgggcgtgtttgttggttgttgtggagcactcattctcatactcacgagcatgtcggcagccaacgcaaaggtgggggatatccgtggcgatttattggtgttaggcgctcaactgtcttatgccttctatctgtccgtgttcaataagttggtcaagagatactctgtgtttacggtgaacaaatggatgttcctgtgggcaacctgtctcatttggccattttcctttcgtcaagtggcagacctgccgtggcaaagcatcacagtaacaacatggatggagacggcttatgtggtattctttggcacttttgtgggatacatcctcattatatctgcacaaaaagtacttcgtccaacggttgtcagcacctacaattatgtgcaacctatcgttgctgtcatcgttacggtggctacgggtatcggtatttttaagtggacgcacgcattggctatcgtcatggtgtttagtggggtgtggttagtcacaaaatctaaatccaaacacgatgaagcacaaaaccaaaagggtgagttgacaaaggaataaacatggcggagaaaccgagagtgatgtcctcatgactgctccgctttatcgaattacctagtagtcataagcgtttgtaagacaagccgttgagataaggtagttatcttatagctttaagttccgtgtgcctacgtttcaagccttttatttccttgcttcagtgcatcaaggtcaatgggatttatttgtcgttcttttccttatcaaaaaagtaatcaaactgttttcggagttcttccttgtcttctaagatgagacggatattctttaggtattgatgattgggcgaattggcaatccacaacttgatatatcctgtattaccgtatttggcttctatatgttgttgaaagcgttgccagtgctcttgtcggcttttttcaggattttgttccaatccaaactgaaccgtacgttgaaacacgtgttcgggttgtaagtctctatctgcttcggcgacaatctttccgtacatacttcgtggtgaatgggaggcactggcacgatggtcttccaccgcttcgcgcatgattcgtatctgttcgggcgagaaccagcgtttcaatcgtgcatccgaagctaagatttttccccctgtgagatgatgtatagcacgtggacccgacataccaatgtcatggtaagctgccacggtgtacgccatgttgacatcggctcctatcttacgagccaattccatactgtttttgatgacttgctggacatgggcaagcccatgcgaagcaccgaattcattatattttggaaggatattttgctcgatgaaggtcatcaaatcgagacttacgttgctatctatcatgtggggtgttatttgttgcaaatgtaagaaaaaatgtttatttttgcaatagcaaaacaacggaaaggcacggaattacacagaaatgttcattattcggttatctccgtgtatctctgtatgggtaagtaagccgaagacacatactgcaaggttgttgtacaacggtgtgtgtccgctgctatatgtacattcgcatatatctgagtgtctccgttgttataaaataaaaacttgatgatgcaaacttctactgtacgatgtaattctgcgaaggcttggttcttggcagcacgtcccaaaacattaactggggcggcagttcctgtgatgataggcactgcgtgggcaatcttggatatgcaaggaatgatacgtataacacccgttgttttatgtttcctctttgcgtttgtcatgcaaatagatgccaattttatcaatgattatttggacttcgtgcgtggaaacgatgacgagactcgtttaggaccgcgacgtgcctgtgcacaaggttggattttacctgctaccatgcgtgttggcattgggttgacaacgcttttggcttgtcttgtcggtttgcctcttatctattatggaggtatggaaatgctcttggtgggagccgtatgcgtggttttctgtttcctatataccacccatttatcttatttggggatgggagatatattggtattggtatttttcggcatcattcccgtttgtgtgacctattatttagccgttccttcctatgcagcacacatcacgtggcaggtatttctgagttcgatagcatgtggattggtcattgacacattactcattgttaataattatcgtgacatagagaatgatcggcgtgtccataaaatgacaatggtggtgatgatgggtgcctctttgtcaagaacgacttatctcatgcttgggtgggtagcctgtatgataggactggtctttttgttccacggtcatgtgtgggcttttgtcttaccgttattctatgcgctcctacatacgttgacctatcgcaagatgtgtagaatacggcaaggaaaagcactcaaccttattttaggcgaaacagcaagaaatatttttatttatggaatattgttaaccgttggtttaatgatttcgtaatcttctgttagaaggtgaattgttctccttaattaaaaaagttccagctcactccgaatctaagaatgcggccattgatgggatagtgaggcactaaaaaactgttgcgagtgccgctatcttggtttacatgactgtacatgacgaagaatcgggtttgctttaaatggaaattcgcatacacattaacaatagggtagtttcccaatatcgttcgttccgtattctcttgtaccacaaactgtcctaatgcagggctgtagtcgggtgcttcatatttcgtgaaataacgaacatcggcacctgtattacaacttaacaccttggcaatcttgaatttgaagtaaagattagagtacacatttaacttcggtagcggtatggcgctctgtacggaagcattttgaaacgtcacaacagactcccagtggagcggtccccatgcaacgtcttgccccaacgaaagtgttaggacattgataggtgtactactttggcgaacacctacctgtgtacctgttctttggtatttctcgtttacttgataggcttgtgctaaataagtgtaattggtgagttcatcaaccgccacacgtagcgtggtatttgttttttcgtatttgagcaagccttctatccttgtgtgagtaatggaacctaaatcttcattgtcccatctaaagtgccgtccatgataatgccgataatagaaggtaggctcataacgtctgaaaaagccttgagcagctaagcgcaaggtgtctccaaagagtttgaaattcaaatcggtttgcgcttctatgtctattttccctgcgtctttacccgctactccaacttcaccagtgacagaataatgtagcgttttgccttgtcgtttgctcaattgtccaccaacatatacggaattttcgttgtatgtactcgttccagaactatcaggtaaggagaaatatcgaagttcatgactgacaaaagctttcaaacccgattttgcccacttgttgaacccttcgagtaaagaaatggcgaaagtgttgttgacacgataatgcttcgtgtcatcgtagatagaatcgccagtgaaaggtcctatgagtcgataattgttggcgtagaaattgtctggagtttgataagcttggtaaattctcttataatcatcaaacttcagtgtatgaataaagctggttactgggacatactcgttcttgaaccatgaagtatcttcctttgcttgtttcgtttttgccaacaaactgtcggctgcatgctgcccattaacttgaatacgagagctgtctgtcgcatgcgttgtagagggttctactcccgcaatgacagcatcatcaggtcttcctgctgttgccttttcatcttccaatgccttagggtccaattttctaccttcttttttggctttgcgaagtgcttcttttgttttcttggtggcatcattctcttttttagcctttagtgcaaacttctttgctttaatctcgtctggcgtcattggcactttccgattgaatcccacattatatctatgggttaagaaaacatggtgatggtcatttctattccagttttgttgtaacacagtgggtatttctgatgtttgataattatcatcaaagctctcaggatttgtgatatatttatcatctgtgatacccccgttttccgtattcttttggtgattcgttgaaaataacaggtgtgcttgatatcgctcacccaagtaagagccatggagagaataattgaaatgagaagaggcttggtttgcaaagaatcctcgaccgtagagataatcaaacttgaaccctacaccaatcttctttccagcattaatggcaaattttgcagtcaagtgatcttccccattggttcgatctcccgcagtattgtaagtcaaactggtaataggagagagggtgttggtgaaatggtaatcgtcaggagctacgataaaataatcgtagggttgtgtgaaaataaactgttcatcgtctcttaaccgatctacaaacaatctactaatacgaggtgcgcctaaatttcccgttgtattatattcacatcgcaagccagaagtaaagatactgttaggatacatgtgcatcaacgtatcgggtattgcctgacgaatatctccaaaacggttgtctacagtccatactttgagtcctttcggtatttctttgtcttgactggttgagtcgttagcgttgttacgtcgctggtcattcatccgcgtaatattgccatcgacatccatttggttatagctgtcaatttgagcagtgacgtgtagggacgttatcagaaggacgattgagaataaaaaacgtgtcatgaatgaaatatgcgtagactacattctgccattttgaagaacatagcagtaagaataatgatgataccaagcgtttcttgctcggtaaagaaatagaaaataacaccaactacagcaccaaccataaagatgatgttgaggatgtttcgaatccagaagaaaagatcgcgaggcttatcgccatttcctctaaatcgtcttagatattttgcactcatataagttgtaatattttatcgtataaaactcaaatctatcgttctttgggcgttaactatggttgaacagtgaaagggaatggtaacattcattggagtaattctgtcagttgactgaaaatttcattctttctatcaatggtgtgcttacggaactttccagaaagtcgtagtaggcggttcttttgtttgttgagagcgatttcatctgtaatccattcttctgcacttattttgaggtgagtagggcgatttttctcgtaatcataatgaatatgactgagagttagctcaagatgttgctcagtacatttcgcagtgagcatataataaaattcggaacggtctacagaaaggaaggaattgctaaactctaaccattcacaaaaccgtgctacaatgacatgttttttgggattgattaagactacacgactattgatctgcttcttctctttggtgagttcattcatatattggtagacggtgttgtatagatcattcgcagacttttgagaaacgtctaattgaagagtaaaaaccacttttccttgaggattttgaggtactgctcctgcaagataatcagcttctttagatggtttttcaaaggctttatcgtcttgactcttgtgagaaggttgcttggaggtaactctttgtggaacaacccattcagatgaattagttaaagagattgtatcacccccaattgtcttttgttctgcttgttgtaaatcacgtttcgtctgcgatttcttagctaatttggcagctttttgtgcagcttttttagcttccttcacagcctgtttagcagctttagcttcttgctttgccttttctaatctttgttcaggtgtcatcacagcttgagcctgaacgaatagaggtatccataacaggagaacgaatatgttttttttcatcatcaagattgttgaatgagtttacaaatttagacaaaatctgtgaaacgcccacgcaattttggaagattaacgaaataagaccgttgaatatgcaagcattttacaaagtttatcgtgaaagatacgcaagtctctgaacgttgtgattacttttgttccagcaaggtttgaagtctgataatttcatctctgtattgtgctgcttgcaaaaagtcaaggtctttggcagcctgcttcatcatagcagtggtatcagcaatactcttttccaattgttcatgtgtcatttgctgtacaatggggtcagcggcaaatgctcctccaagcggctccatgtacgcttgttgagcagcaacagtggagtagcgcttttctttcatcttctctttggcagttggtaacgcatttttgatatccttgacaatttgtgtaggcgtaatgcggtgctcctcgttgtattttaattggatggaacgcctgcgagcggtttcatctatcgtcttacgcatactgtctgtaatggtatcagcgtacataattactttgccatggatgttgcgtgcagcccttcctgccgtttgcgtcagacttcgatggcttcttaaaaagccctccttgtcggcatcaagtatggctactaatgagacttctggcaaatctaaaccttcgcgcagtagatttacacctacaagaacatcgaacatccctgctcgtaaatcattcataatcttgacacgctctaacgtaccaatatcactgtgaatgtagtttgctctgacatcatggttcagtagatattccgttaactcttctgccatacgtttagtgagagttgttaccaatactcgttcacctcgctctgttctttgaagaatctcatctaacaaatcatcaatttgattttcacagggtcggacatcaatctctggatcaagaagtcctgtaggacgtatcagctgctccacaacaacaccttctgcttcctgtaattcataatctgccggcgttgcggatacatagatgacttggtgcaacatgtcttgaaactcttcaaatcgcagaggacggttgtcaaaagcggcaggaaggcgaaagccatactctaccaaattgcgcttgcgagctcggtctccaccgtacatggcactaatttgtggaacactgacatgactctcatcaataaccatcaagtaatcttttggaaagaagtccaacaaacagtaagggcgttcacctgcttgacgaccatcaaagtaacgtgaatagttttctatgccgctacaatagccaagttccttaatcatttccatatcgtattccacacgctccttaattctttgggctttgagttggtcgcctatctcttcgaaataatcaatctgtttgactaaatcgttttgaatttcatggatagctcgttctgtttgttctttggatgtgacaaaaaggttggcagggtagatgtgatactcttcaaaagattctaattgatgaaaggtagtactgtcaacttcttcaatggtttctatctcatcatcccaccatgtgatacgaagtacattgttagaatatgccatggcgatatcaacagtgtcacccttaacacgaaagtttccacgttgtaagtcaatatcatttcttacatacaatgcttcaactaactttctaagaaaatcatttctatcaatgtgttgtcctttctgaatactgataatgctattagtcatggcagcaggtccacccattccataaatacatgaaacagaagacacaacaacaacatcactccgtccggatagcaatgcgcttacagcacttaatcgcaatctatcaatttcgtcattgatagataaatctttttctatataaagatcggatgacggaagataggcttctggttgataataatcatagtaggaaacgtaatattcaaccgcattctctgggaagaaacctttcatttcttcataaagttgggctgccaacgttttgttatgactcaaaataagcgttggtttttgaatattttgaatgacattagcaactgtaaaagtctttccagagccagtcacacctaacaagacttgggctgggtcacctcgccttacaccgtctgtgagctgttgaatagcttgtggctggtcacctgtgggttgatattttgatgtgagcttaaagttcatcctgaaaagatagttatttataaatcggtagagtcgtcctttgaaatactgttgatagctcccaaatctttgaaaagagagctgttgatgaatttgtggcgataaccataacgataaggtgacttctgtgcaaaagtacaaaataaaacatagaaattctgtaataaacactaatttattgagaaaaattaccctgtttgctttgttaatcgttgaataatatgtacttttgcacttcaaagaattgattaatgaagaaagtatttttcatcgctataagcattgttctgttctttacgaattgtgcaaacgaatttaatgctgtctacaaatcgtcagacaccaattatcggtatgaatatgctaaagagtgtttcgtcaatggtaaatatacaagggctatcacactgttgaacgacctcattgttgttcagaaagggacggaccatgcacaagaaagtctttacatgttagcaatggctcaatacaaaactggtgattatgagagtgcttcccaggctttcaagcgctacatgcaaagttatccaaaaggacaatatgcagagcttgcgagctattatatcggtgaaagtctgtacatgagtaccccagaaccacgtttggatcaatcgcaaaccgtttctgccattgctgcgtttcaggaatttttggatttgtttccagaagcgcatctaaagaatcaagcacaaaagagattgttcgagttgcaagataaattagtgaaaaaggaactatattcagcacaactctactacgatttgggttcttatttcggtaactgtaccagtggaggaaataactatgaagcttgtatcattaccgcagagaacgctttgaaagactatccctactcttcgatgcgcgaaaattttgctgtactcattatgaagagtaagtttgagttggcagaacagagtgttgaatcgaaacgattggaacgttatcaggatgcagaagacgaatgttacggctttatcaacgaatatcctgactccaaagaacgctctaccgcagagaaatatattcgaagatgtaaacagtttactcactctgctgagcctgttactcatcaggagacatcatatctgtggagaggtaacagctcaattgataacttgttttgagaaataaattataataaaataaggtgaagagtagttcgtctaatttcaagatgaatactcaacgataaaagattaaagatatggattacaaaaagtcaaaagcccctacgaacaccacaacgagaaacattatggatctctgtgataatacgggtaatatttatgaaagtgtggttatcattagcaagcgttccaatcaaattgccgcacagattaagcaagatttgaataagaaattagcagaatttgcatcgtacaatgattctttggaagaagtatttgaaaatcgtgagcaaatagaaatttctcgttattacgagaagttgccaaagcctactttgttagcaacacaagaattcatagaggataatacttattatcgtgatccatcgcaagataaaaacgaagaataattatgattcagcgtaaacagacgttattcttagttttagcgataatcctctctattacatgcctgtgcatgccgataggaatattagagcccgtaggaatgggcacacctaccgtactatggaatctcggtaccgttgttccgggcagtggtatgcaattcagtaattggccattatttgcctttttggctgtttctgttgttttagagataattgccatctttacctatcaccgtagaatgttacaggcaaagctgtgctcgtggagcattgtgttttgtttggcttggtatgcttactttgcttttagcattctcaatggttttggaaaagcattcacatttcatctccagttcgctgcttgcttgcctttagtagctatcattgctttagttttggcacgcagaggcgttatacaagacgaaaaacttatccgatcagctgatcgaatccgataatcaacttcttttgttcattgaaaaaagttctgaacagtagaagttagaaaggtaaaagagaatatgttttgcgaacacatattctctttttgttcttataagctcgtaataatgatttgtgaagcgtaagtctttgtccacaaaaatggtctcgcaatctgacaaagctaatggatagaaccgccctaaaaagaaaagcgcattcaactaaaagatgaatgcgcaaatatttgtgtaacgatgtttaatgtgtaaaatacacttcaaactcattagcccttgattgcagctacaccaggaagtgttttcccttcaattgcctcaagcatagctccaccaccagtagatacataagaaaccttatcggctaatccaaacttattcacagcagcaactgagtcgccaccacctactaatgagaaagccccattgtcttgggttgcttgtgctacatacttagctatttctcctgtgccgtgtgcaaagttttctaattcaaatacacctacaggaccattccaaaggattgtctttgaatttaagatgatatctttccatatcttcaagctttcttccgatgcgtccataccttcccattcgtctggaatctcattgatagggaacacttttcgctcagtatcgttagaaaaatcttttccgcacactgttgcaaccgacaaagaaagattaacacccttctctttggcagctttcattacattcaatgcttctggcatcaagtcgtcttcgtgtagcgatttaccaatctttccaccttgtgccttgatgaacgtgtaacccattccgccaccgataatcaagttgtctaccttgtcgagcaaattctttatcacacccaacttagaacttaccttgctaccaccaataatagcggtgaaaggatgttgtgcatttttcaatacactgtcaattgctgacacttctttctccatcaagtagcctaacatcttgctgtcattatcaaaataatcggctatcacagcagtagaggcgtgtttgcgatgggctgttccaaaggcatcatttacatagacatcggcatatgaagccaattttttagcaaagtcagcctgacgagtcttcatctcacttttcgcaacatcatattctggtgtgcctttttcaacacctacaggcttgccttcttcttcagcatagaagcgcagattctctaaaagtaatgcttctcccatttgcaagctggctgcttctttttcagcatttgcacagtctttggcaaacttcacatcaacacctaatgcttttgacacatttttcacaatttgttcgagcgacaattctggctttacttttccttttggtttgcccatgtggctcatcataatcacagcaccaccatccttcaatatctttttaagggttggcagtgcaccgcgaatacgagtatcgtcggtcacttctcctttgtcattcaaaggaacattaaagtctacgcgtacaatggctttcttgccagcgaaattaaattgatcaattgtcatttttttatattctttttatgagtaattatttatctgttcttgatgacaaagttacaaaaaaatgatgtgaatgctgacattatttctaagtttttctgtagaattattcttctggcaacagtctttttattgaagaaaggggatttttggtgaaaacatctctgttttcttttgtttctacaacactgctaatgctatgaaatttcctgctgctacttgggtaaggcagaagttgtttttgtcctattattttaccaaaaaacgaccatctaaaatcttcaaaatagaaaattttaataggcaaacccacaacaaaaatgcactgattttcacaaaataaaggtcttttcaattcagaatattgatttaacgctcttgaaaacacgctttaagggtgttattcacatgcttcaacagccttaaagcatgcaaattggaggcttatctcaatgcttcagtcgccaaaaagtggtaaaaataggcaagtaaagagacgtcgtaaacgtaacgtgttcaataacaactgattatgaacctcgctcatttttggcgtatttgcgaccatctttgtagttggtgattaatacgcgagttatgagaggcactttgtaaagaaaattcagcattaattatcctccaaaacaaagtagcatccattctacaaacgctgtttttggagtattattcggggttgaaatttcccttcttcgatgaaagcaaaacgctcttctgacaacaaagattataagccgactcttcaattacatgccattgcatcttactgcgcgaatgccaatttgtgtacgttgaccttgcatgtattggtacagcgttttaggttcttctaccacttttccacgaatggacgaggcgttgagcagatgcaaaccatcgttatgccacacagcaatgcccacatgactggtgtctaaaccttttttacgggtgagcatggctatgagatcgccatcgtgaatcgcagagcgaaggagcggtgtgttgagaatgctgtctttgggtatgtaaagataagattttccagatacttgtttttccatctctcgaatggctttctttacctctggtcggtgtcgcatcatgggatataaatgcgtatttgatgtcatgaaatgcagattgacaaactgtttggcagtaaatggcggctggttgaccgctaccggacgtacataacccatacgaacgttgtctactatccattctgtaaagtagtgtagacgtttgccataagacacttcaccgttgtggtagcgaatcagtcgcagataggtacaaaaattggcaaaacgtgtttgcttgtttttatggcacaggtagagtgccaatacattttcaatataagtggtacaatccagttctcgggtgttgataatcagtttttcggtggtgtttacctccaaagtttttgccacatagggaatgcctttcagtagtcgggcaaaatataacatcatgttttggttctctttttgttgagcaccttgtttcaaccattgctcaatttgtatactgtcattgggctgatactgaacatcttgcgccttaacggtgatactaaaactgagaagtaaaatataaatgaattgtcgtttcatattattgttttttatatcgtccaaagttaaatcctacataaatattgagattgccaaacagtgtgttgctggttagctgctgcctattgaagcgataatagtgaataatagcactcgtgcctgcataccatttcgtattgttccacaccaatccgaatcttcctaatgcatcgacatttaatttgcccacatggtaagcagctgaccatttattgtcttgctgaatatcgccatcactctgcttgtatcctaacgctgccgagagtgacgaggcgagtagccaattatgagcaaacacccaattgtagccatatccagccgagacagagaagtcggtataacgatagtcgccaaagacaacgtgtggttcgttggttgcaagatgattcgaaggaagctgtatcttttcttttaccattcggttgagttcgccaatgtcaatgcttgtttggtgtctggtgtagccaatgccagccaaaaacgaccccgcactcttgcgctgcaccgtagattgactgaatgcagcagggtaggagaaccgcttattgttaaagatgtaatacaggttgaagcctttgatactcgattgaaatccgttgaaaggcatatcttctaaggcttttgtgtcggtatgatgattgatgaataggttgcgtatgtagtaatggtttcccattttccgataaaacaagtcgatacctattcgcgatgagtacagactcaagtcaatttcggtgcggtctttattctcgttaaaatttctcaaatcaatggtatagcccaagaatatccattgatagcccacaaagggtcccacctttacactggacgatggcgccaaagtaatggtttgtccttcgttgttctccagtcggtatttctcataagtattggtgttttgcaacatcatcgtgaatttatagtgttgtggttccacataattcgtatccacagcggtaaaactctctatgattttaccagcttggtgttttatctgctgccaaaaacctttgcgttcaggaatggtatctgcattcagcgataccgattgcattatcaatagtactataaacgagactttgaaaaccttcattctttaacggatttctatacttataatttgcctaagatgcgatccatcacccagttgacaggcgttgcactcacacaggtgcaggtacaggcgccaatgccttgtaaatcttcaataacagatttaatgataggcagttggacatacgatggatttggaaccgtgatattggtaatgccttcggaggtaatcagttggatagggtcgtaattatacactgaaaaggacaacgaaccctttactcctatcacatctattctatcttctttggcactttgatgccctacaaagcaccaagagccactgccagggagtccgttttcaaagcaaaaacaggcactaatcgtgtcttctgcatcatataagtgggcacgattggcgacatatccatgcgcacgagtaatcacaccaaaatattcttgtagtagatcgagctgatgaggtgctaaatcataaaagtatcctccaccagcaatgtctggatgcaaacgccaagggcgatgttgtccgtcgtagtggtccaagtcacgaggtggaaccgagaatcgaacttgcacgttggtaatcgtaccaatggtaccattctttataatatcctttactttttgaaagtaaggtaggtatcgacgataataagcaacgaaacaaggaatgcccgtctgttcactcactcgattgatgcgtgcgcagtcttcgtagctggcagccaatggtttctctacgtaaacaggcttacctgctttcattgccataatggcataggtggcgtgactggaagggggagtcgcaatatagatggcattgatcttcgggtcgttgatgagttgaagtgcatctgtataccattttttgatatgatgacgttcggcataatcccttgccttatccgcattacgactgtaaaccgcttccacatgcgacccttccactgcattgaatgctggtcccgacttgagttcggtgacttctccacatccgataaatccccaactgatatgtatcataagttagctgacgataaaattgataacaaataaaatacctaaaaccactaacgtgacgttcaaatcacgccagcgaccaacgcacatctttagaataacataactgagcatacccaaacatattccatcggctatagaatagcataacaccatggtaatcatggtaataaaagcagggaaggcttcgctcacatcattgaggtctaacttctttaccgagtctaacattagcacacctacgagtaccaaagcaccactggtggcagcgccgggtatgagaagaaagataggagagagaaacaatgatagcagaaagagaaatccaacaaatgctgatgtaactccacttcgacctccttcagcaatgccagaagcactctctatatacgttgtaatggtggaagaacccaacattgcgccacatgttgtgccaatggcatcgctcatcattgcctctttcactcgaggaatagttccgtcagcctgcacaatgcccgttttttctgaaagtccaacaagcgttcctatcgtatcaaatatgttgacgatgagcaaagagaagacaactaacagtgtcttgatgttgagtaggtcggtaaaatcgaattgacaaagggtggggcgaatgtcttgtggagccgaaactggtaaccaaccttcgggcagtatggtgacacctaaggggatgccgataagcgtggttgcaataatgccataaaagagtgaacctttcacattacgtgccattaggattccgcttaatagaatggcaatgatgcctaagatggattcgtgtgtaaacgctcctaaacccacaaaagtgccctccttagccacgatgatacctgcatttttcaatcctataaaggcgataaacatgccgatacctgctgaaatggcgtaacgaagattcttcggaatgctgtctaagatgagctctcgaacgttgaagaaggtaatgaggatgaagacaacaccttctatcagcataatagccaatgactgttgccaggtgtaccccatggcttgacaaagcgtgtaggcgaaaaaagcgttgagacccatactgggagcttgcgcaaatggcaactttgccatgaaagccaatagcaacgtagagatggctgcagccaatgcggtggcagtgaacaatgctcctttgtccatgcccgtacttgagaggatgcttggattgacggctaagatataactcatggtcaagaatgtggtagctcctgctatgagttcggttctcatcttcatggtctttggatcgaatcccaaaaatttagtaatcaattccatactgataatagcttattaaataattatttttcattgattgattcgttgagccaataatctattagcttgcgtgcaatggataatttctcgggtatttgcggaagattctctttggtgaaccagccgcctttgcttagttctgtggtttgcagacttaactcaccacttgcatagtcagctgtaaagccaaccatcagaccagatgggaaaggccagggctgcgagctgaagtacttgagatgatgaatggtgagacctgtctcttccaagacttcacgatgaacggcttcttctaacgtttcgcctgtttctacaaatcctgctaccaatccgtagaagtcggttttgaagttcttagcatgcaccaaaagcacctcatcacctttcttaatcaatacaatcacggcagttgccagttgtggccaaacctcttttccacactgtgtacaacgcttcgaaatatgagtgtgcatctgcatgggagctccacatactccgcaatatttggtgttgtagtcccaatacaacagttcttgacatttacctgccattaaataaaggtcatggggaagtttataaaaagaagctcgaagcccacacatctcgtattttgagttgttggcgatgggggcatctatacgtagcgccttgacaggcgtgccatctgttaaggttgtaatatccatgatgtgcgtccatggcttacaagtcacagggcaagtctcttctaatggaatggtgtactgtccatttggtagtttctcaagcagtacatcggttttacaaaatataaagtaataagcgttcatttttcattgtcatcttctccctttggctgtccaaagatgagagtcttgtcgcgctgtatggcaggttgtgtccatttttcaggaacaaacttccagttattgttggcttgtgggtccatttcgccactttcctctatccatttcatgagataataacgctggtcgtgttgggtttcaacaagaatacgttttggaatttcggcaagtggaatccctgctccacgtgttagaagctctccacctccattgccacgataactgttcatcgccactttgtacgttttatgaaggtcgaaaggctctccattgctcatttttaagatgttgactttgttgccattgggctttgttacatcaacttcgtaatcaatcccagccgcactgtcaaaattaaatgcgaggttcttaaacccatagcgttgttgatcggctttggctctattatctatgagcatgatatggttttcggctgacgtcatcgtattgacccacaaatcataactcatctctaaataattcttgatttcttgcccagtcattttgagtacatagatttgattctcgtatttgtacagattgaataaatcactgacatatacgggacccgcttttatctgtgcatcaaaggcaaggggagcgttgaatgaaaggtcggcacctgtcactctgagctgtaaattgtgaatgagatcggtgaaaggagcactgccaaagtaactgtctcgactataaatagtgcgcttaaatgcccctatttgtcgagtaacaaaggcttttaccgagtcaatctcactttggaagtgttctatataagcttggttaatgggctgttcacgaatatctacgagtttccctgatacttgtttgttcagtacacatttgtgatgcgtggctgagggagcggagttgtcgagcgttatctcaatttctgcatccgcaaccatgcgcgcattgttggcaggattgagacagacgacctttttcccctccacattttcaatgacgctgctatgtgccgtgtggtcatgtccaaagagaatgaggtcaaaccctgctacttctttggcaatgcgcagtgatgcattttcttcgtaagtatcggtaatgatacctccctcttttcctgaatggaacaaaccaatgataatatcgggtttttcgttcttctttaattctgctatccaataacgagcggactccaccattgaatcaaatcgcagattactccataatttttcattcaaccagttgggtatcgcaggcgtgagaagaccaagaatagctacctttactccttctctttctacgatggtgtatggatgcagataaggcttccccgtacgtgtatcaatgacattggctccgagtatggagcatttcacttcactaatccatttgtcatacacgttgtgaccagtctcaatatcgtggtttccaactgtttgtgcatcgtatttcatgtagttaatcaccgatgctgccacatttggcaaagcagatttcacataattataataatagcatgtgggctgtccttgaagaatatcaccattgtcgagcaagagtagattttttccataatgagttctgagcgagtcgacgtatgagatgacacgcgccatgctgccactcttcggttttcgattgatgaaatcgtagggaaagaaactaccatgcacgtcactggtttgaataacacgcaggtgaattgttttatgatttgccatgctcatcgtactcatacagagggcgatgatgcaccccgtaatgattttcttcatgattattgatttatcttgcaaagttagcaaaaaattgaggaacaaaaaaagatagcgaagcttttgtcaataacccagctaacttatgaaatagtattgcttgcagagtttcccacttgacttctctatttgttgaaaatctacgagaagaggtagttgcttgaacaattgcataaaaaatgctctcacgaggagagcatttttaattggtttacgcatctaagtgaaggcttttcttgatggctttcactttttggtcggcttcagcgtcacatcgattgtaatcggcggcactcttcattgtacctttcacttcgagatagaacttaatctttggctcggtacccgaaggtctaacgcttaccttggtatcatcatcgcagaaccactggagcacattgctggtatctggcatgtccaatttagtaatgtgattattgatatctcttgcttccaaagtctgatagtctttccacagaactactttcgagccacccaattctttcggtgggttgcttctgaattgttccatcatggctttgatttcatctgcacccgtctttccgggacgcaccacgttgatagttgtctccttagaatagccatattccaaatagatatccatcaagagatcataaagtgtcttgccttggtctttggcataggcacagatttcagccaataagcacattgcacttacagcatctttatcgcgtacaaagtcggcagccatgaatccatagctttcttcaccgccaccaatatatttctttttgccttctgcgatgcgaatttcacgagcaatccacttaaacccagtatagcaatcacacatttctatatgatttttttctgctaccttctttatcacttctgtggtgacaatcgttttaacaatgaagtcggtcggtttgagcagatccatatttttgcgattagtgatgatataatacaagaagatgaggcaggtttgattaccgttgatgagtatccattcgcctttgtcgttcttgcatgccattccaacacggtcggcatcagggtcgcttgccattacaatgtctgcatccaacgcttttgcatcacgcaaagccaaggtcaaagcctctccattttcggggtttggtgataccactgtagggaaattgccgtcttttaccatttgttctttcacgcagtgtacattgtcaaatccccaatacttcagcgaacgaggaatcatcgtcataccggtaccgtgcaaaggagtgtagacaatctttaagtcgtgttggcgtttgatgacttcagggtcaatacttacagtttttacggcatccaaataggcttgatctatatcttcaccaatgatttggataagtgctttatttccttggaacttaacgtcttcaacgttgaccttattcacttcttcgataattcccatatcgtgaggtgccaatacctgtgcaccgtcttcccaataggctttatagccgttgtattctttagggttgtgactggctgtgatgttaacaccgccttggcaacccaagtggcgaatggcgaaagaacactcaggagtagggcgcatttcatcgaacagataagccttgatgccgttggcagaaaagatgtttgcaacagtttctgcaaatttcctactgttattgcggcaatcatgacataccactacagcgatgtctgcacgatctttgaaatttttctttagataatttgcaaatccttgagtcgccatacctacggtgtagatattcatacggttgctacctgcgcccataatgccacgcaatccaccagttccaaactctaaatctttatagaaagattctatcaactctgttttatcctcagcttccagttgagctttcacttcgcgttgagtgtcttcgtcaaaggcaggagataaccattgttttgcttttgcttcacattgagcaattagttctgtgttgtttgccatattatttttctttttaattgttacttttaagagcaaagataataattaaaaacgagaaatttagaaccttagggatattttttgtacttttgcaacattatggcaatttagaaagtaccattcaactttatttgcttaaatagatataactcatgttttacaaaggaattattattgcggtctctacctttttaattataggtgtttttcatccaatcgtcatcaagacggaatatcgatggggaacacgcccatggttgatattcttattgttaggtatcgccttcatcgtaggatcgctttttatagaagaagtgttgtggtcgtccttgttgggcgtattaggagcatcttcattgtggagcattggtgaactatttgagcaaaagaagagggtagagaagggatggtttccgatgaacccaaagcgtaaaaacgaatatcaacctattcaatcaacgaaagtgtaacgactgcgaagtttcttaatagttgaaaacaagcgctttcgatgctggatattgcactggcagaactaatcttgagagggtatgaaagtagaattgttgctgattggtaaaaccgtgaatcgacattttgtggctggcatagaagactatgtgagtaggattaaccattatctgccattgacagtgacggtgattcctgaactgaaaaataacaaaaagatgaccgagagccagcaaaaaacgatcgaaggacagctgattctaaaaaagataatgccttcagatacagttgtcctacttgatgaacatgggaaagaattgcgaagtgttgaactggcagcatggttggagaaaaagcagagcaccactcgtaaaatagtctttgtcatcggaggaccgtatggatttgcgccagaggtatatgagcgagctgatgagcaattgtcattgtcccgtttgacattctcacaccaaatggtaagacttattttcacggaacaactttatagggcttgtactattataaaaggtgaaccttatcatcacgaataatagacaagcgccaagaggaatatcaaaaaatcatgaaccccaacgcttttatacggttataaagaccgctttcattgcaaagaagtttgttcttcaataagaaacaagacgaagataaaactgttctgatacatcccaagccacttatactgtgctcattttttacaacctgttatacgtcaatgggcttctgcctcaatgccaagacagctatccatagacagcacctatcccaattcggacaattcgagccagcgcatactcttatcatcgagttctttctttagcttgggcagcaaaatactcttgtctgtaagctcttcaatggataaactgccgctgcataattcggcttccaagttgcttatttctgtctctaattttgcaatttcgctttccaaagtttcaaattcacgcttctctttgtaagacatcttctttttctcatcactccgatagctcctgagaggtgtcttctctcttttctcctccttgtttgtgtcagcgggttgtaagctgttccactctctaaactgggtgtaatttcccggaaaatcttgtatctctccttcgcctttgaatactaatatgtggtctaccactttgtccatgaaatatctgtcgtggctaatgatgataacacaaccaagaaaatcctgaagatattcttccaaaatttgcaaagttggtatgtccaagtcatttgttggctcgtcgagtatcaagaagttagggttttgcatcaataccgtacacaagtacaatttcctcaattcgcctccactcagtttgtaaacatagctgtgttgctgctctggagtgaagaggaaatattgcagaaattgcgttgcactcattgtttttccgcctccaagcctaatgtgatcagcaatatctgtcaccacatcaatcactttttgctgttggtcaaaagccaaaccctcttgtgaaaaataaccaaagcgaacagtttctccgatgtcgaatttacctgagtcgggctctacaagccccataagcatcttgatgaaggtcgttttgcctgttccgttgttgccaatgatgccgagtttttcgaatcttgagaagttatagtaaaagtctttcaagataatcttgctgtcgtaggctttcgacacatattgacattcaaagattttagaaccgatatagacattatttgctttgagtcttagctgtctttcttccactttttgcttggctttccgttctaattcatagaaagcctcttccctatatttggctttgtgtcctctggcttgtggcatgcggcgcatccattctaactctgtgcgatacagattgttggctcgcatcacttcactgcgcatctggtccatgcgctcttgtcttttctccaaataataactgtagttcccacgataggtaaacatctgctgttggtctaactccaaaatgcaattacaaactctatccaagaagaatcggtcgtgagtaaccatgagcaacgttttgtttccacgcgataaatagccttctaaccattctaccatctgtaaatctaaatggttggtaggctcatccaagatgaaaaagtctggttcggttatcaaaacatttgccaatgccacacgtttttgttgacctccgctgagttgtcccatgggttgttccaaatcatctattctgagttgcgtcaaaatttgtttggcttttagcaccttctcaggtactccctcatgattgaaacaggcatcaaggacagattctgtggggtcaaaaacagatttttgttgaaggtatcctatcttcaaatcattcttgaagataatgcttccttcgtctttcccttccttgcctgtgataacagagagtaaagtagactttcctgtgccattttttgctattaaaccaatgcgttgcccttcggctaccgagaaagatatttgatggaacagcagcaaatctccaaacgatttggtcaggttctgcacgtccaaatagggtatttgtgtcgccattcttatcttaatgattgattgatttcatcgatataatcgagcaattcttggcgtcctgtcttcttttcagaactcgtgataaagtaacgaggcaactcttcccacacatctttgagttgtcccatccatttgtcgacattcatttttgctttcacggtgcctaatttgtctgcttttgtgaaaacaattgtaaatggaatttcatttaagccaagccagtcaatgaactcacggtcaatcttttgctgttcgtgtctgacatctatgagtacaaaaacattcaccaattgttccctatgtaaaagataagtggtgatgagtttttgtatttcttcctgcactttctttgagcgtttggcataaccgtagccaggcaaatctaccaaataccaatcgttgttgatcaggaaatgattgatgagtagcgtctttcccggagtcgatgaagtctttgcaagtccctgatgattgcataacatgttgattaaacttgatttacccacgtttgaccgaccgatgaatgcgtattctattcgttcgtcggtgggacatttcccgagatttggtgaagacaagacaaattttgcttgagtgatatccataagatgaagtatatttgttgcaaattaaataatgtatattctaaaaagtaaatctattcagttttctattacagattttcgtgcactttctaacgtcacgatgaatgagttttattttctctacaaaaatacaaaaatatactgattattgtgcttcatttgatgacttccttcttgcttcaatgaggtggttttattaactcattataataaggggcttatctacatgacttaatgcccttatctacatgacttaacgcccttaagtcattgagttaattttaccgttgtaacgtgtatgtaatcaagtatttgcgaacatcaaaaagtacaaaatttcattttttgcatcacctttttggaaagaaagcaacacacaaatatgtagggttcaaaaaaaatatagtacttttgcgtttatgaataaattttggtgctttttactcttttcgcttagctgcatatcgttggcagctcaagacagtttgcatgttgttcgtgtcaatgctcaacgcagtttcccaaaagaaattccagccgggaattacagtggtattacctatttaggcaatgacttgtatgccgtagtaagtgacaagtcgccaaatgacggcttttttatttttaagattagtcttgactccattacaggagaggtgctgcgagtagaaaatctcggctttcgcggggatagggagcaagcaggagacttagaggcgattgcgtatgtaccgacaacgaaaaagctttatatttcgagagaaaccgacaataccattcgggaatataccttggacggaaaactgagtgatagaaaaattttggttccgccaatttatcaacgcgccagagggaactatgggcttgaatctttgaactttaatcccaagacacagatgttttggacttgtaatgaaggtacgctaaagggggatggggagcaggctacgtctaccaatcgagtgaaaaaccgattgcgcttacaatctttctctgccgattttacgcctttgcatcagtacgcttatcagatggagacacccgaggcagacaagcatgcctatctctatggaatgggagtagtagaggtgacaggtcttgatgatggcagtgtgctggtcatggaacgcgagttttacacaccaactaaaaaggtgggggcattcgtcaacaataagttatttcgagtaatgccacaggtagcatttgccattaatacgaatgactcgctaacggctgatagtccctatttacagaaacaattagtagccagctggcgtaccaccttaaaattgtttcatcatgaaatcgccaattttgaagggatgtgtttgggtcctcaattagctgacggctcacaggtcttagtatttgtttctgattctcaaaaccaagctggtggtgtcatgaaagattggttcaagacattggtattcaagatgtcaggtaagaaataggtatgaaataattgtttggaaaacgattctgcttgggtataaaacaaaaatcacaatcctatctgtaaagaaaagactgtgattttgtcatcttagaggtacctggcagagtcgaactgccctacacggttttgcagaccgttacctaaccgatcggccaaggtaccattgttagatttttgcgagtgcaaagataagataatttattgttactgccaaacatttatgtcactttttctgaaagcattgaggtttttcatgtttggtagcttgtttctttagaatctggtcatggagttcacaacccttgcatccatagcatctgtctttgctgttacgcagtgctaaatagatgcgatgacaggcataacccaatgccagaagtatgatgatgaatatgacgatgtactgtagaacatccatgatttttcgttttttcttgaagaagaattcttaccatatactgttcgtgcgagtacatacaacagctatggtaagaatttctatgaatagggtagtggaattgtgctacctacgaccgttagtaagcaaagagtgggaaactcttcatggtctcattgaccttatttcttactttttcaatcacagcctgatcttcaggagcattcaacacttcctcaataagttcagcgacaagtagcatgatatcctctttagcaccacgtgtggtcattgcagcagttcctaaacggataccgctggtttggaatgcagagcgtgtgtcaaatggaaccatgttcttattcactgtgatatcagcagaaacgagagcattttcagccacttttcctgtgaggtctgggtatttctggcgcaagtcaaccaacatagagtgattgtctgtaccaccgctgacaatggtaaatccacgctctatcaatgcggaagccaagacactggcattctttttaacttgttgtgcgtattctttccattctggtctcaagttctcaccaaagccaacagccttagctgcaatgacatgttcaagcggtccgccttgtattcctgggaacacagcactgttgagcagttgagacatcatcttgagttgaccctttttggtggtcttgccccatggattttcaaagtcttttcccattaaaataatacctccacgtggtccacgaagggtcttgtgggtggtactggtgacgatatgcgcatattttacgggattatccaacaaaccagcagctatcaaaccagctgggtgagccatatcgaccataaagatggcacctacttcgtcagcgatttggcgcatacgcttgtagtcccattcgcgactgtaagcagaacctccaccgacaattagtttgggtttgtgttcacgtgccaattgctccatctcatcatagtctactcgtccagtttctttagatagattgtaaccaatggggtgatataatattccagaggtgttcacactacttccgtgtgacaggtgcccaccatgatccaagtttaatcccatgaaagtatcaccgggatttaatacagcaaggaaaacagcggcatttgcctgtgctccagagtgaggttgtacgtttgcaaactctgctccaaaaagtttctttacccgatctatggcaatgttttcaacttcgtctactacctgacagcctccataatagcgcttagcaggtaatccttcagcatacttgttggtcagataagaccccatagcttgcattacttcgtcacttacaaaattctctgaagcgataagctccattcctttgagctgacgctgatgttctttctcaatgagatcaaagattttcacatctttttccatgtgtttttagttttaaaggttgatattaaataaaattagaatttagatagtttgtatcttatttgtatgtctatctcttttgtagagggtgtgatgaagagcggtattgtgtatcttctaacacagttctactttattgatatcttgttctttatcgcagtaatggcattttaatagtccgtttttcttgtctacaaaatggaacaccgtttccattggctcgttgttcgtgatacacttgggattgttacattttacgatgccacgcagttcatcgggtgtttctaccgttttcttttctaccacctcataatctttgatgatgttgagtactattttgggagcaacaaccgacagtctgctaatttcttcgtcagagaaaaatttattggaaaccttgataatcccttttttacccacttttttagatacgaaattgttgccaatcgtaacgggagtgttaagagattggagctctaacaagttcataacctgatatgttttatctgctggaatatggtcaatcaccgttccattttcgatggcagctaccaaacgttcttttttgttcattttctcacgttttataaattcaccgatattactcgataatggtcttatcttttttgatatcttcaagggtaatgcctaaacaataacagaaaatagcctcacgcgcaaagagcccattttttgcttgttggatgtaataagcgtgcggattatcgtccacgtcatacgcaatctcattgacacgaggtaatggatgcaagattcgcatgttctctttaacgttgcaaagcatgtcattgcgcaaaatataaacattctttacacgctcatattccattaggtctgaaaaacgttccttctgtacacgagtcatgtagaggatatctgcatcggctaagactttttcattgaagacagtgtgttcttggaatttaattccatgttccttgcaatatatcttatactccattggcatcgccaattctttgggcgcaatgaaatgaaaagtaggattgaagtgacgcatcgccatgatgagtgaatgtacagtgcgtccatatttcaaatctcctaccaaataaatatttaggttttcgagcgttccttgcgtcttataaatggaatacacgtcaagtaagcattgagaagggtgcatatgagcgccatcgcctgcattgataatgggaacgggggctatctcactggcatattgtgctgccccttcgatgtaatggcgcatggcaataacatcagcataattcgataccattaggatggtatctttgagagtttcgcctttcgccacgctcgaagctttggcatctgaaaaacctatgactcttgcacctaatcgattggcagccgtttcaaagctaagacgcgttcgagtagacggctcatagaacagcgttgcaacgactttgcccttaagaagttcacggtttggatgtttctcaaattcctctgccatagagagaagatacatcaaatcgtctttactaagattggctattgttataaaatgatgtttttgcattttttatcctacttaatgttctcattagaattgcctgctaaggtagttattaatttttatttttacgagtttattcaaagaaaaattgtatttttgcatcaaataataaagaaacttttgcagagtcgaaaagacaaagttgcaatgaagcataccgaaaatgaagtaagaatgtttcatgatacaagtaaatataataatgaaccttaggtgctttgtccgcactctctactggcgaacaccacgggaaaactcatttatattatttgcaaaatacgaatacgttcacgataagttatgagaaaggttttcattcatgtgctttggaggatattaattattgtatcaatcctgttagttttggcatttactgccatttggaaaggatggataggatatatgcccgatgtagaagatttgcaaaatccgattagtaggttcgctacacaagtatattctgcagacggaaaggtgcttggaacatggaatttcaataaggaaaatcgaatcgttataccatattctaaaatatctccacacttggtgcatgctttagtggccacagaagatgagcgtttctatgaacattcagggattgactttattgctttggggcgcgctatcgttaagagaggtattctgagacaagaaaatgctgggggtggctctaccattacacagcaattggcaaagcaattatattccgaaaccgcccacagtacgctggaaagagtcttgcaaaagcccatagagtgggtgattgcggtgaagttagagcgaaattataccaaggaagaaatcatcgccttgtatcttaattattttgattttctacacaatgccgtaggtatcaaaactgcatctaacacctattttaataaagagcctaaagatttgaccattaatgaggcggcaactttgataggtttatgcaagaacccttcgctctttaatcctgtgagatatccgcaacggtgtacggaacggaggaatgtcgtgttgagtcagatgcaaaaagcgggctatttgtcaaaggcagaatatcatcagcatgccgatgaaaaattggtattagactttcatcgcatcgatcataaggacggatctgctacatatttccgagaatttctgcgccaatacatgatggcaacgcatcctcaacgttccgattatccttcatggaatcaaaatcagtatgtcttcgattccattgcatgggtgtccgacccgctgtatggatggtgtaataaaaactttaagaaagacggtaagccatataatgtctatacagacggcttaaaagtctttacaacgatcgactcaagaatgcaacgttatgcagaagatgctgtgtataatcatgttgtgaagttcttacaacctgcctttacaaaagaaaattctaaaaaagcgaatgcgccttttacaagtgcactgacgcagaaggagataagagcgatacttaatagatcgatgagaggtagtgagcgttaccgtgtcatgaaagcttcaggagctacggatgcagaaattcaaaaagcatttagaacgcctgtagatatgagtatctttacatttcatggggatgttgatacaacgatgactcccatggattccattcgatactacaaatcgttcttgcgagcagggttcatgagtatggaaccgcaaacggggcatgtcaaagcgtatgtcggtggacttgactataatcattttatgtatgacatggtgatgagtgggcgacgccaagtaggctctaccattaagcctttcttatattcattagctatggaaaacggtttttctccttgtgaccaagcgccgaatgtacaacgaacatacattgtagcaggtaaaccttggacgccaaggaatgcaagtcgacgacgctatggacagatggttacgttgaaatggggattggctaactccaataactggatttctgcctatttgatgagtcgattaaatccacagcaatttgttggcatgttgaacgattttggaatcaaaaatcctgatatccatccatctatggcgctttgtttaggaccatgtgaggtctctgttgccgagatggtgagtgcctattcagcttttgcaaatcatggaatccgtactgcacccatgtttgtttcaaagattgaggataatgaagggaatgtcattgcaacttttcaaccacgcatgaatgaagtcattagtgaggaaagtgccaataagatgcttgttcttctgcaggctgttgttgaaggtggtacggctggacgtttgcgattcaaataccacattgatggtgaaataggagcgaagacaggtactaccaatcgaaattcggatgcttggtttatgggcttcacgccacagttagtgagtggctgttgggtaggaggtgaagaccgtgatatccattttgattctatgcgcatgggacaaggtgccaccatggcattgcctatttgggcgtattacatgaaacgcatttatcgtgacaagtcgcttggttatcgggcagatgcgtccttcggtttgcctgaaggatacaatccatgtcatcaagacgacgcgaatatggatgaatttggtatagacgaagtctttgagtagaacatctcatttatcttttgtattgacctaatgaggtctgaatttctgtcatggacagcaattatagataacctatcttgtcctaacaacctccgtgaggtagtcgcttatcagcgtaagaagtacaaaaaaagtcaatatgaaaacttccatattgacttttttgtgtatcagaataaaagaattttgtcttatgcttcagcaggagtttcttctgtttctgtagctggtgcctcttcagaagtttcttgagctccttcttcagcagctttagcagcttcttcttcagcctttgcagcttcttcttcagcctttgcagcagcctttttctctgctaccttctttgctatttcagcattaatcttcttctcttcttcaagttcttttgcaattgcatccttcttagcttgagcctcattggcagcgcaggcttgtaagcctttcactttgtcttgtttccaagcatcgaatttgctttgcattgcagcttcatcaaaagctcccttctttacacctccacgcaagtgtttcattaaataaactccttcacgtttcaagatgttacgaacagtgtcggttggttgtgcaccaacttctaaccaatagagcgctctgtcgaaattcaaatctacagctgctggattcgtattaggattatacgttccaatcttttcagtaaatttaccatcacgtggtgctcttgcgtcagcgataatgatgctataaaaagcataacccttacgaccgccgcgttgcaatctgatttttgttgccattttttgtattatttaaataggtttgaattaatactcccaactcgtggaagtggttgcaaaggtacgataaaaagctaagtcgtcgaaattgcacgattaagaacttttgagtattaacctacattaacgtttcttgacttgtatttctatactttgtgctggacatttacatcacaccctcgtcacgcaggcgttcttgccatttccatgcagaggctaaaacttcctcgataggggtgtccgccttccattccaagactttgtttgccttgtctacgttcccccaaactttctctatatcgccctctcggcgtggtccatacttccaattaagttttacaccagtggctttttcaaaccctttgacaatctctaatgtagactcaccatgccccgtaccaatattgaaaatctcgagaggacttgtctctttctccagtacacgcttcatagcagccacatgtgcctttgctaagtctacgacataaatataatctcggatgcaagttccatcgggggtgtcataatcgtttccaaagatagtgagctctttgcgaatgcccatggctgtttgcgttacgtaaggtatcaaattgttgggtactccattaggaagttctccgatgttagcagatggatgtgcaccaatagggttaaagtatctcaagataatactcttcaactttgctccactatgtatgtaatcttggataatttcttcgttgatttgcttggtattaccatacggagacaatgctttttggatgggagcctcttcggtaacaggcagattttcagccgttggctgtccataaacggtacaactacttgagaagatgatgcctttgacatgatatttgggcatcagctccaataaattaagtagcgaggtgatgttgtttctgtaatacagcaaaggtttctccacgctttcacccactgcctttgatgctgcgaaatggatgatacctgcaatatcgttatacttcttgaacacagcttctgtgtcttcaaaattgcataagtcaatttgttcaaagtgtggacgtattccagttatcttctcaatgccatcaagaacttcaatcttggagttagatagattatcgacaataacaacgttgtatccagcttgttgtaactccacggtggtgtgtgaacctataaaacccgttccacccgtaacaagaattgtctgtttcgtttccatgtctatttttttaagttaaaaatatttcttgttgcaaagttacatattttattcgattgatgccacgaatttaccttaaaatgcctatcgatgaagggttgcaaagtcaagattaaatgcaagaaacgttaaatgccgttgacgataatcaattattcctcttatattcatctattttactggataggggaggtagaaatatagacgaatcggaggagtgtgcgtaaccttcgtacgacagtttagatacacaagatttattggagcaatgcgtttctgaattgaaacattgacttaacccgcttatctacatgggttaacggtgttatctacatgggttaacggtgttgtctacatgagttaaggatgttattcacatgggttaagggtgttattcacatgggttaagacacttaactcattgtttcaataaaatatatctaaatgtgaagtaaagtgaaacgaaaaaggtattctaccttgaatagtaaaataccttttcatgttgtttattgattctcttttcgaacgagctgtttgggcttttgcaagtgtaactttttcttcttgagccaagccgctttatgctcttcgtactctctttgttttctttctaaataattgtcagccatctattggaaatgtgagtaaatgactgataaactcagtggttgatttccacccaacaagcgtgtgctggtgagtgacatgtcatgcactactcgtgtaagaattttgttttgattgtacgaataatatgttgcctgaacgggtatcaccaccaatttattccaatctttggaacgtgtgcctgccatcttgtttttcttcatttccttgataacgcttcctatattatgaaaggtgtatccgttgttagctgcattataggttgctaaaaacgaagttttataatctgcgatgcgcttgttttcaaaaaaactgtaaaggctatccttttgaactaataagagtgtttgaggaatgtccaatgcatatttgctattcacgagattgtttagtcgggctaaatgaatttttgctgcattcagtgagtctttttcgtgacccttcaaaatctcatcaacgggaatagtcagttctgtaaagatgcctgcgggtgacttcaaatacgtatgctcatgattgtttaccaaactttgaatggtatgtgcatcgttggatatgttggaagtttgaagcacttcttctgtgccagaaaacgaagcactcccgatttgttccttattattatgcttgaaagtgaagtaaatgtttaattgactcaaattgatataaaccattgagccaagtccacttgcattctttagataaaagcctggcaccacatgttgggcaaacgaaaatgaatttttgaaatacgcaggatgtttgtaatattgttgcagcacatacgtaccaaaattgttatattccttgccgtccggcgcagtataaggttggttaagcttgatggtaatatacttactgctattgccgttgttggattttcctgcttgtgctttggcatccgtcagcgtatagattttgtctacctgatacgcatttggtgagacgtagccttgcttgatagggtcgaaattagaatagtattttcgatcttcattcataggtttgctcatcgcataagccgttactttcatgggagccaatgagtctccgtaaaaagttgcgtagtaaagacggatttcgcaagagtctgctacgatggtgtcgtttatcttatgcgtcatttgctgcgcacttgggaaagcatagttctctggtattcgaaattgggtcatataattgcctgtgatataaccacccgtttcggtatccttgattttacctaaataccctatggtatttcgagagagtacggagtcggcagcaatggagcgcatagataccatgaatgtatctgccgaaatctccagtttgtccatcttattagtgagtgatccaccgagtgtatctgtggtgtcgtcgcatgatgcgagcaaaaaagcagcaaaagcgatgattgcgataaactgattcttcatttgtgtttatgctattgtacggacttttatacgatataagcggtctaacggaagacttataaatctataaaaagcgctatttctcgagaattaaatcataaaaatcttgatatgcctttgcatattcctttcctggatcgtcaaggaatgggatgtctttgctcttggcatactgtatgaggtctttgttgacatcgttaccagtttctataattccatcactatagtcaatggctaatttgcctaattcaaagaagtcaaacttttcgtgataagcatccaataagtctactttggcatctctgtattccacgcagcgtttgaaattcgttcccaaatccttcttaagctggttttgaaataaagccgtgatgacttttgcattcgcaaacgaaggctcgtccttgaaagcagtcttcacatagaaaggaaccactgctcccatccagccttgacagtggataatatcgggtacccaacgtaattttttgaccgtttccaatacaccacgtgcaaagaatatagcgcgttctccgttgtcagggtattcatcacccgattcgtcaacagtcatttggcgtttggtgaaatagtcttcgttgtcaatgaagtaaacttgaattcttacttgtggtatggatgccaccttgatgagtagcggatgatcggtctcgtcgatgatgagattcattccagaaaggcgaatcacctcatgtagctgaccgcgccgttcatttatgtttccccatttaggcataaatgttctgatctcgtacccactttcctgcatcgtttgtggaagttcgcgacccatcttggacatttctgtctctgggacgtatggcatcatctcttgattgatgaataaaatcttttttgtcatgtcctctttggcatttacttgtttattgtcagagctaagaatgaaagactttgtagtacgatactacaggttacatgctatgctccatgcaaagatacaaaaaataaatgaaaataaggtcggtttattttcaaattgaaaatttaacgtctcattttcagtattttttatgattagaataagaatttatcacaaaagaaaagacatctaacagctgtctatcaacacagttgttagatgtctaacgtaaaaaggaaggtcatgagtgcttattctatgaccaccaagggcgtgtcttccatgacactttcgccctgtttgatgcaaatagcagtgacagttccatccttttcagcctcaatattatttgccatcttcatggcttccaatactacaacggtatctccagctttcacttgatcgcccactgatacctttatttctgtaataacgccagggagtggagctttgatagcctgctctgtattaacctgtcctgtggtagaaggctctgtttctaccttctcgtccgactggggcagtggagttacagtttttttctctgcttcgggttgcgcttccatttctacttgaaagtcttttccgttgacagttacctgcgctttattgtcgactacatcggttatttcgacttgatattcttttccgtcgatgatatatttaaatgttttcatatcctatatttccattctcgttgattgacgagagattatgaactgtgattagttagggtctctccgtgaaagagagaaatttagcattccataaagtttgcttgggtagaatggtaatctttccaggctcaatatcgtgcacattatttccctgatattcaaagagagccatagcaatggctgcatatatattcttatccattttatttgaatgttgagcggttgattacattggcatacagccatgtttcttggctggaagctgctgacgtttgtgtgctaactgtgctaaacctctacagattctaaatcttgtatttcttggttcaatgacatcgtcaatataaccatattgtgctgcctgataaggattagcaaagaggtcggtgtattcttcttctttttctgctaagaaagcacgaacatcctcgccagcttctttcttcatctttgcttctttcgcactcaacacggctacagcacctgatgcacccatcacagctatttcggctgttggccatgcaaagttgaggtcggagcgcaattgcttgcatcccatcacgatgtggctaccaccataactctttcggagtgtgatagtaatcttaggtaccgtcgcttcgccataagcatagagtaattgtgcaccatgaagaatcaccgcattatattcctgaccagttccaggcaagaatccgggtacgtctaccaacgaaacgattggaatgttgaaggcatcacaaaaacgaacaaaacgagcacccttacggcttgcattggtgtcgagaacgcctgcataagcctgtggttggttggcaacaatgcccacactctgtccattgaaacgtgcaaatcctgtaatgagattctttgcgaacttgggttggacttcaaagaattcaccattgtcggttatttcgcctatcaccttatacatattataggcttgattcggatcatctggtaatatctcgtttagcaaatcactcgttctattgatgggatcttcattctgtaagcgaggagcttcttcggtattgttagaaggaagataactaagaagagttttaatcaatgccaagacttctgtatcattctttgcagtgaagtgggtaacaccacttttcgtagcatgaacactggctcctcccaaatgttctgcatcaatatcctcacccgtaacggtctttacaactttaggacctgtgaggaacatataacttgttccttctgacataaaaatgaagtcagtaagtgcaggagagtaaacagcacctccagcgcatggacctaatatggcagaaatttgtggaacaacaccgcttgctaagatatttctttcaaatatttctccatatccagccaatgcacagattccctcttgtattcgagcacctccagagtcgttcatgcaaatgattggagcaccattttgcatggctaaatccataatcttacaaatcttttgagccatggtaagagacaatgaaccgccgttgacggtgaaatcttgtgcgtaaacgtaaactaaacgtccgtcgatagtggcactacctgtcacaacaccatctcccaagatctgtttcttttccattccgaagttatgacattgatgaagtttgaacatatcatactcctcgaaagaaccttcatcaacgagcatatctatgcgttcacgtgctgtatatttgccacgggcatgctgcttttcaatggcttttagacctcctccaagtcgagcttgctcccgtttttctaccaatgttttaatcttttctacttgtttactcataattatattagtatgaattttattcctaatttgactttgcaaagataataatatttcacgaaagcctcaaagctatccatgtaaaatatgttatatgggattaagaatggaaatgcattctcatgttgctaatgtcttcttttcttattttcaagtttaggcgcattgtggtgttctaagaagcgaacaatgacattttgtctcaatacaactatcaatttagaatgactgacatatctgtcatatataacactgccaaacttgtcagctatgtttttggcacacttttcgtatagcttggggtgtttggttcagaacaagtgttgctactcatgcggcatcatagtcctgaaaatgcaatttatgaataacttaaaatataatgattatgaacattaaaccattagcagaccgagttttggtgcttcctgcacctgcagaagaaaaagtaggtggaattattattcctgatacagcgaaagaaaaaccattacatggaaagatagtagcggttgggaatggaacaaaagatgaagagatgattcttaaagaaggggacgaagtactctatggaaagtacagcggaaccgaacttgagtatgagggtgaaaaatacttgatgatgcgtcaaagtgatgttctcgctattgttaaatagttgaacgtataagacagaagcattgattcaataaaaataatttagatacaaacaaagaaaataaagatatggctaaagatattaaatttgatgtagaagcaagagatttgcttaaacagggtgttgaccagttggctaacgctgtaaaaatcactttgggtcctaaaggacgtaatgttgttattgagaaaaagtttggtgctccacaaataacaaaagatggagtaaccgttgctaaagaaattgagttagaggattcgtttgagaatacaggtgctcaattggtaaagagcgttgcatccaaaactggtgacgatgcaggtgacggtaccaccaccgctacaatattgacacaagccattgtttcagaaggtttgaaaaacgttactgctggtgctaaccctatggatttgaaaagaggaatcgacaaggctgttaatgcagtagttgattatatcaagtccaatgcagagcaagtaggcgacaattacgataagattgagcaagtggctacggtttctgctaacaatgatccagagattggaaagcttttggctgatgccatgcgcaaagtaagcaagaatggtgtcatcactattgaggagagtaagagccgtgataccaatatcggtgttgttgaaggaatgcaattcgaccgtggatatctttccagttatttcgtaacagacacggataagatggaaagtgttatggaaaatccatacattttgatttacgacaaaaagatttctaacatcaaagatttccttcctatcctacagccagctgcagaaagtggtcgtcctttgctcgttattgcagaagatgttgattctgaggcattgacaacattggtagtaaaccgtttgcgtgcagcattgaaaatatgtgctgtgaaggctcctggatttggtgatcgcagaaaagccatgcttgaagatatcgctattttaacaggtggtgtggttatcagcgaggagaaaggcttgaaattggagcaagctacccttgaaatgttaggttctgctgataaagtgacagtaacaaaggacaacacaaccattgttaacggtgctggacagagtgaaaacattcaagctcgtatcagtcaaatcaagaatgaaatagaacacacaacaagttcatacgataaagaaaagttgcaagagcgtttggctaagttgtcaggtggtgtagcagttctctatgtaggagctaacagcgaagtagaaatgaaggagaagaaagatcgtgttgacgatgctctttgtgctacccgtgctgcaattgaggaaggtgttgttgtaggtggcggtactacctacatccgtgcactggatgcgttgaaagacttgaagggtgtaaatagtgacgaacagactggaatcaaaattgttgaacgcgcaattgaagagcctttacgccagattgttgcaaatgcaggcggcgaaggagcagtagttgtggacaaagttcgtgaaagtaaaggtgattatggctataatgctcgcaccgaaacttacgaggatttacgccaagcaggaattgttgacccagcaaaggtggcacgtgttgctttggaaaatgcagcctctattgcaggaatgttcttaacaacagaatgcctcatagtagacaaaccagaggaaaagccagcaatgccagcagctccaggaatgggcggaatgatgtaaacaaaacctcttttttgagataaatatgaagagacgaatcataaggattcgtctctttttgttttttatttgatttttttttgcacaaatccttttgaatttcaaagaatatatatatctttgcaatataaatatcaaaaaacttaccaaaatgtatttagctgtgaatgcttaaaagatatttttgatttgttttagtagattagtttttaagtagtttgttttaagaatatcggatgtcgagatgacatccgatttctttttatctgtacctttttcttgtgaacaagatggctatttgatgaaaaatgattatttttgcagtactttacacacggcaagtatctgcatggcagaatctttttgttgacaaagagttttgtataaatcctatgagggatacttggctataaaagatatggagaaattaatagagctttatacacagtgggcgcacgagaaacccataaaaatagaccccatagaaggtgctgggagtaatcgtagctattatcgttttaccaattctaaaggagagacgacgataggggtgataggtacgagccgtgatgaaaaccacgcctttatttatctgacaaatcatttttccaaacagttgttgcctgttcctaaaatattagctgtcggtgacgatcaacttcgttacttacagacggatttaggcaccacatcgctgtttgatttgctgaaagatgcccgtgaagcaggagggcgttatacacaaaaagagaaaaaattgctcctgcgcaccttagaggctctgcctgcaatgcagatacaaggtgcccgtggcttggatttcaaacattgctatccacaacctacatttgatgcagatagtgttttgtttgatttaaattatttcaaatattgctttctaaaggctacaggaattgattttcatgaactgaaattagaagctaacttccgtttatttgcaaaagatctaacagcagaaccttccgaatactttctttatcgcgacttccaagcacgaaatgtgatgattgacaagcagggcaatccacattttattgattatcaaggaggaagaaaaggtccgttctattatgacttagcctcgtttttgtggcaggcttcggcaaaatatcccttcaagttgcgtcgtgatttagtctttgcttactataactcgctgaaacgatacattgaagtaccatccagtcgtcactttgttgagcgtcttagtctttttgttttatttcgcactttgcaagtattgggcgcttatggctttagaggttactttgaacgcaagaaacatttcctatcttcaataccgcctgcgatacagaatttgcgtaagctactgaagctcaatggagtagtttccaactatccttatatgatggacattctcaaacagctcaccgaattgccacaatttgctatcgtagaacagccaaagacaaagcgaactgacggctataaaatagcccaacataatatttatcatgccaatcccgttgacggacctgctaccttttctaaatatgacggtgggggagtcttggtagtgcgtgtttacagcttttctttccacaaaggaatcccagaagattcgagtggcaatggtggaggatatgtctttgattgtcgttctactcacaatccagggcgttatgaaccttataaatgtctcacaggattggacgaacctgtgattcgtttcttggagtctgatggcgagatacttacttttttagaccatatttacaagttggcagatcgccacgtgagccgttacatagagcgtggtttcacgagtttgatgttctcgtttggctgtacaggagggcaacatcgaagtgtttatgcggcacaacatttggcagaacacatccatgacaagtttggcattgaggtaagaatcattcatagagaacaaaatatcaatcaaaccttgcccgctaaataaaggatgttacacccattcgcatgatacagccgtttgaaagaagtcgtagaaaataccaagttcaataaaaaagaatacacgtcatgaagcaagccatgatttttgcagctggtttaggcactcgattacgccccttgacagatcacatgcccaaagcattggttcaggttggtggtgttccgttgcttcaattggttatcgaacgattgaagaaagctggatttgagcgtatcattgtcaacgtacaccacttctcgcagcaaatcatcgatttccttcatgcgcacgataactttggcatagacatcctcattagtgaagagagaaaaatacttcttaacacaggtggaggtatcaagcatgctcaagaactttttacgaacgagcgaatccttatccacaatgtggacatattgagcaatgtggatttgtcccatttctatacaagtaatcaagatgctgcagccaccttacttgtgagtgagcgcaaaactaaacgctacctactttttgatgaaacattaaaattggttgggtggaccaatatagagactggagaggtacgctcacctttttcagatatcaatccagctcactgtaagatgtttgcctttgcgggtattcacaacttttcgccgacattgtttccactgatgcaggattatccttccagttttagtatcattgatttttatttagatatttgtaaacacatacccataaaagcgtatatagatacaaacctgcaactattggatgtcggcaaacctgagacactaagtcaagccgctgcgtttatgtctcgatgggatacttccacgacgtcatcacagtctcatccaacaagttaattcatttgatacattcattcgatattattcattttcaattatagctatatgcaacagaagattattatcttagattttggttcgcaaaccacacagttgataggtcgacgtgtacgcgaactggataccttctgcgagattctgccgtataacaagtttccaaaaaacgatgactctattatcggtgtcatccttagtggctcaccttattctgttcatgatcgtgaggctttccagtgcaatttatccgatttcatgggcaaatatccagttttaggtatttgttatggtgcacaatttatttcgcatacgcatggtggaaaggttgaacgcacagaaacgcgtgaatacgggcgtgcactcctcaaagactttgacgcagaaaatccgcttttcaaaggttttgagcctcattcacaggtatggatgagccatggagataccattacttcaattccttccgattgccatgtcatcgcaagtactgctgatgtacactatgcagcctatgccagtgatacatatccaatgtgggctgttcagtttcatcctgaagtttttcacaccacacaaggtaccactttgctgaaaaactttgtggtagatatttgtggaagtaaacaacaatggagcccagcctcatttgtggaaaccacagtgaaggagcttaagcagcagttaggtaacgatcgagttattttaggcttaagtggaggagtagattcttccgtttgtgccacgctattaaacaaagcgataggaaaaaatctcacctgtatttttgtagaccatggaatgctgcgcaaggatgagtttaagcgcgtgatgaaggcatacgaaggtttggggcttaatgtcgttggtgtagatgctagcaaaaagttctttcaggacttgaaaggcgttaccgatcctgaagaaaagcgtaagattataggtcgtgactttgtcgaggtgtttaatgcagaagccaagaaaatcacagacgctaaatggctggcgcaaggtactatctatccagacagaatagaaagtctaagcattacaggaatggtgattaagagtcatcacaacgttggcggactccctaaggagatgaagctgaaactttgtgagcctcttcaatggttgttcaaagacgaagtgcgccgtgtagggcaacaattggagatgcccgagcacctgattaaacgtcatccgttccctggtccgggcttggcagtccgcatcttgggcgatattactcctgaaaaggtagccatactccaggcagctgacgatatttatatcgaagcactgcatcaatggatttgtgaggatggacaaccgctctatgacaaggtgtggcaagcaggaacagtacttctctccaccacacggagtgttggtgtgatgggagatgaacgcacctacgaacaccctgttgcacttcgtgcggttaccagcaccgatgccatgacagcggactgggcgcacttgccatacgagtttcttgccaaggtttctaacgaaatcatcaataaggtcaagggtgtaaatcgcgtatgctatgacatttcgtcaaaaccaccttcgacgattgaatgggaataaatatagtggtatgggtatagtgcttcagaggtagagaagtatcatatcccgtccttttgtcaaagtagcattggtagaactgtgtaggtattgccaatgctacttttcatttcatctgatggatgaaacttcaacaccgttttgtccttcgcatttttggcaaaaacattcgttgcttttgtcctattattttatcaaaaaacgaccatctaaaatcttcaaaatagaaaaaatcaataggcaaacgacatgcaaaaatgcactgattttaacaaaataaacgtctctcaaagctgaaacattgactttatggtcttggaaacatgtatgaaaggtgttattcacatgcttcaagcgcattaaagcatgcaaatagttggcttatctcaatgggttaatcgaagaaaaatgggggaaaagggagtaaaaggagagattttatttgtaacatgttcaataacaagcgattataaacctcgctcaaacctcgcgtatttgcgacccactttgctgttggtgatttacacgcgagttttgagaggcactttgtaaaggaaattcagtaataattatccttccatgcagcgtgctaccaaacctatataggctgctttatgggtggttttcattgtaaaaaaatcattttgatcgaatgtaatgatgaaatgctaaggacacttgttgtaggaaaggatgaaggcatcttgtgcattacacacaacatagatagtcacataactgcgctatcggattggcgagcttttttcttatgacaaaaaattgtatgactccttataagttagtatatttgctgtcataaatgttagatgatgatgaataagcaagattttttagacatattggaagaacataggagattgagcttccaagaccagatagactatgaaaagttctatctctattccatcataactcattcaactgctatcgaaggctcgacgatgacagaggtagagaaccagctactctttgacgagggacttactgccaagggtaaaagtattattgagcagaacatgaacctcgacctgaaggcagcctatgaaagaagcatggacatggcaagggagtacatctctttctccatcgacatgctaaaagaactgtcttcaattgtaatgagacgcacaggaggggtagtcaatgcaccgagtggtgtatttgactcgtcaaagggagatttacgtcgggtaaacgtaacggcaggagcaatgggaaagtcttacatgagttacctaatggttccacagaagttagacgatttctgcaaagaaatgaatgagagacgtacaaatctcattaaagaacctgatgtatatgagcaataccgtctaagctttgacgcacatctgaagcttgtaacgattcatccatgggtagacggtaatgggaggatgtcgagattgatgatgaatcatcttcaaacagggttcggtttggttcccagtaaggtattagtggaagacaaagccgaatacatcgaagccttggtaaaatcaagagaagaagattcatgtttgccattccaaaacttcatgttcaaggaacacgccaagaatctccaacaagaaattgataattacaagttgtctttgggtgaggaggaagaaaaatagaatttccttcgccatttcagaacattaaatcaatgaaggattaaaagaacaaaaaatcaatgaaggggcatcggagctttatcgttcattgagtgaacagccttgacacgatgtttttgtacgattatctcattcgagtaaaccgattgaagctttgaaataataaaattaatcgataaataccctaaaataatgattgatatattgtaaaatatatatatatttgtacccaaatattgttataacaagattgaagcaatgaaagttcataagatgtacgaacctgaagataagcttatttccattattggagataactatagtgttcttcaaagccttggatcgtttggcatcaacttaggctttggtgacaaaacggttcgtgaagtttgtgagagtcagaatgtggatacttatacttttttggcgatagtgaacctcaccataaatgggtataagggggatgaagattcaaatgaactgaatattcctaccctgattcaatatttacgtgcaagtcattcgtattatcttgattttcaattaccattcattcgaaaggaactggcaggcgctttggacgaaaccaataacttagctcgactcatcttgaaactatatgatgaatacgcacattctatcaggaaccacatgcggtatgaggagaagaatgtttttccgtatgttgatgatttattgaatggtaaaatcgacgaaacatacgatattgagacctattctaaacaccatggacaaacagacttgaagctgaaggagttgaagaatatcattattaagtatttaccttctaatggactgatgaacaatcagctgacagccacattgtacgatatttataattgtgaacagtggcttacgcttcattctatggtagaagatgaaatatttattcctgccattcgacatatagaaaagaagttaagacagagtgatgtttccattaagatatcttcgatgctcagtcaggtaccacatagtcaggagattttaagtgagcgcgaaaaggaggttatcgtcagtttggtacaaggtatgacgaataaagaaattgccgaccatctatttatttctatcaatacggtgattacacatcgccgaaatatagcacgaaagctgcagatacattctccatcgggtttaacgatttacgcaatagtgaataatctgatagatattcgcaacgttaagttataaagtgcttttcaaactttcaaggagtaatttgtttccgcttttctttttatttagttttgggttgtggtgaagcatctggagtttttgttttgacttttttctgacgtctccttccaaacaagtcacgtaggtttgtaaagtctttcttgataattaagcccactccttgtgttgttaaactattgcgcgtaaaatatcggtcattggtctgattataaatctttaccgccaaattgccatttggatagagtaagtatttgatatcaaaatcgccaataaaagtagtggtcgcattcggattatcacgatatccaaattgcccattgatatttaggcggttatctaataatcgtccagacaagctcccttcatattctgcgttgttaaatccttctgttccgggggaaatattcgcaccgaagttccaattggtattgtcaatcacagaatttaagaccgtatttatctgttgactcaatgttccactcaaaatgctttgcatggctaacgttgcttgactgggttgagtggggttgttgatagctgcatttttggtttcttgtgaataaaacctgcctactgcgagaagatacaaaacttgttgcttcatttcttcttcactattcatcaaactatataccatttgctttgcatcattgttaatggttggcaggtctaagttgaaatcaatttgcggtgtatcgggagtgccagtgatattcatcaaacagttgacacgagtattatttcttgtgaaagacttgccgatattcaagtcagctaaactaacaccattcactgtgtagatagcatttaggtctaaggtggcaaggtatggatttccaccaaatgcaatcgttcctccttgtctaaactggaaatctttcttgatgatattttgaaccgtcagacgatagatgccatgatccaccacgtagttgccatagatatcaaaggttcccttgttatagtaattggttcgtaacactccattccctctcaaagagatgtagtcgcctgtctggttgtccataataagtttaatctccatgtttggcgtacaattgataaggaagttaagtcggatgtcacttgggatttctcgcaggaactgtgttgtttgttgcagtggttcgagttgattcgtcgtaccattcttcatagagtcagcttgtgacgtccatttgataaacttttgtgtatctaaatgcccatagccagcaacattgtaaacaaattgtgagcccttttgcggagtcgcatccacatctatagtcagttcaccgctcttagttttaatgctacaatctcctgttaaataagcggttccataaaagttttcctctccaaaatcgtgtgtatcataagccaacaaatggtctgctttcacatgcaaatcgcattgtatatcactgaggtggtcatgttttattgcaccgttaaggattccggtgtgttggtgacgatcgtaaatgatattatgattaaaaataatttcgttagggactaatcgaatcgtatcgttctttaaggtataggtcgtatgaatgggtgtaattccaacggttccctctgctactacctgtcccgttaagttcaaactacctaagtttccaaagagtcgaagccgaccacgaccattcgcatctacctgttgcataaagctatcacaaaagccctccaagaactctaagcgagtgttgttggctaagatatctaaatccaagtaatcacgttcaggagaaacgtatccgcgaatcagagtcttacggtattcatcattggcaacagcgttaatgtcaatctgtttagccttttcgttccaagcaacgtgcgcatctaaagcgcccattcttcctgtctcgaacttgaattgatttaccaacacatcggcatgaccttttggatttccaaacaatccagacgctacagccttgccagacagtaagccgccaaactctacagcatgaaagttaagaagattcagaacatagctaacgtcgatatcttttaagtctatcaagagcgaatcattaggattgcgggttgccaatccactaacaatgacgtgctgatcatcgtggtgaatagagaagtaatctacattcaaatgattcttactataaataatgtcagagggttctattctccaaatactatcttcaactaatatttcagaaggatgtatgctgatatgggcagccgcatcgcctttgttattcttgaagaattgtgtttctgtgttgactgtgcctcggaagggatgcgcttcatgattatcaaaagagagttttgtcaataaatgattgttggcagctgcagactttaccgaccatgaccatttcttgttttgcttattcaagcgattcagttcggcatctatacaaagtgtatcttggcgtgtttgaaggtgagcatagcattgataatatttcttaccctcataagtaaaatctggtgctgtaatatggacattcattaaattctgtgaactctccatggttccactaatttgtagaggttggtgtaacacaaatggaataccaaagaagtaaggcgcccaatctgtattgcgaatatcggcataaagtcgggcattcgtgggagcggtatgtcgttgacgtattggggttaagtgctgcaaactgggtaacttctctatcaagatgttagcaacattttgagaaagggcatcgtaatcgaatgtgcctacaatcatagcacttccaaaatccccattaagggatacaaaatgttcatgcttttcatcaaaacctgtcttcaaatccaaatggttgagttggtaatgagaacgctgatcaacaattttaagttgatttaagctcaattgacctgttgcatcctttaatgatttaccagaaacatttgcaccaacttcaaaactgactctacggtgaggaaacttcttagaaatattgagcgctgctaaatgtaaatctttcgcctgcgcatctaattgcacttggtaaattgtttgatgacgatttacttttcctctaatatgaagttctccgttgggatcattgagatttgcaactccctcaaaacttgtaagctcatttttaggattgagtagaccattgccgtcaatataaatatggtgataggtgtaacccttatagtcaattttcgatatatctcccttcaataggaatttagaatggctcgaatttctttgaaaatctttcagttctaatcttgaagtaatattgcctaagtcttttctttccagtagtttatcaagactaagctctatcgtttctaaagctccgttgtagttgtttttctctttatgcaaacgaaacttcacttcaccaaggtttgatgccagctgaccatcaatgttgaagttttgttgagtaccgcgagccaaaccttttaatttcagatttgtgaagtgctgaaaaggggactgttgcgctatcttcgggaaaaatgcggtcaacattttgttggttgcttccaattctttaagctccaacatccatttcagttttttatccaagtcctgcagtgttgcgtttacagtagctttgaacatcttgtctgcttgtacttgtaagttagacagcgtcaacgaacttcgatttccatgaaacgaggttttgatatcaagcggagaagtatacttggagagttgagcatctaagaaagaaaagtctgctaatgtaagctttgagtttttgattttacctttgtatgaaagtgtagataaatcaatgtgatgattcttttgatgatagtttgtgcgaaactcatcgacatgaagcatcgaatgggggagagagaggttgaaattctctaaaaaacatgaagaagagtttgctattaacttagcagttaaggatttaacatgcaatccagacttttccttgaatgacaagttttttaattttacattgagagagtcattcgaaaaatgattaaaaacaatgtgcgaacttatctctgttaatgccaaatcattgaaagaaaaatgattttctttgggttgatcaaggacttgataacggatgcttccacgacggataatcattgagtttagattgattggcgtggattgtgaagtaatgtctttagatgcaagtgaatcgatgagaaattgaaaatttgtttgtgcatgcttgttcgcctgatataaattggcttttatcccaaataactgtgcagacgagatgttaattcctccacgcatcaatgagaatatatcaagctttatcgaaagccgtgaagcttggagcatggggactcctttttggtcgtccatgaataacccgtcaataaccaatcgattcaaaaaacctaaataaactcgttcgacacgaacttgtgtcccaaaacgtttggataaatagtttccagcttgttgccccataagagtctgaattgctggaatgtgcaacaaaataactattgtaagataaaatcctacaatgctccataaagcaatatttaatatatttttgaactttctcagggcaatctttattaattggatgcaaaattacatcatttttctgtacgaagtaaataaatgcctggaatttcttttattaatcagtaaaagttactaattttgccaaacagatagcgtttataaaatttgtatatacttttttattcgaacaagatttaatttatataatttatggtaagtgtaattaagttacgtaagggcttagacattaatcttaaagggagagccaaggaagaaaaaacgtccttgaaactgagtcatgaatatgcgctcgttccagacgattttgtcggtgtaacccctaaagtgattgtacacgttggtgacgaagtgaaagctggtgaagcactctttgtcaacaaaaactttcccgaggtgaaattctcatcgcctgtgagtgggaaagtaaagtcaatcgtgagaggtgaaaggcgcaaggtaatggctgttgtcgtggagacttcacaacaacaagagtttgttgattacggcaagaaagaggtaacccaactttcttccgagcaagtcatcgaatcattgttagaagcaggcatctttggttatatcaaccagttgccttatgcggtatcaactaacccaaaagaatgtccgagagctatcttcgtatcaggatttagaaacatgcctttggcaggaaagtttgagtttgaactgcaaggcaatgaagaagcttttcagactggattaacggctttgtcgaagatagcgagaacctatctgaatattcatgcgaatcagaaagcaacagcattgacgcaagcaaaagatgtcgaagtgactgttttcgatggtccatgtccttcgggtaatgttggtgtgcagattaaccacatcgcacctgtaaataaaggcgaagtagtttggaccgttgagcctactgctgtgatattcataggtcgtttgttcttgacaggcaaagtgcaacttacacgaacagtggctgtggctggcagtgaagtaaacgaaccaaagtatgttgatgcgttggtagggactccgatatcagacctcttagctggacaagtgaccaaaaagataaatccagaagatggagaatgtcttcgtattatcaacggaaatcctttgacaggaagacagtgtcatctgaatgatttcttaggagctcatacttcagaggtatgtgtcattccagaaggtaatcaagctgacgagttattcggatggattttgccaagaaccaatcaattctctgcttcacacagttatttctcttggttaatggggaaagacaagaagtacgatgtggatgctcgtattaaaggaggaaaacgccacatgattatgagcggcgaatatgataaggtgttgccaatggatatctttggtgaatatctaataaaagctttaatagctggagatattgacaaacaggaacagttaggtatttatgaagtttcaccagaagactttgccgttgctgaatttgttgattcttctaaattagaactacagaaaatcgtacgtaagggattagatacattacgtaaagaaaacgcataaggatatgagtttgaaaaaatatttaaataaaatcaagccacacttcgaagaaggtggaaaactccacgctttttggagtatttatgacggttttgagagtttcctttatgttccgaacacaacagccaagacaggtgcacatatccatgatgccattgattccaagcgaatcatgagtttagtggtcatttccctaatgcctgcgcttttgttcggaatgtataatattggttatcaaaactattctgctgcaggccaattggcaaacgcttccttttgggagatgttttgttttggatttcttgcactgttaccaaagattttggtttcttatattgttggattaggtattgaatttgcctgggcacaatggaaaaaagaagagatacaagaaggctatcttgttaccggtatgttgatgccactcattattccaataaactgtcctttatggatgttagctttatccattgcatttgcagttatcttatgcaaggaaatatttggaggaacaggcatgaatatttttaatgttgctttatctgctcgtgcctttttgttcttttcatatccaagtgaaatgacaggagatactgtttgggtagctaatcattccattttcggattaggaaatacattaccagatgctactacaatggcaactcctttaggtgagttggcgcagcacacggacatcccttataccatcaatgaaatgatgataggattaatacctggttctgttggcgaaacaagcgtcattgcgatagctttgggtgcgatacttttacttctcacaggctttgcttcatggaaaacaatgttcagtgtttttgcaggaggtggtatcatggctgtgcttttccaatctcttggaatgactccaattgaatggtatgaacatttaattttaggaggcttttgttttggtgctgtctttatggccactgatcctgtaacatctgcacgcacagagactggtaagtacatctatggagctctgattggagtaatgacggtgattattcgtgtcatgaatccgggatatccagaaggtatgatgctctccatattgtttgcaaatatgtttgccccactgattgactattgtgtagttcaacacaatattaataatagaatgaaacgtttaactgctgataataaataagacaatggctgaagaaaataaaaaaggattgaataccaattctaattcctatacgattatatattcaatcattatcgtgattcttgttgcgttcttgttggcttttgtattccaggctttgaaacctatgcaagatgctaacgttgcattggacaagaagaagcagatattaaattcgttgaatattagagatttgaataatgaagaatctgctgcaaagtatcaagaagttgtacttgctgatgaaattatagatgagcaggggaatgttcttgagaaaggtgaacagggtggagaaaactacggttttaagctcaattcagcagactttaagaatggaaagttagcactctttgtttgtaaggttgatggacaaaccaaatatgtgatacctgtttatggcatgggactatggggagcaatcaacggttatattgccattaatgcagacaagtcgactgtcttcggaacttacttcgaccatgaaagtgaaacagctggattaggagctgaaattaaagacaaccgtgcatggcaaaaccaattccaaggtaaaaaactatttgcacaagatccccataaaattgcgttggctgttagtaagaaggtggaagacccatccacgcaagtcgatggtataacgggtgctacgctcacttctaacggtgttactgagatgttgcagacttgtttaggtgcatatatgaatttcttaaaagctcattaaattgatttataattatgtcattattttcaacacaaaataagaaagtctttacaaaccccctcaatttggatcatcctattttggttcaagtcttgggaatctgttcggctttggcagtaacttcacaattaaagccagctattgtcatgggattggcagtgacggttattactgcattttcaaatgtaattatttcgattattcgcaacaccatcccaatgcgaatccgtatcatcgtgcagctggttgtcgttgcggcattagtgacgattgtcagtcagatcttaaaagcttatgcgtatgatgtgagtgttcagctttcagtatatgtggctttgattattaccaactgtattctgatgggacgcttagaggcatttgcgatgatgaacaaaccttggccatcttttcttgatggagtaggtaatgggttaggctatgcaatgattttagttattgtgggagctttccgtgaattatttggtagaggtactttattaggatttacgattattccatcgtctttctatgactttggatatatgaataatggtatgatggcgatgccagccatggcattgattcttgtaggatgtgttatttggattcaccgcgcatatttctataaagaagaacagtaacggatactaaatattttaattagaattattatggaacatatcatatcattattttttagatcgatatttgtcgacaatatgatttttgcattcttcttaggaatgtgttcatttttggctgtatcgaagaatgtgaaaacctcgtttggtttaggaatggctgtaacgtttgtactgtttgtcaccgttccagtggattatctcctacaaaccaaaatactcgatccattagggttaagctatcttagttttatcatctttattgcggtcatcgcaggtatcactcaattagttgaaatgttggtggagaaatacagtccttcattgtattcatctttgggtatattcctcccactgattgccgtaaactgtgccatcatgggtggctccatgtttatgcaacagcgcatcaacttagatccaagcaatacccaatatatcggtaacatcgtcgatgccatcgcttatgccgtgggtagtggattaggatggacactcgctattgtgttaatgggtgctattcgtgagaaattagaatatagtgatgtaccaaagcctttacaaggactcggtattacatttataacagtaggactaatggctatcgccatgatgtgcttctctggattaaaaatataatcagctatgaactttagttttatattaacaagtattgttgttttcttgagtgtaatactcttgcttgtcattattttgcttgttgcaaaaaaatatttgtctccaagcggaaatgtcaacatcattattaacgaagacaagacactcagcgttccacaaggtgcttctatcatgagtaccctcactcaaaatggtatctacttaccctctgcatgtggcggaaagggcagttgtggacaatgcaaattacaagtgattgaaggtggaggtgaaatcttggattcagagcgtcctcacttttcaagaaaagagataaagaataattggcgtttgggatgtcagtgcaaggtgaaaggtgacttaaaaatcaaaatacctgaaaccgttttaggtgttaaagaatgggaatgcaccgtcatcagcaataaaaatgtgtcgagcttcatcaaagagttcaaagtgcaattgcctcctggcgagcatatggacttcatcccaggctcttatgctcaaatatctattcctgcgtttgatgttatcgattacgacaaggatttcgacaaggatgacattggcgaagaatacattggcgcatggaagaaatttaatatcttatcactcaaagctcacaatccagaacccaccgttcgcgcttactctatggcgaactatcctgaggaaggagacattattatgctgacggtgcgtattgcatccactccatttaagccacgtccacaggtaggattccaaaatgttcctacgggaattgcttccagttatatcttctctttgaaaccgggtgataaggtaaagatgagtggaccttacggtgacttccatcccatcttcgactctaagaaagagatgatttgggtcggcggtggtgctggtatggctcctctacgaagccaaatcatgtatatgctcaaaacgctgcacacgagagatcgcgagatgcattatttctacggtgctcgctctttgaacgaagccttcttcttagacgacttccacgagttagaaaaagaatatcctaacttccacttccatttggctttggacagacctgatccagtagctgatgaagcaggagtaaaatacacggctggttttgttcatcaagtaatgtatgacacctacttgaaggatcatgaggctcccgaagacatagaatactacatgtgtggtcctggtcctatgagtgccgctgtacagaaaatgttagatagtattggtgtcgatcctgaatctatcatgtttgataacttcggataagttggtacaaatcaaaacgaactaacatataattataaaagtcgctgaatatcagcgacttttatcaattctgaatatcattgttgcaacttgattattgataggatttgcaatacttcttatgaatatgagaatgtaaactaattctgaccctacgaatgacgcctattcatgctattttcaatcactttcacagatttttgttgttcgcctctcttgcttgaagatggcttaggtattcatatagttaagcccattatctacatgcttccatgttgttaactcatgtagataacagcactaactcatgaagatagttgtccaaaacagactgttttgcccaataaaacagactgttttgcacggttaagtaatgcagataacagcactaactcatggaaataacacgattacttcatggagatagttttacaaagttatttgcctttgctgctggaggtagtgaaaaggggagccacctctggtcggttcttattgatgacgatgaggtggttcatgttgtaatgtatggtcaccaatcttttttcggtgtctatatcgaagttgtccatgccttgctccaaggggatgaatttggggatgagcggttctgaataggtcttggcagctggagtgtgtgctatttctacgtcacttataggcagccgaatgcccaagtcgctcatgcgtcgtccttctgccaagaatatttcttggcgcatcaggtagataagttctaacaaagcatcgttgtctttgcattcatctatcatctctgcagtgactgatgtacccgacaccgtaggaacttgtatcagatgcggcgatttacggttcaacaccagtccactgcggtatgggtccttgggagatgctgccactcggtagtcagctgcattgggatagtgtttgaatccaccattataccgtccttccaattggtcgttaagttgcagttgtactggtcgtttagcaaccagcagcaacagttgatttaattcttttttagcttgttgcgattgtccttgagacaggtaggcttctgccaagatgagataattttcttcggcttttgcaatactgatagggcattcatcggttgcctttagctggaagtattttggatcaaggaagtcgaggcggggtagtggctggtacattgttttccaaataacatcttgcatgctgttggtcacattgttcttgccgtcaaaggttacttgctctataaagtcgttgctattttgcattgccaatttgctttcgtcaatagcattttgcgcctttcccatcacatagtacactcttgctttgagggtgtgtaccagtgctttttcgtgattgttggtagcatacgtcagtgctttgtcaagggcgattttcgctagttgcagttgttcattggctggtagcggattgcctcctacagtggtgggtaaggctcgaaagttctcacctgccagtaagaaggcataggctttcatcgtatgtaacttgaacagatgttctgcagtggtgtgttggtcgtgctggctcaccgtattgatgccgtaatcggcagattcacgcagattggcaaccaaacgttgcagttcggcaatgtcaggatcggtgtttttcagttctggtttgtcaaacactttgctttcacgcgtatagttgttgaaatagttatcagagataatttcggtatggagacaaaatttggcaatggtggtagcaaatgctttctctgcaccgtttacccatatatccatggcacgatctgatgctaagtatgtgtcttctccaacattggggttttctacttcggttggctctatcagactgcaagaagcgagtatgaacgtaagtgccaatcctgtgctatgtgtaatgaacttattcatgttttacaaatttaattgaatggaaatgatgtattgacgaggcatagaataggtggaataattaagtccacctgttgctacggcaccttgcgaccgtgcccctgcaatagtggcttcgggatctaccgaagctgctgtaaagctcagggggttgtacacgttcagcccgatgtttacagccttgacaggtgttttacccgatgcgaaagtgtgtttgtagctcaaagcgatgttccttatctttaggaagtcggctttctctacaaaataattggtaaagctgagccagcttttcttttgtggttttcccataagagccgcttgtggtatggcatcgtctttcagtcctttggaaaagcggaactgacggtcgaacgaatgtacgtacgagcctgcctggtagtcgccactcatagtgaactgccacgaccgataattcacatttagcatcatgttaccataaaaaattggcaccgtgcgtcctaaatcttgcatatgctgtacttccttcagcgtaccgtcttcgttgagtatggctttgtttcctcgtaaaaatcctactgacttgccctcttccaccaccgtctgaatggtgctgggaccaaagccccctatggcaaagggtattgctcctcccgtactcagcactttgttgtgactggtattgaacgatgtacgcagacttacacgccaatccttggtacggatgggagtgatgagagtgttgatttctactccatgattaaggatatcaccgatgtttgccaaatagttggctgcttgtcccgaagatgggagcgtgggaatgctgaacagtgcatcgagtgtacgagcatgatagtaggtgaagccaacggagcaaaggtcgttgaagagagagccttcgaaacctatttcaaaggcatgttttttctcgggacctaagttggcattcccgtattgtccaaatgtagcggctaacttaccttgaaaggaactgatgtccacagtcttttgataggcgaagggtggtgggtaactgcctgccactccatagttgcaaaaccagcgtaacgtggtgagtatgcgacgactcacgagtgagcgcatgaagggttcatcggtcattacgtaagacaaccctacctttgggtaaaactgccatcttacattctcgccaaaggcagtattgtagtcgatgcgagcacctaagtcaagataatagcgatttagcaatccaacattatcttgtacgtaaaatccgtagctgtgcaggtagctcatccattcgtcagcttgttgtgttcctgctcccgacatcacttttgctccatcgcgtacgttggagccattataaatagcctgatgatcgtggttgttgaagtattgaaatcctgcagtgacaatgttactgatgccgtgttcaaagtatgccttgtgttgtgcattcacgtcggctgtcagtccaaagtaagtgcggtcgaaattgttgatgcgtccagcgtctgtagtacctatgggctttacttgggtgtgaaccaaatactggttggttacaatctctttgttgccattggcacggtagtccaatccaaaagtgccctttaacgtgaggtttgacataggcttataaataagcacttgcgaagtttggaatcgcttcacagtctccttgtagttttgtagcgcttcggctttgtccacaaaagctttcatttgtgcaaattggtagtcgtctacggcatcgatatcagcattgaaattgtgctgtgtgccgtcggcagtttggtacttcatgttggctgcggcagcgccctccgtaaaccatagtccagtgtaaaagccctgattgccattgcgactgcgtctgtagtcctctgctacaaagccaaacgagttttgatattccaaggtgcggtgtaatcgcgcatgcgaaccaaagcgtatgtcgtaccttttttgttcgttgttgttgtgaataatgattcccgtattaccgcccatgctggctcctaagctatatccgaaagtttgattgccacccgacagggacaggcgataccgctgttgaaaaccagtttggttgagtaattcgcgagttcgtcgaaagtgataaaactgtgtggtaggtacatcgcaccccatttcggctgttacagtggctcggaagcctgcttcggtacctttcttcgtaaagatctgtatcacaccattggcagcatccgacccatacagcgtggtggcagctcctccaggtacatattctatgtggtcgatgttctcaatggagatgtcgctgagcgtacttgacgatgccatctcgcccatgggcatgtcaccgatggtgtatggattggctccatatccgtgttttgagtaattaaggatagaacccgtattgagattgtcgatgcgtacaccgtctatatatataataggtgtggagttggcaaaagccgatgacagtcctcttgacttgatgatagaggtggttcctggctgtccgttggtaagcgacagttgcacattgggcagtgcattttgcagcatttggtcgatacgagtggctggtgtcttctgcagctcacttgctgataccttcgttacggacgacgacaagcggcggcgacgtatggcgttgccttgtcctgttactacaacctcattaagattgatgctatccaagaggtttttgtctttgttctctatttttattacacctgccaaagggttgatatccttgggcatcatagactttgcatcggctgttttcgcaaataggatgcaagccacgaggcacgcgctgtgccatagggcaagttttttcattgctgttaatgcgtttgttattataaaaaataattgttgtcaaatacaatctgcttacctaataaaggttcaaaaaacggtgcaaagtaaactatttttcagcaaatatcaaaggatatggcctaaatttgtttttacaaaatgatatttgctttccttaaaagttgaatcaattattttttttgccgagtattcaattgagggctttcattgaacaactttggctatttcgcttatctatagacgtttaaggctataacgtttatttttcttgttaggatttcctgtaaatcattgcacaatggtcaatgattttaatatttcaaacaaaggttgctcttggataaggtgacaggaataaactgcactacaagcggctgggacagggaaaagcttaacacacctcttgttattgtggatgcaattacttcatgaacatcaaataaacggcacatagtaaacagccaaatgcagctatgtgattccagtgcaagctttcgttttgaaagaaaatagtggaaaagacgccaaacactgtaagactaacaacctcttgaatgactttgagttgtaccagtgagaaaggtcctccattgtctgcaaatccgatacgattggctggtacttggcaacaatattccaagaaagccacgcaccatgaaaagataacaacagcaaacagaggccagttagaactgacccctgtttgttgtaacttaagatggccataccatgccaacgtcataaagatattactacagatgagtaatagaatggtatagatacccgtcattttgattttttcaattgttcgtccatacttgatgcagctcgacgcccatcacccatggcaagaatgacagtagctccacctcttacaatgtcaccaccagcatatacttcaggtttattagattgcatgttctcattcacaacgatggtgttctttctgcccagttccagtccttcgatagaacgtggtacgagtgggttaggactcacaccgatagcaacaacaacctgatcaacatctaaagtgatggtttcgccctcaataggttcggggcgacgacgtccgctggcatcaggctcacccaactgcatgacttgcaatacagctgactttactgcccccttctcatccgtcaaatattcaatcggattgtgtaaacacataaagtggataccctcttccttggcatgcttcacctcttctaaacgtgcaggcatttctgcttcggagcgtctgtatactaaggtcacatctgccccaagtcgtttggcggttcgacacgagtccatggctgtgttaccaccgccaacaaccattacatgcttgcccaaattgataggagtatcggatgtaggattagaggcatccatcaggttcacacgcgtgaggtattcgttggacgacaggatgttgatagcattttcgccaggaatacccatgaaatttggtagacccgcacccgatccgacaaagatacccttgaaattagcatcttctaaatcttggatcgtaatcgttttgcccacaatgcaatccgtttcaaagtgaacacccatctttcgaaggttttctatttcaacgtctacaatgtcattgggaagtcggaattcagggataccgtatttcaatacacctccaatttcatgtagagcctcgaagacatgtacttcataaccatactttgccatgtcgccagcaaaacttaatcctgctggtcctgagccgataacagctactttgatgccattggcaggctgcaaatcggggagtgaactctttccgctttcacgttcatagtcggcagcaaagcgctccaaatgaccgatagctactgctggttccttcatcttcaagtggatacaacggctctcacactgtttttcctgtgggcatacacgtccacaaacagcaggtagggcagaggtactcttcaacacctttgcagcagcgaggaattgtccacgctctatattcttgataaacgaaggtatgttgatatttacagggcaaccttcaacacaggtgggctttgcacaatcgaggcaacgcttagcttctgtcattgccatttctttggttaagcctctgttgacttcttctctaagagttgtagctctgtacactggatccaattctggcatttggacgcgcgaaatagcggtgcgttcttttggtttcatggacgcccgaagttcttttctccattctgcattgcggtcagtgagtacatctaacttatcctcggttggctctacatccatctttatgttaggtttcggcttcacttgtttttgctctaccgcttccttgtgtgcctgcaaacgctccaaatctatgcgttccacatccttgaatgttcccattcgtttgaacatctcgtcccaatcgactaaagcaccatcaaactcaggaccatctatacaaacaaattttgtttttccacctatggtgagacggcaagcaccacacatgccagttccatcaaccataatggtgtttagagacacatcggtagggatgttgtacttttgggtaagcaaacagcaaaatttcatcatgataggaggacctatggcaaaggccttgtcgacatgctcttgctctataaacttctccatacctacggttaccacgcctttttctccgtagctgccgtcatctgtcatgatgataacttcgtcagaattggctcttacttcatcttccatgatgataagatccttgcttctgcctgctaaaacggacaacactctgttacctgccttctttaatgctttaatgatgggcagcataggtgccacaccaacgcctccgccagcacagagtacggttccaaacttctcaatgtgggtggcatttcctaatggtcctacaacgtctgtcacataatcgccctcgttgagctcacataatttgtaggaagatttacctaccttttgtactactaatgtgatggtaccacgttttgggtcggcatcagcaatggttaaaggcatgcgctctccgcgttttcctgttcgtacaatcacgaaattaccagctcttcgactcttagcaatgagtggtgcttcgatttcaaacaagaataccttttcggaaaattgttttttacgaataattttattcataatcgttttttgtattagtaatttaggttatataataatcaatttttatagtttgttttatgagtagactacgctggcttgagatgcggaatttaccaatcgaattggtagccgatggaaaacacataagaaaaatttgttccttgtagcttggaattgaccatgtgataatcatacttccacgcatctgcacttcccgtatcagtgactccgatattccaccttatatccagcacaaagttatataattcgtatgaaattgccacaggaatggtcaaatcgaatgtattcaattgtccttccatattacgatcaatcagggtaggggcatcaatgctttcttgtctgcttcttatactgatggcaggttgaatgcctgtttttaatgcgaagcctttgaagatataccaattggctgtgatagggaaggcgatataatcgtgcttccaaataaacatatctttgccagaactattataaatacctcccataggggcatagtttacacctccgctgacagataggtgcttaaaatatcttttttcgatatccacaccagccatgacactttttctaaaatcaaggtctccgttaaacatacttgcaaagctgtagccaacataaggcttgaaggtcattgcgcccaccttatgttgtgctacactgtggattgaaagaaataagaaaagaaaagtataaatatatttacacttcattattctacttatttttagaagttctggtcatcaatcatttcaaaaccgcaatagggtaccaaggctttaggcacacggataccattgggtgtttgattgttttcaaggatgcttgcaacgatgcgtggcaatgcgagtgcagagccattgagtgtatggcaaagttcaattttaccatcgtccgtgtggcggtaacggcatttcaagcgattggcttggtaagtctcaaagttagaaacagacgaaacttcaagccatctcttttgtgcagcactccaaacttcaaaatcgtaacatatagaagaggtgaagctcatatcaccgccacaaagtttcaagatatgataggggagttctaacttttggcacaagccttccacatgattcagcatttcttgaagagattgataagagtgttctgggcgatcgatccgcacgagttctactttatcgaattggtgtaaacggttaagtccgcgcacatctttaccgtaagagcctgcctcgcgacggaaacatgcagagtatgcacaacgcttaatgggcaaatctttctcgtctaaaatcacatcacggaaaatattggtaacaggaacctctgctgtaggaatcaaatataaatcatccaattgcacgtgatacatttgcccctctttgtctggtaattgtcctgttccatatcctgaagcctgattaaccacaaaaggaggttgaacttcgagatatcctgatttgcgagcttcttccaagaagaaagcctctaaggctcgttggaaacgcgccatcttacctatatatatgggaaaacctgctccagtaatcttaacgcctaaatcaaaatcgataagattgtattttttgcacaaatcccaatggcacaatgcgtcgtctggtaaatcaggaatgacacctccttctttaacaacgacattatcagaggcatcttttccttctggaacgtcagcatttggaatattaggaatcgtacataacaattcggttagttcgtgttctgccgtttccattgcatcttgaagagactttgcttccttctttaagtctgccacttgagcttttatctcattggcctcgtccatcttcttatctttcatcagccctccaatctttttggaaagctggtttgcttcttgcttattcttgtcaagtttctgttgtgattcccgacgctttttatcaatgtccagtacttgagcaatggtctctttcgcgttttcaaagtgtttcttttctaatccttttaccacgcgttcagtttcttcactgatgagtttaagtgtaagcatatctattttgttttaaatatttcgttctgttcacaaagttactatttttaattgaatccagtacattgaatggagatattttagtagtttgtcaaagtgtttttcattttaagtcaagtttctgtactactgatggttgtttgagaagatatgaagaaaagtttgtttcataatgcaagaatcccaatcctctgtagagaattgggaatcctgttgtttgtttggaataagtttgaaaattgttaagcttctgcttttttcattttttctgcgtaagcttcttctgaaagaacagaaacggtactcttgtctttacgacctttttggaagtaaacgataccatcacttaaagcatatagtgtatcgtctttgcccattcctacattctgtcctgggttatgcttagagccacgctgacgaacaatgatgttgcctgcgatgacactctgaccaccccaaatctttacgcctaatcttttcgattctgaatcacggccgttcttagaactacctacacctttcttatgtgccattgttgaattcctcctaaaatttaagcgattacttgtttaacttctacttcggtgaactgctcgcgatgaccattcttcttacgatagtctttgcgacgcttcatcttgaaaacgatgactttgtcacctttcacaagagggttcacaacttctactactacttttgcaccttctactgtgggtgcgccgacagagattgctccttcattgtctaccaagagcactttgtcgaactcaacagttttgccggcttcaacatctttcatgtgatgaacaaagagctttttgccctgttctgccttaaactgctgaccgttaatttctacgattgcgtacattgttaattaattataaacgggtttctccgcaaggcgactgatacatctcagtacttcttattgccaaaacggactaaatcggttgcaaaattaatcatttttattgagttatggtactctttatacaaaaagagcgtgcctttttaagagacattaacgaacgtatccctcttttgatgcaatttctaacaaaactatctgtcacaaacttgaaaaacactattactggattccataaaatagcacttatagtgttaagatttcagtaaagtaggaatcgaacagtttgtgaatatgactcggttcatcttcaaagattccataaattgcactaccactacctgacatggatgcataaatagcaccttgctgataaagttgctctttgatagctttcaactcgggaaattcttggaagacaggtgtttcaaaatcgttgaacaattcgtctttccagcattttatcggtttatgaatgatatctttgcacgatacagacggttttttgactttgatttgctgataagctctttgggtagaaatagcaatgtcgggcttgataagtgcaagtttgtatcctttgagcaggtacgatgagtttgatatgggttctaaaacgtcaccaataccagaggcaaagcaaggctctgacttaataaaaaatgcacaatcagcgccaagacgagctgcatagtctttcagcttgtcgaccgttaagttcaaagagaattgttcattcagcaacttcagcatatatgccgcatcactggaaccacctcccaatcctgcttgtgtcggaatttgcttaaataagtggatatggatattaggtaaatcaaaatcattagccagcaatttataggccttaacgaccaagttgtcagtgtctttgcctggtatgaaattgcccgttatcttgatatcacatcgagtgtcagacggaaactcgtcatccataggagttatctcgagggcatcatgaagtgggatagggtagaaaacggtttcgatgtcatgatacccattttcccgaacacccactacttgaagtcctaaatttatcttagcacatggaaataccaccatattcttttatttgttttatagcttattggcgcatcttcgtgatacagttactttttactcatcgtttggtatgaatcttccactccttttttcaccttttctacatatgcatcaatcactgctaccgcagtaatgttcacgatatcgcgaacagaacactcgaaatcagtgaagtgaattggctttttcagtcccatttgtataggaccgatgatttctgtatcggtgtctaaggcttgtagaagtttataacttccattcgcactgcttatatttggaaacactaatgtattgacctcttttcctttcaaacgagtaaaggggaatttatcatcgcgcagtttgcgattcatagcaaagttaacctgcatttctccatccactgctaagtcaggaaagtcagcttgcagtttttctacagctttatgaacttcaagtggactccactcagaatcggaaccaaagttagaataactaatcatagccatgactggttcgtcattgaaaaacttgaccgaatgggcactcaaacgagctatgtcatacagcactttttcgtcaggtcgacgattaatcaatgtatcagcaatataatatataccttttttggtatccaaaatatgcatagtaccaaaggtgtcgtaaccgggacgaatcccgataacttctttggctactttaatcgtattcgaatactttgtataaagccctgtaataaaagcgtctgcatctccatgttccaccatcgacataccaaaatagttgcgctcgtacatcttgtcatacgcttcgtcaaacgtatatccttgtctttcgcatttttctgccaagtgtttagcgaaggcagctcgtctgccttgctcttggtcagcgcgcatatcaacgatttcgacaccttttaaatcaatcttgagtctgttggctaatcgacttacacggtcgggattacctaataagataggatgacagattccctcctgcatcgcctgaaaagcggctttcatcatagtaggatgctctccctctgcaaatacgacacgttgtggatgtcgcacagcggaggcatggagctttcttgtgaatttagattcttgtccaagcagctgcttgagcgattccctatatgcgctccagtcttctattggcgttcttgccactccgctttttaccgcagccttcgctaccgcaacactgacttctgtaatgagtcgtggatcgataggtttgggaataaagtatgcaggaccaaaaactaagtcattgatgtgatacacttcattcactacatcagggatgggttgctttgctaagtctgctattgcctgaacagcagccattttcatctcttcgttaatggcttttgcgtggacatccaaggctcctctaaagatatatgggaacccgatgacgttgttaatttggttgggatagtcacttcgtcctgtggacattatgacgtcaggtctgctctcaattgcttcttcatagcttatttctggaataggatttgccaaagcaaagacaatagggcgatccgccatggagcgtatcatgtcttttgtgagcaccttccctttcgagagacccacaaaaacgtctgcacctttaatcgcttcccgtagtgtgtgtatgtcagtgcgattggtcgcaaaagctgctttttgtggatttaggtcctctctgtcaactgttattaccccatgagagtctaacatcacaatattttctttctgtataccgagtgccatatacagattggtgcaactgatagctgctgctccagcgccattgataacgagttttgctgttttcacatccttgcccgctacctctaaagcattctttagacctgctgcagaaatgatagctgtgccatgttgatcgtcgtgcatcactgggatatccaatgtcttctttaatctttgttcgatatagaaacattctggggctttgatatcctctaagttgatgccaccaaaagtaggagctatgcgttctaccgtttcacaaaacttttctgggtctttctcatccaattcgatatcaaacacatcaatcccaccataaatcttaaacagcaagccttttccttccatgacaggcttaccactaatggctccaatgtcgccaagacctaagacggcagtaccattggaaatcactgccactaagtttcctttgtcggtgtatcggtatgcatcgttgggattgctttgtatttctaagcaggggtatgccactcctggcgaataagccaaactcaaatctgtttgtgtgcgataaggtttagttggctttacttctatttttccagggcgttcaccctcatgataagccaaagcggcttcttttgtaattttaaccataaagtttgattcctaatgaaacaaatgaggttcatagaaaagatgaacgactaacgcattttctccatatcactgaacctattatttattgaacttataacattcaagcaaagttagtaaaattccatgaatacttggtgtggtttattgttttttttgaaactttccttagaaggaaaaagtactttttttatctcattggcttataattcggaaaatttatctaattttgcttgataatcattggtcactatgcgtaaaaataacagtcaaaattcttacagacaagagttgcgtgagcgtatcttagctacggctatgaatgaattttataccaaaggaatcaaagccgttaagatggatgatattgccaaacgtctttccatatcaaaacgcacgctgtatgagatttatcagaataaagaagaattgttgttagaagggatgaaggctgccgaagcagaatttgatgcacacatgaaagccttttctttccaacaaagcaacaatgtaatggatattctgattaagttttatcattaccaagtcaccaaattagctaaaataacgcctgcgtattatgaagatctccacaagtattcattgattacggagtatctgcattccaaacagagcgaaagagataaaaatgcctctctatttatcaaaaaaggtattcaagaaggatttttcagaacagacatcaactattcgatagtaacacagattgctcgtgaatctgtgcattatgccatgatgaatcaactgtacaaggagcattccattcaagaggtgtttagtaacattatcttgctgttcatcagaggcatttgcacgttgaaaggactgcagaggttagaagatttgtcttaaactcctgttgtccacggcgcataccgtaaacgctcagtacttcggtacatagtcttcaaccctcttggttctttcccatgtactgcttcgtcatcatatcataatacaatgactctaattctgcaacgctgagttgcgaaatgctgtattcgatgtttctaatcagttcttctcttcgaagctcctgatctttttcaaatcgttgaaactttgtcatttttgaggattcattataagaagttagtgcaagatttttatttatgcccccagctctttctttcatatgaagatttatagtcgttgaatctgtttgacacccttcaccgtttccagtttctttaccaaagcatccaacttagaaacatcgtccacctgaatggacagatttccactaaacaatccatcatgtgagtcaatattgatagagcgcatcatgatcttctcttccttggcaatgatgctggtaatgttgttcacaattccaatatcgtcgttgccaataatctttaatgtaatggtgtacaacgaacttccttgtccgctccaacgtgcttttacaatgcgatagccaaaacgcttccgtagttcaggggcattggggcagtctttgcgatgaatctttatgccaccactcaccgtgacaaagccaaaaacggcatcaccatagataggatggcagcatggcgccaatgaatattccacaccttttaagtttctgtcaatcaccaagacatcatcatttgatgaatgtgattgaacgtcgggtttttccagattgaaatcttcagcactttgtgcgggtctcgttgagatgctgttgagctctttgtctctaaggtcaatatattggtcgatgatatcgttgacatccagtttttcgtctgcaatttgcttgtaaaactcggacacctccttgaaccccattttctttaccaaatggctcatgatggcttcgtccaaatccaccttcttattcttaaatcgacgctctaagagttcttttgcatagagtccgtctttggcttgcgtctccttcaaagccaaccgaattttcgactttgccctacttgtcttggcaatatggagccagttgggattaggcttttggttgttttgagtgataatctccactgtatcgcccgatttcaactgttctcggatagacacgttcttgtcattaatccgcgcacccacgcaggtgctgcctattctggagtggatataataagcaaagtctaacaccgtagcccctttgggaaacttcttgatttcgccttttggggtaaagacatacacttcgtcttcgtataaatccaacttaaactggtccatcacctgcaagtcatcgcccgcttctaaggctgtgcgaatccctgcaagccattcgtccacatttccttggctctttatccctttataccgccagtgtgccgccagtcctcgttcggcaatttcgtccatcctttctgttctaatctgaacttctacccatttgttttgtggtcccagcacggtgatatgcagactttcatagccatttgactttggcacagagagccaatcacgcaagcgtttggggttgggttggtacatatccgtaatgatagagtaggtttgccaacattgcatcttctctttttctaaaggtgagtccaagatgatgcgaattgcaaacaggtcatagataccttcaaagccacacttctgttttttcatcttctgccaaatcgagtgaatactcttggtgcgtcccttcatgtggaatttcagtcccgcactcgttagcttcttctcaatgggctctatgaaggtggcgatgtatttgtcacgtgcctgttttgtggcattgagcttctccttgataaggtagtaagcgtcatgctccaaatacttcaaactcaaatcctctaactcactcttcagttggtacagtcccagcttatgagccaaaggcgcatacagatagcttgcctcctcactcacctgatgtttggcgtctatgtttgacacatctcgtatttgacgcatgaggtttacacggtcggcaatcattatcaagatgacacgcatgtcctcggcaaaggacaacaacaagtttctgaagttctcgctttcaatcacagggttcttgcggtatagctcatctattttcaccagtccgtgaatgatgtgcgcaaccgtgtctccatatttcgctcccacctcttctatggtcaaaataccattgacaacactctggtgaagtaaaatagcaatcacgccatcgcgtttcaatcctatttcttgaacagcgatttcggctgtctgtaaggcattcaaaagggggttaagcccaaagacatcacggtctacttgtccgttttcaacgcatgccttgaggtgttctctgatattttcctcatcattatcctgcaacgattcaccaatagactgatgaatacgcttgaaaatatccaaatattcttgtcgttccgtatccgtaaactcgaatttcttgctcatatcccaatctttctgttgccacaaagataatattttttctcccaaacaactctgtttttcacaaaaagtagctatctttgtctcaatattcaacgaacgtaaactcgtgcgatgagcaagtctttttaattcaagttcttatgacacagcaagatttacaacaaatctctcaacgtggtatgacggaagaacaagtcaaccagcagttggaaaatattaaaaatgggttccccttcttggaattacaggcagcggcaagtacagaacatggcatcatggttgccgatgagcttcagaagaagcattatgttgagctgtggaaccaatacaaacagggcaatcacaggattgtgaagtttgttcctgcctctggtgctgccagtcgcatgttcaaggatttgtatgcttttttacatgccagttatgacgttcccactaccgactttgaaaaagagttctttggcaacatcaagaaatttgcgtttagtgaagagttaaccgaaaaatgtaaagagaacgaagggcagaagatgaccaagctaatggcacaaggcaaatataaaaaggtggttgagaatttggtggagccaaaaggactcaattacggacagttgccaaaggggcttttgctgtttcattattacgaggacgacgcccgcaccccgatggaggaacatttggtagaggctgcgctatatacgagttgtcatggagaggcttacatccactttaccgtttcgcaccagcacctcgacctctttaagaaacgtgtggcagaagtagtgaacagattttcaaagcggtataaagttcaatatcatatttcattttcagaacaaaagccaaataccgacaccattgccaccaatatggacaacacaccatttagaaatgaagacggttcgctgctattcagacccggtgggcatggtgcattgattcagaacctcaatgatattgaggcagatgtcatctttatcaaaaacattgataacgtagtgcccgatcgattaaagacggatacggtgaccaacaagcaactcttgggaggtattttgatagaggttcaagaacagtgtttccattatctcaatatgttggaaaagggaaagtacacgcacgatcaactggaagatgcaatccgatttgttcagcgtgaccttacgtgtagaaatcctcgtctgaagtatatggaagacgaagagttaattccttacttgaaagcaaaactcaatcgtcctttgcgtgtttgcggagtggttagaaatgtgggcgagcctggaggtggaccttttattgctataggtaaagataaagcaacaagccctcaaatcttggaatcgagccaaattgacaagtctaacaaagagtatgttcggatgtttgagcatagtacacacttcaatcccgttgatttggtttgtgctgtgaaagatagtaaagggcagccttttaatcttcccgactatgtagaccctgaaactggtttcgtttcttataagagtaaggatgggaaggagttaaaggccttagaattaccgggtttatggaacggtgccatgagcaactggaataccgtctttgtagaggtgccactgactactttcaatcctgtaaagaccgtcaacgaccttcttagagagcaacatcaaccctaaagagaacgcgcaggaaagcatcttttttgaaaagaaacgtgtttataaaaaagcttgtgtaagcatttagaaaaggaaaagcgctgctctcttcatgttaattgaagggaatgaacagaaaagtgggagtaaatgagcaacattgactacccactttttcttgagctccgcttgccatttggtagctcaaggttcagctaagcactttttctcatttcgtttcttgtcattttcacattttcatatccttacagagaagtgtcaattgttatcatttttcacaatacgcatacttgtaaaatatttaacaacccgtttattttgcgcatatttctgtacaaacgtgaatatggtcacaaatttgcgaattttatatttccctcattcacaagcacttttattccaacgagcaatgatgttttactttaactcaatgagttaacctccttaagtcatgtagttaaccacactaaagcatgtgttttccatgcttgtttacatgttttagaaggcttaactcaatgcttcaatgcactccttgccatgattttggacttttaccatgtttcgatgagtcatctaattgctattttcaacattttgaaatggtaattatattgacaaaaactacttgtttttgtcgtgttttgtcagtttaattcatacttaaaacgcaattttagcatcttgaaaacaagtaaaaaaagcagctcaaagtttcatccagcccacttattttgcgtgcgccaaattccttttaacatcccccgcatcgttgcgaaacagccactaatagtgcgtttctttgagaatatggaagatagttgcgtataaaagttcttaaaatcaatagagacagtcataaaattattataaataaactcatatctttcgcttctatctcattattattgtatttttgtgcttggttttataaattgaataacaacactattatggcagaagctattgatattcgtgagttaaatatccgaatcgaacaacagagtgggttcgttaccaacttggttcaaggaatggatcaagtaattataggtcaaaaacatttagtagattcattgctcatcgctttgttgagtgatggtcatatacttttagaaggtgtgccgggtttggcaaaaacgctggcaatcaaaacgctggctcagctcattgatgctgactaccgtcgtattcagttcacgccagacctcttgcctgccgatgttatcggaactttgatttactcgcaaaaagaagaaaaattccaagtaaagaaaggtcccgtgttcgccaactttgttttggcagacgaaattaaccgtgccccagccaaagttcagagcgcactcttagaggcaatgcaagaacaccaagtcacgattggagaaaacacgtacaaattgccccatccatttatggtcatggcgacgcaaaaccccatagagcaagagggtacttaccaacttccagaagctcaggtggaccgtttcatgttaaaagtggtgctggactatcctacattggaagaggagaagctcattgtgaaggagaatattcaaggcggactgccccaagtaaagccagtgactaccgctgaagaaatattaaaagcaagaaccatcgtcaacgaggtatatatcgacgagaaaatagctcaatatattgcggatattgtttttgccacccgataccctgaacggtatgagctacccgaattgaagaatatgattactttcggtggctcgccacgtgcttctatcaatttggcaaaagcagcgcgcacttatgctttcatcaagcatcgcggatatgtaatacctgaagacgtgagagctgtggttcacgatgtattgaggcatcgcataggattatcttatgaggcagaagccagcaatctgacctctgaggaaatcgtatcgaaaattatcaataaagtagaagttccttaagcgttggataacgaaagacaggcttgaaagaagtagacaaggcatgacagcaggagtagcacaacttgaggtgagatgacaatggaaacaagtgaaattctaaaaaaggtcaggaagattgaaatcaaaactcgtggattgagccagaacatctttgcaggacagtatcatacggcgttcaaaggtcggggtatggctttctcggaggtgagagaatatcaatttggagatgatgttcgagatatcgattggaatgtcaccgcacgtttcaatcacccctatgttaaagtgtttgaagaggaacgcgaactgacagtcatgctacttatcgacgtctctggctccttggattttggtaccaagaaacaaaccaaacgagaaatggtaaccgagatagctgccacactggcattcagtgccattcagaataatgacaaaataggagtggttttcttttctgataggatagaaaaatatatcccacccaaaaagggacgcaagcatattttgtacattattcgtgagatgctcgactttgaaccacagagtagaaagacagatgtcggtatggcgatagagtatcttacccgaatgatgaagagaagatgtacagcttgtattttgagcgacttctatatcaaacatgaaactgccgagtacgaacacttcgaacacgcattgaccatcgccaaccacaaacacgacatcgttgcagtgcaggtatatgaccaacgagctaagagcttgcccaatatcggcttgctgaaaatcagggatgcggaaacagggcatgagatgctgattgatacctcatcggctaaacttcgtcgtacccacacggcttactggttagagcgtgctgcaaaactcaaacagatatttgccaaaggtggggtagactggaccagtgtagccaccgatgaagactatgtgaaagccatgatgcgcctctttgcacaaagaggtgtgtaaatgttgcaatggtcacgttaccgaaaaggaacggtatgtaattgtcaataaagaatgaatttgataaaaaagaactttataattctgctgataagcacagtgtggtgcttaggactgcatgctcaaataagtgtgcagcaaaggttagactctgttggtatcttcataggacaacagattaacatgacgattgacgtcacagtacctaagaatgccacgattcattttcccgctttgaaaccgtcgcactatctggtgcctggtgtcgaaatactcgagatttctaatggagacacgacagcactggacaatgggttcgtgaaggtatcgaagcaatataccctcacttcgtttgatgaacacctatatgccattccgggacagaaagtacaggtaaacggcaaagactatgtgggaaataccttggcactaaaggtggttacggtggatgttgatacattgcatcccaaccagttctttccacccaaggatgttcaagacaatcctttttcatggagagaatggagtcctatcttttggttgagtgtattgatgttattgctttgtgtattaggattttacctataccttagaatttacaataacaaacccattatcacacgtatcagaattatcaagaagataccgcctcatcaaaaagcactcaccgcaatagacaagctgaaaagtgagagaatggtgtcatctcccgaccaaaagacttattacaccgagctcaccgacacgttgagacagtatatagaagagcgatttggctttaatgccatggagatgacaaccacagagattatttacacgctgcacgagaaaggagataagaagatgattgatgagttgaaaagtctctttgagacagccgacttggtgaaatttgcgaagtacgaaacgcttatcaatgagaatgataagaacttggtgaacgctatcaactttattgatcaaacaaagattgagggtgaacccaccgaagagcgcattgttccgaaattagatgaaaaagacagacgaactcaaaagaccagaaagaccatcaaaatgctcttaaccgccattggcatcagcgtgtttgctttgcttatctatattgtctatcaggtttatttgctcatggtttaacacatggagactactaaatcgtaaaatgaaataacgtggaatttgtaaataaagaatatttcttactgctattattgctcattccgtatgtgatatggtatttcctgtatcgtaagaagagtgaacctaccatgaagatgagcgatacacacgcctatctgtttgcaccgaaaagttggcgaacacgcttggtgcacgcaccgatggtgttaagatgtcttgctttcatctttatcatttgcgtcctggcacgcccccaaacccacaatgcttgggatgaacgttcggtggaaggcatcgatatcatgttagcaatggacgtgtctacttctatgcttgcagaggacttaaagcccaatcgtttggaagctgctaaaaatgtggcagcagaatttatttctgggagaccgaatgataatattggcttgaccatttttgctggggaagcctttacccaatgtcccatgaccacagaccatacgtcacttctcaatttgttgagaaacgttcgaacagatattgcagcacgaggattgatatctgacggcactgccgtaggaatgggattggcaaacgctgtatcacgcctgaaagactcgaagaccaaaagtaaggtcgtcatcttgttgacagatggtagtaataacatgggcgacatctcacccatgaccagtgctcaaattgcaaaaagcttggacatccgcgtctatacgattggggttggaaccaataaagtagctccttacccaatgagtgtaggaggaggaactcaatatatcaatattcctgtggagatagactccaagactctgagtgatattgctgcggtgaccgaaggaaacttctatagggcaacgaataatcagcagttgaaacaaatctataaagatattgacaaactggaaaagacaaagatgaatgtcaagaaattctcgaagcgttacgaagcattccagccatttgccttgttggcagtgcttagtttgttactcgagttgcttctgcgaaacacgattctgcgtagaattccttaaagaaaggtagtcgagaatgccagtgacctacgatattcaacgctaaaaaaatatggttataaacagattgcagcttgctgcagatgaatacgaacacgatgataagatttgatgatcctatatacctttggcttttaatcgttatcccaatccttgcattgattcgcttgataggatatcgaagacgacttgtgaagctcaagaagtttggagatatggagctggtacagcaacaaatggctgacatctcgaaatatcgtccaactgttaagttttggttgttgcaaagtgcattagcactgttaatcgtgatgttagcccgtccacagatggggtcaaagatttctaacgaaaagcgcaatggcatagaaacgattatcgctttggatatttcaaactccatgctggctgaagatgttgttccttcacgtttagccaagagtaagctgttggttgaaaatctggtagataactttaccaacgataaaattggtttggtagtcttcgcaggcgatgcctttattcagctacccattaccagcgattatgtaagtgctaaaatgttcttgcaaaatactgacccctccctgattacaacgcagggtaccgacattgcgagagccattcgtttgtcaatgagtagctttacacaacaggacaaagtggggcgagccattatcctaattacggatggagaagaccacgagggtggtgctctcgaggcagcagcagatgcaaacaagaaaggcatcaacgtctttatcttgggggtaggcaacacacaaggagcgcccataccagtagctgaaggtggctatatgaaagatgaaaacggacagacggttatgacagccctcaatgaaaagatgtgtcaagacattgcacgtgctggcaaagggacttatatccatgtagataatacgaacgatgcccaaaaaaaactcaatgaagaattagcaaaacttcagcgtggagaaacgaatagtgttatttatagcgaatatgacgagcaatttcaagcttttggtatcttagccttattgctattgattatagaagtttgtatcttggaaagtaagaatccattacttaaaaacgttcgattattcaagaagaaacagtagaagtacgatgatcataaagaaaaaaagacatatcttcagtttattactgctcactttgggctttacctctatgtttgcccaaagcgataggcaattcatacggtcaggaaataagctatttagagcgcaaaactatgcgaaagccgaggcggaataccgcaaggcgattgcgcaaaatgcacagaacccacaagcattgtataatcttggttgtgcgctgatgatgcagcaaaaagattcagcggctatcgtacagtacgaaaatgcgggaaaaatagaaaccagcaagagcaggaaagccaaggtctatcataatataggtgtcatttgtcaaactcatcagatgtatggtgaagccatcgaagcctacaaggaaagcttgagaaataatccgcaagacaacgaaactcgttataatcttgcactttgcaagcgtcttcaaaagcaacaaaagaaggacaacgagcagaagaaaaaggatgataaaaaaggtaaggataaagagaagaaagacaatcagcaacaaaaacaaaaggacaatcagcagaagcaacaaaacaagccaaaagaccgcatgagtaaagaaaatgcagaacaactgttaaatgctgccatgcaacaagagaaagctactcagcaaagaatgaagaaggctgaacaacagcctcgctcacgaaagttaaaacgaaattggtaagttggtctcttcctattttataactgtatctatgaatcgatatataaaatatacatccatactgttcattttcagtgttctatgcgctctgaacacttatgcacaaagcatttcggtatctgtaccaagtcaggtagctgtaggcgaaaacttcagactctcgtacaccatcaatacccaaaacgtggaagattttagggcagggaatattccctcagcaattgaaattatcgcaggcccttatacttccagtcagtcaagctaccaaatggtgaatggaaaaacgagtagttcgtcctctatcacctatacgtacacgctctatgcttcaaagaatggcacctttaccattccagcagctcgtgctcgtgtcaatggaaaggtcattagctcaaaatctgtcaaagtaactgtctctggatctgcacgcaaaggacacggtacaccatccatgcgtgatgacgaaggagcagacatgccaatgaaatcagctggcagtagaatctctggaaacgacctctttataaaggtgagtgccaacaaacgacgggtacatgaacaagaacctatattgctcacatacaaggtgtacactttagtggatctcacacagttggaaggtaaaatgcctgaccttaccggatttcatacacaggagattaaactgccacaacaaaagaacttccacattgaaaaagtcaatggcaaaaactaccgatgtgtaacttggagtcaatatgtaatgtatcctcaaatgacgggtaaattgaagattccaagcattacgttcaagggaattgtggtgcaacaggaccgagcagtggatcctttcgaagcattctttaacggagggtctggttatgtcgaaatgaaacgaaatatcaaggcaccagaaatcaacattcaagtagaccccttgcccaaacgccccaatgatttttctggaggagtaggtaagtttaacatctctgcctctatcaatcattcggaagtaaaggctggagaacctttgtcattacgtgtagtggtgagtggaattggcaatttgaagctaatgaagcaacctactgtcgagtttccaaaagattttgataagtatgatgcaaaggtgacagacaagaccaaagtgaccgccaatggggtagaaggtagcatggtttatgacattttggctgttcctcgaaatcaaggaaaatatcaattgccagctatcaagttcacctattatgatacggggtctaacagttacaaaaccattcagacgcaatcttttcaaatcaatgtgaagaaaggaaaggcaaacgctgataatgtagcagattatagtcagacacaagaaaatgatattcgtcatataaaagagggaacaacaaaacaacatgccattgataaattcttctttggctccacagcttattggataagtctgctaattccacttgtcgcttttgtcgtattattgattgtctttagaaagcgtgctatagagcatgccgatgtggtgaagatgagaggaaagaaagcaaacaaagtggctacgagacgattaaagaaagcacgtcaactcatggagcaaaacaagcaaaatgaattttatgatgaagttttgcgagccttatggggatatgtcagcgataagttgaacatgccagtagaacaactgtctcgtgaaaacatcgccgataatttacatcaccaagcggtagatgatgaaacggtcaatacattcttatcggctttggatgaatgtgagtttgaacgttatgcccccggtgacgcttctggaaatatgaataagacaatggactcggctatcacagcaattatgaacatagagaatgtattgaaatcggttgcaaaaatgaacaaaaatgcgcatcatcctaccaacctcatattacttctgttcgcaatgttgctatggtcaacggcaatttcggcaactaccaaacaagaagctgatatggcttacaagcatggtagctatcaagaagcaattaaaatgtacgaggaattgttgaaacaaggtgtcagtgctgacctttattataatcttggaaatgcgtattaccgcacagatgaccttacaaaagcgattcttgcttacgaacgtgcatccttattgtcgcccggagacgatgacatcaagtttaatctacagtttgcgtctgccaaaacgatagataaaattacacctgagagtgagatgttctttgtgacatggtatcactctttggtgaattataccagtgttgacaattgggctaacatggcaattgtttctattgtattagtactcgtcttagctctcttatacttgtttgtcccaaaccttttgctccgaaagataggattctatggaggttgctgctttctcatcctttttgtgatgagtaacttctttgcttatcaacagaagcgtttactcatgaacagaacaggagctatcgtcattgctcctgccacgcaggtgaagaagactccctccaatagcagtaccgacgaatttgttattcacgaaggaacaaaggtctacatcacggacaaaggacttaaggactggagaggcattcgcttatcagacggacgagaaggatggctaaagacgaccgagatagaggaaatttaatcactatagaaagcgtttaagaagttggatttacaagcactcatagaacttgaccagcaagtattgcattgcttgaatggctcaaactcattattctgggatggaatgatgatgaccattacatcgagtatcacgtggatacccttgtacttgtcactcctctatctcattattaagaataatgaaacgatgtctcaaatccttttgatcttcggattcgcctgcttatgcttattgttatctacaggtgttgctgatatttctatcaagccttggatagaacgcatgcgtccatgtaacgaccccatattgaaatatcaaatagaggtggttaacaattaccgaccacgaacattcagtttcttctctggacacgcttcaaacacgctttccatagccatattcatttgtcttttagtacgaagtagactgctaagtattttccttatttcatggtctctactcaatgcctatacgcgactgtatttaggggtgcattatcccagtgatatttttgcaggacttatttggggaactggtgtgggatttttcacctattatctatttcaaaggttatcccaccgtgtgatagcgaaaggaaactttatttcaagtcaatataccaatacaggctatagctttcaagatattgatatggtaatccttatttttgtgtcaaccttgctatattcaacattaaaagcgttaattttgtacacataaaaaaaataaacatattttccagtggaaacaaaacatatacacatcagtgattatcagtacgaactgcccgacgagagaattgcaaaattcccaatagcgcagcgcgatcatagcaaacttctcatttacaatcatggcaaagtgggtgaggatgtcttttataacttatacgaatacctgcctcagggggcgttgatgattttcaacaatacgaaggtaatacaggcacgcatgcactttaagaaagatacgggtgcactgatagaggttttcttgatggaaccagccatgccagccgattacgaacagatattccaaagcaagagacattgcgcatggtactgtatgattggcaacttaaagaaatggaagagtggaagtttaacacgagtttatcacattaaccagaaatcggtaacattaaaagtcagtcgaagagaaccaacaacagatgagcatcagcctgctcagggacttcatgccactccttcaactcatcattggatagattttgattgggatgcagaggatgtttcttttgccgagattcttgaatcaatcggcgaattaccgatacctccctatctgaatagagagacacaagaaagtgataaaacgacctaccagacggtctactctaagattaagggttctgttgcagctcctactgctggtctacacttcaccgattccgtgcttcaaagcttagatgagcatggtattgaccgagaagagttgaccttacatgtgggagcaggcactttcaaacctgtaaaaagtgaagaaataaaaggacatgctatgcataccgaatatatctgtgtgcatcgtcaaacacttgaaaaattgctaaaacacaatgttgaggcaattgccgttggtacaacgagtgtgagaactttggaaagtttgtactatatgggcgtgtttcttgagactcatccagacgctacggaagacgaattgcatgttcaacagtgggctccttatgaacgactgcatacagatggacaagctgaacatttggatggaggcttgatagataacatttcaccgaagcaagccatacaaaacgtgttggactatttagtaagaaatgagcttgagagtttgcatagctctacacaaatcatcatagcacctggctatcagtataaaatcgtcaagatgctaattaccaactttcaccaaccacaaagcactttgttgcttcttgtgagtgcgttcgtaaacggtgattggcgtaccatctatgattatgcactggcacaccagttccgattcctaagctatggtgacagcagtttgttgattccttaaacaggtttcaatgagccaatagttatttaaccaaagaaagaaactaaaatatgaaaataggagataaagtaagatttcttagcgagtcgggtggtggtgtcattgctggattccaaggaaagaatattgtattggtggaagatgaagatggctttcaaatcccaactcccatcaatgatgtgatacaagtaatagatgacgattatagcactgggaaagttgttgggtctacacttcctaagcccacatcggtaaaaaatgcgcttacctcatcggcaaccgatgacgaagaagaaccgattgacgatgatccttccatcaaggaaatctcttttcgcgcaccagcagaggagagaaaaggtggtaatctactgagttgttatctggcttttgtccccatggacatgaaggatatgacgcatactcgttttgaaagttactttgtcaacgatagcaactactacgttagatttacatatttatcggcagagggtaacagttggaagctgaagagtagcatggaggtagaaccaaacacgaaagaatttatcgaagagtttggaaaagaagatttgaacgatttaggacacgtggcaattcaattgctctcgtacaagcgttacaagtcttttatgctgaagcccacgatagatgtgcaattcagaatagataccgtaaagttctataagctccatacctttcaagaaaatgatttctttgaacttcctgccttgctatatacgattgttgaaaacgacaaagtgacccgtcctttagtcgtagattccaagcaattgaaagaagaaatgtatcagaaagagccaaaagaccatatcgaggtgactaaagctgatgagaaagggaacgatacttatgtccgccgatataacgatcgcaaacaaacaggaaacccttttcaactgaaacatcgtggagatgaagacattgttgttgtggatttgcatgcccatgagctattagataccactacaggtatgagtgccatagacattctcaatttccaattgcaaaagtttcgcgacacccttcaacaatataaagataagaaggggcaacgcattgtcttcatccatggcaaaggagagggcgtactacgtagggcgttgattaatgatttgaattatcgatacaagaaataccaataccaagatgcgagttttcaagaatatggctatggggcaacccaagtgacaattcgttaatggtttcaatagactttattttattaacttataatcttattatgatgaacggtggatttgttaaagtggcctgtgcagtgccattagtgaaagtggctgactgcatatacaatgtagaacaaacaatggcccaaattcagcaagctgaagagcaaggagttgaaattattgtatttccagagttaggaattacatcctacacctgccaagacttattccaacagaagcttctactcgaggcttccgaggtttccattcttcatttgctcgacttcacacgtcagttggatataattagtatcgtaggcttgcccattgtggtgggtgatttgttactcaactgtgcgatggtcatccagcgaggacaaatcttgggtgtcattccgaagacctacttgcccgactacagtgagttttatgaaaagagatggtttgcttcttcgcaggatttgaaggagactaccattcgttatgcgggtcaaaacatcgtggtaactcctgatcctcagatatatactactgacgatggggtgcagtttggcgtagagatttgcgaagatgtttgggcgcccgttcctcccagcaacacgttggcattggctggagctgatttaattttcaacctttcagccagtgatgtcgtcattggcaagttcgactacctcaagagtctcttgtcacagcagagttcgcgcaccatcacaggttatatctatgcagccagtggttatggcgaaagcacacaagacttggtttatgcaggcaatggacttatttatgagaatggcgtattgttggcagaaggaaagcgtttcacgatggaaagccaaatccattgtgcacagatagatattgaaatgctgagagcggagcgtcgtaccaactctacttacgtaaatgcgcagcgacaagtcaatacctttgctagtcaaagaggattttcaagcagtttgagtcctaatcagtttgctattttcaacaacacctcggctatccattatatttcgtgtatagctccagagaatgaaacaaccttcacacttgagcggaagataaatccacatccttttgtccccgctaccaatctcttgccagatagctgtgttgaagtgctcaacatacaaaccatggcacttgccacacgattgtcacatatacaagccaagacggctgtacttggagttagtggcggattggattcaactttggctctgctcgtctgcgtcttgacctttgataagttgggactggatagaaagggaattataggtgtcacgatgccagggttcggaactactggccgtacttaccacaatgccatgaatctcatgcacaaactgggtgtcacggtcaaggaaatcaacatcgaaaagagtgtactgcaacactttgaagatattggacacgaccctcaagtgcaagatgtgacctacgaaaacagtcaagctcgtgaacgcacgcaaattctcatggatttaagtaaccagctcaatggacttgttgttggcacgggcgatatgtccgaattggctttgggatgggcaacctacaacggagaccacatgtctatgtatgcggtcaatgctggcgtacccaagactttgctgcgtcatttggttagctattacgctcaacaccttgccgaaaatcaagacattgcgacgatacttttagacgtcgtcaatactcctatctctccagagttaacccctgccaacgaacaagggaagatagaacaaaagacagaagatttggtaggaccttacgagttgcacgatttcttcttgtattacgtgctgcgctttgggttccgacctcgtaaaatattccttttggcaaagaaagcctttgctgaaagcatggcacaagaggggcaacatcaaccaaacgatgctcttcaaatgaaaggacaatatgacgaggagactatcaaaaaatggctcaaggtatttttcaagcgtttcttctcacaacagttcaagcgttcttgcttgcccgatggacctaaggtgacgagtgtcagcctgagtcctcgtggcgattggcgcatgccaagcgatgcaatcagcaggttgtggcttgaagagtgcgatactctgtaaagcgtactattagttcgcttatcgaaaaaacattagatgaaaaagagtaaaaaggaaatcaaccgttgtgcgctgattttctttttactctttattctttgtgactggttcgctgctattataaaagtcgacatactgttgcgccactttcacgtaatcatggtgcttttgaatgtatgcgatgctttgttgttgaagtacactgagtctttctggatgcaatatcaggctctccaattcgtagtaaacactttcataacagggttttacattgacaattggtctcaacgtgtcttcgtgcaatagctggtagttttcaggttcgccaccccctacacacacaattcccttgctcattgcttcaagcgcattcatggcaggagtataactgtaaagctgatccagtatgacatctgtttcgttcatcatgcgttggtattgctcaaaaggcacactttctgctatttgcaaactcacttgatgaggatatttcaatacgaggtcttgtgctgctttcaacataatgtctgttcctttgtagacagaccgttcacgattgatgcctataaacagttttagccgatggtcaccattcgtcattggttgcctttctctcatcgtttttgtctgaataggaaaggggatgaacgttgttttgtcgggaaaatgggcgtggtagcatacccaatattcgtaaagtcctgcaatgatgccgtcacaatcgtgtgcaatatattcattgagccgttgtttatccgtccccaaccagtccctttgctcttttagtgcatcagctgtttggcgcaattctttgcccatattgaaatcgctatactccagtggcatgtcggtgcaacaggtgtgaacccagtagtaatccatgccaaaggcacccataaatatttttttgttgtgtttgcgcaagtatttgtaaatgggcataatgcggtgtgctttgatttccaagaacatcggattaatcacctgcacgacatcatagccacataacagggggagtaagcgatatagtttcgccatatagcgcataccacctaattttcccagtgttcttgacaaatcgatgtcgcgctgatagttcttccagaagtcaccattcgataccactattaccgtgtgtcccaactgtcgcagtccttctgccaatgtccagtgcacattgctgtattctcctaaaagcaaaatcttcatctcaatgtcattaaaatgagcaaatatctgcctgctttggtgcgtattaggcgtttgaaaaggctgtacttacgggtatatctcttatcgggtagcggatagagtccatgtcgcctcatctcccgcaaagcagtttcaagtcggtgaagactgtgcgtatagcatgccacattatatatataatccattgagagctgtgcgatgcgtcgctgcatggcgtttcgctccatgggaggcagcgtgtcaatgcgttgctgaaattgtcccaatatccgaagggtatcttgcaggcgttgcaattgagttttcttatttttgctcgtggtacacgagttgtctctctttcgatagtaatacgccttagcatcggtgatgtacaatcgttcggtacgcaagatgagtaggggtgtaaattcctcgtcttcgttcaacaagcccggtgtaaatcttaatccgcacaacaaatcacgcttaaagagcatgctccaaacagcgactttaaggttgtgtgtactcatatattggctaccagtcatgggaccttcaacgttataagtattcttttgctttttgttgcgtgttaaatcgaacttcaccatctcggcatcctgacatcgcacaagatccaaacaatgctcatagacaaaggggatgagtgcatcgtcaccatcgacaaactgaatatattcgcctttggcgacacacaaccccatattgcgagcacttgcagccccttgattaggctggcgtatatagacaattttatcgagataagcgttcaatgcgccaaggagagacgtgtcggagccgtcatccaccacaattatctcgcagttttgtgcgtcaagcgatagcatcagaatactgtctaagcactcgataaccattgatgatggcaaattgtaaacgggtatgatgaagctcactaacggcttcttcgatacaccttgtgtataaattggttcagttggcataagcgttgtattcctatgagactggaaagcctcgtcttgaatggtatgtcttgctgaccatgaaagctgaatgagggtagagtgggttttgctcccgtcatctcgcagacatccatttgtatatttaatatgtgttcgtaataattggcaaatccctcatgttctgttaattgagaatcttgtaacaccgcaagatgggcatgcagcaaatccttgagttgttcaccaccagccgttgcagtgatgccctgcggattgtcaacgtagaaatacatacctttatcggaggtggctaccaccttgctttgtcgtaatagcaatggtagggtgtacacatcttcaaacaccttattcacaggatagcgtacttggttgaaaagcctccgcttgtacaccttgttacaagcgtaggtgtgtaggtaggcttggctctcaaaccaataggtgagcatattgttgtaacgctttgcaggaaaggataatatcttttctcgctgtttgtttccagtgtggagggtaataggatattcaatgatatctatgtctggttgatccactaattgttgcatcacttgttggtaggtgtctttgcccacatagtcgtcactgtctacaaacgtgacgtagctaccttgtgcctgtaacaacccagtattgcgagcagcacttagtccgccattggtttgatgtaccactttgatgcgggcatcttgctggcaatactcatcgcacagcgtaggacaaccgtcaggtgaaccgtcatctaccaagataagttcccagtcggtaaaggtttgttgcaaaatactcttcacacatcgttgcaatgtttcctcgacaagatagacaggtatgatgatacttaatagcatgccttgactgttgtaacgtatctgcaaaggtaactgtttctacgcataaacacaaataggtttcgtgttttgttaagcaactctcaccgctctttcatggaaggaaggttgttggtagttataagtggcttcgagcaagataattccgtaatttgttaggaaaaaatctttttataggatctattcccgttgtctttatcaaataatccaaaactttatgtctataatctcccccccccacgcattatttccatgtttttatttggcggtgtgaaaacaaataactaattttgcacgcaaaattacattactaacctgtaaaatttaatacaattatgacaaaagcagaactggcaatgaatgccaaccccgtggtggcattcctgcagaagcctacggaagaatttacgaaggcagacatcatccgcttcatcgaggccaatgaagtgaagatggtcaatttcatgtatcctgcggacgacggcaaattgaagaccctcaactttgtcatcacgaacagggattaccttgagaccatactgacatgcggtgagcgtgtcgacggctcgagcctgttctcattcatcgaggcgggaagcagtgacctgtatgtgctgccgcgtttcagcacggcgttcctcgacccgttcgcagaaatcccgacgctctgcatgttgtgcagttacttcgacaaagacggcaatccgctcgcatcttctcccgagaacacactgcgcaaggcgtgccgcgcattccgcgagacaacgggaatggagttctatgcgatgggcgagctcgaatactacgtcatagacgaagacccggaggtgttcccggcaatcgaccagcacggataccacgagtctgccccgtatgccaagatgaacgacttccgccagcagtgcatgctctatgtggcacagaccggaggggagataaaatacgggcactcggaagtgggcaacttcacagaggacggcctgctctacgaacagaacgagattgagttcctgccggtgtacgccgagaaagccgccgaccagctcatgctggcgaaatgggctattaggaacctggcatacgagatggggctcaacgtgacgttcgccccgaagatcaccgtgggcaaggcaggaagcgggctgcacatacacatgcgcatggtgaaggacggcatgaaccagatgctcgatggcgggaaactgagcgccgcagcgcgcaaggccatcgccggaatgatggacctggcagagagcatcaccgcctttggcaacaagaacccaacgtcatatttccgcctcgtgccgcatcaggaagcgccgacaaacgtttgctggggcgaccgcaaccgcagcgtgctcgtcagagtgccgctcgggtggacagcaggcatcgacctctgccacgcagcaaacccgcaggagccggaggccatcgccgacacatcggcaaagcagacggtggagatgcgctcaccggacggcagcgccgacctgtaccaactcatcgccggcctctgcgtggcatgccgccatggcttcgagatggacaacgcgctcgaagtggcagacagcacatacgtcaacgtcaacatacacgatgcagcaaacgccgacaaactcagtaaactggctcagttgcctgacagctgctgcgcatccgccgactgcctcgagcgccagcgcgcggtgtatgaggagaagggcgtgttcagcaaggccatgatcgacggcatcatcaagcagctacgctcattcaatgaccgcacgctccgccacgacatcgagaagaaccacgatgccacgaagaagatcgtgcaggaatacttccactgcggataagcctgcaacggcaaaatagatattcaggagttaaggagttgcggagccaaagagacaacctcggctgcacaatcccttaactcctgatattttaaaaactgcggtataaatctgcgagtatctctggaaagatacaacgcaacaattgctcggtcttcatgatgcaaagataacaaatacctatgaaattatgtgcatgaggagagagggatgcaactgggttttacgactgacccgaaaataggggagtgtagaatgttttaataaaagaaatagagcggaatacgggaatcgaacccgcctctcaggcttgggaagcccacgcactaccgatgtgctaattccgcaagagagccgatacccggactcgaaccggggacctactcattacgaatgagttgctctaccaactgagccatatcggcgttccttatttaggcgaatgcaaaggtaagcaatttgcttgatatataccaatagttcaaggacacatatcaaagagattagagtttattaacatttttagcaagtcggttttggatggcaggaatgcttgctactgttttcttcttcatctatttagtgatgtcgtagcccctattttgaagcttacctgttgataaccaacaagtcggtcagtgcgttcgcctgttcctctaaagtagagaagtgcttgatatttgttttctgtttgataaaaattgccctctgatgatacaggttttagttcgttttggttattgacaacgacatattgataggagtaatatccttgtttgagaagtacagaaccctcgtaacacttcgtatctcgatgataagtcattcgatattcgggcgcaagctgataatgagtccaattgccgtgcaggtaaacttctccagtttgttgcggggctcgtaaacgaaagtggactatctgatattctgaggtggtgttgttttcgatgttgtcactattcctaatgtaaaaactaccattcgcatcctcgtcgtaaacatagctgggtcgagactcgtctgtccaaacataggcatgatagtcggtaccatcccagccaactgtttctattcccattgtgggatggttgacatctaaggtttcaaatttgcgatattcattgccaccatcgaatataagtgcctcattatgttcccaacggagtccctctggcgtgacgtactgcggcttaatgttgaatcgttgctgtgtccatatcccattttgaagtactactgtttggagttgtttttgtggatcagtgacagacaggttgccatatctcacagtcatgttgacttgttgatgacttcctcgaatatcccagtctgtgttatccgttatatctaagccaatttgcgctaaaggctcaacaaccatgaagcaaacggacagtattttttcattgtcattattcgcatcgtagactgtcaaccgatagttcccactcatttttaattgacattctgcgttgggaatttgaagactgtagtgcgtatattgcacttttgtgttcactgacttttgaaagttcttgataatgttatcctctgcaaatccactcaggaaatcactttcaaagagttgtgtgcttggcgtccaattagcttcacagtgttcgatagagtaggtgtatcgatgatattcatgtgtaaggtcatcaaaggagatgttgatgggcaaacctccaagagtagtgactggaggggagagccaatcatcacctgcgaccacctgtaaagaagctatcgattctttatagatttgagcgttttgaccaagggtagttgttggaattgcacaagaaatgaagaatatgctcaacctaagaattgacgtatagatgttttttatctgaaacataagccctaaatattactctattatttagaattcaaacaagatgcgaccattgataagtcttcccgtaagataattgggaacagcatattgttgattggtaacatctgtaatccaataataagaattgacattattgatgccaaacaaattgagaccatccacacctaaccatatgtttttaaagatggactttgttcttctctcttcgttattgaacagtctatagctcatacctatatccacccgtttataagcgggggcacgaaaagaatttctctctaactctttatgcggagcagcaaagggcaatccgtctgcataggcaagtttcaaagacattttccaacgattggtaccaggaaagaagtcggtgaaaaacagattgactgaatatttctggtcggtaggcatgggtattgtttttccattcagcttcatacgtgcatccatcaacgaaaaactaatccatgagtctctatctggcacaaactcaccatataatttgaagtcgatacccatggcatgtccagaactcttgttgtctccatagtacaccactttcacattgttgatactatagggaatgaggttagagagagctttataatatatttctgtggtcaacttaaaaggtctgttgtttacacgaaatctgtaatccataccagtaataaagtgaatagaacgctgacttttcgctttttcgttcagtcgggcgtaagtaatgccattaacggtggtagtgtctcttatctctttatagaaaggggtttgataatatagacctgtggctatcctaaaagtcatgttttcattgaatgctggaataattcccaatgagagtcgtggactaaccaccaattccttattaaaactccaatggctcatacggatgccgtaattgagtgtataatgggtgtttccgcctttattggcgaatcgataagtatcttgaaagtaggtctcaatacgattggactttaattgattgttggctcgtaaggcataaatcatgtataagtctttccccgtgtgcggaatactatatccacttgagtctctcatttcgtattccgctgcgtactcattgatgcgttcaaacttgtaggtgatgccagcttcaatacgatgttgcttggtggtatggcgagccatcaattttacgttttctacatgtgcttgaagatagttgcgtgcgtgttgaaaataggtaccaactcccaagttctcacttgtctctgtctgtgtaagccagtattgtccttgtatgtcatacttctcacgctcattggtataaaaggcagaagccagaagagatatggaagtagagtcaccaaagttgcgagtaatatccatggcaccaaagtaagtagtgaaacgatccttttcatgtccgtcgaagtagactttgaaagattttacgtttttgagtgttccaaaggaggtctctctattttgaggtgtaaactggtaatgattatcagatatgtttccaatcattgatactttccaacgttggttaggggtatagacccaaaaggtttgataatctaaaaatgcaggtttgtattctccctttgtttgcagacttcctaataaatactggtttgttttgtatctaataccattgctccatgaaaacttttttgttctgaacccaacaaacgcactggcacctaacatgctggcagacagattggcttcaaaaggtttcggttgtctgtaggtgatatccaatgccgatgacattttgtcgccatactttgctgcaaatcctcctgtagaaaagcctatcttttctaccatatcggggtggataatagacaacccctcttgttgtcccgatcgaaccaagaaaggtcgataaacttctatgttgttgatataaacgctattctcatcgaaggctccacctcgcacattgtattgagaggacaattcgtgatgagaagagacgccagcttgtgtcttgataaggtcttctatggcatttcctgtcgcagaaggtgtgttttttgcatgttctgcttttatattttgcgtctgtcctgtctgtatctgttcgccttttacgtgtacttcactcagtgtcgtttcattggtaaaaagaactatctgtagtgtttgtttcccttttggagagcgtaaaacacgtttcttagtacgataacctatcattgagaatttgacaacaaccgaatcagcagtgtgtaaccgcatgctaaattcgccctttaaggaggtaacggtcgccttcccttgtgcaaggcaagaaacagatgccaattcaataggattgagttgctcatcaaccactttgccttgtagaataaatgtttgactttgtgcgcaaagggcacaaagtacaaataatggtaagagcagtaatctcaatttaatcattgtctttttaacgtattctgccacaaaatattgtgccaaaacttgaaaaggtaaggaaagcacatggtattaggcttgagcatcaaaaggagacgatgtttgttgtctgtctcagtcttgttctgtttttctttcactttcatggtaagtccttattcatgccgaatgacataaaggcggtattgtacttctttatgtcattcggattgtatcggcaatcatgatgatgagtgaaacagaatgccaacattgtaatagaaaggataaattcctgaactattgtataattctggtcatattaaattctgtgattttatcgtctggattcaccttagctttgacccgatagtggttacttgtttgagtgttatccaccttctcaacatcttgattgacagagaagttgacagaatactcatactcctcgtcacctatttctttcttttctatcttgaaatcattgagcagatgccaattcatacttgcaacatcctcacgatagagtttatgtagaaacagcacaacatcatttttattggcgtctgacttgcctaaaaaggaagaaattatcggattcatcaagcttgataaaccttcggcatccttttggtcaatgtattgaaaatattgcctgaacagattactaatcatagctcgttcttcaggttgtactgttgcggcattgattcgtttaatgccatcttttgccatatccacatacgcaccattggggtggtcttccaaatagacttgataggcatccaaggtgtgagccatactgacagaaacccagtcaatagaatctatttttcgaagagcttcggctttatgtggtgaatcgggatgctgatctatataattctgtaaggcggttttagagttgcttaccaatgcatctgtccattctcgatccattgtctgaagggctgaaaggtgggagagaatggaatctctatgagcggtgggtgcattcttaaagcgatccaaatagtcttgcaaaacaatggggtctgaacttgccaatgcaaaggcgtaggcttctttctcttgattatgttgagcctgagaataggaataataaccaccacagcaaatagctatcgctatgatgaatccaatccataagctggtcgtttttttctttttgttaggctgcttaggtgagggttgctcaccattctcaggtaaggatgttgggttgtctatgggtgttgtttcttcctcctcgctttgaggaataccattttgataatccatgttgagatgctgacaacgagggcagcgtctcaaatccttaaaaaacacttcaccacactgcggacaggtggttatttgatttgcaatctttaccccacaagaggggcaaatgggtgctcggtcacttatttggtgaccgcactcaggacattttataatcgccatgttatcaatgtattactatattttagttaatgtttccatttcaaggtcttttacttcctgtatcacggcgaaatctaatttctcttaaaccgtgtcgtcccatcattctacttttatccacgaatgtgttaatgccattgatgcgccctttaccagtgtattgccacatggtaatgtctcgtccatcctttagcacaggttcgcgacttgtatattgggcaatcatgattttatagttatcaagctgtcccaccaaataatgatcatagaagtttgctcccgtatagataagtggtttttggtgataagcctcttctaccatgcctaaaaatttgtgaagagagtcacaaaaggcttccgtagacagtccgctttttgtttctatatctatcattggaatcaagtcctgatctttaggcctacattgtgtcataaaattttggagttgcaatgtaagattcgttttgggacgaaagaagtgataagagccgactttaaggccgtacttattagcgagttgaatatttagttgataggtagggtcgatgttgttgccgccttctgttgccttcaaatatacatacgcatttttcgtgttttctccaacagcctcccaaaacacttcgccttgataatggcttaaatcaatcccatgtacgtgtgtacacgtatcttcacactgaacatcggcgtattgagcattagctacaatgaccatagagataaacaataataatgtggcgattcttttcatacttgcaaagttaataaaaagaattcaatgcgttaggtcatatcatgatttttgcatatatttatgatttaaggctggttctataaattaccaccgcatatagtcattaaatttttatgaaatacgttttgttatcttttggcttctttttagttcaaaatgtaagttcgttcagtcgtgtagctcgcttcactccttcactctcttgcattttgacctcaaaaataagctcaaaatctaacaaagctaatttatagaaccagccttaacactccaccagaattactctttttgtaaatataattaaccaaaaaacgtgtgatgaaaagttgtgaaatagaaaagaaaatcagtaaatcgtagatagattttgcgtttttttcatcaaaataatacagtttttgcgttataacattgagttaaggcaacaaaagtatgtagattgtcgcactactaagctataatagaagcacaaagtcattgctacaacacgcattttttgctgtttttgagacaaaaatagtgataaaaagcgcttccatatccgagatatttcggtaacgcattcactgacattgagttacaaaactcgctcaaaactcgcgtatttacagcctaaggcagacccgttcagaaatattaaagttatggaggggtgtttgttaagatttttgacagttattttgttctcgattcacacacttaactgttattcttctatctccgacaagctacgtcctaaatttgcgagaaagctactggtagtttcaatgggagcataattgatataacgtatgctgcgcttgagatttcttttcagtaccacattattattctgcacaaaccctgcctttgattgtctaaaatgccattctttactggtatctatttctgtatgggttagcgtgcgcaaagccaatgcgtatgaatttcgttccacctcttgaacaaagggaatttcgtcttgttcgaaattaaaaacctctatcaaaatacttccttgcagttgggcaatgcgttgaatatgaagtgcgttaagccatgcttccaatttaacgaaatctactttgtcgcctttagtacgtagaaattttcctaattccaaaatacctcttaaagagataccgtagttcaggatgtgattgatattaaacaagataatatctaacagtgcgagtgtatctgtggaggtgtcaatactgtggtactcgtcatgccgaatcttattcagcttgcgattcagaaagcgattggatagggtaggtggggcgtcttttgctaaggcttcctccttgacggtattcgctgctaaggcttgaatcagctgttcgggtatgtgaatattggtgtcgtattggtgattcttaataccttttagtgcgatggattcgactttttgtgattctaaaagctgaaagaggcgcctccacttaaagttggacattggttctaacgtaacatattcattcaatgcgccagaccttaaaagtcgaaagaaattacgtttgataatatccataaaaaatgattaaaataggagtgtactgatgatttacagctgtgttcgacgatagaagtccatgttctctttggctaacagttcgatgggcatgtaattaacgggttcaactttctttttgagtacaatcgccctaaaaagtgtttcaatacagctataaccctgttgataagcatgttgtgctatcaagaacgagatacttccttgttgtaaacattttgcattcttttctaccatgtcatagcccatgatttgaatgtcacgcctattcttccttaacaagtaatcaccgacaatgtgggcttttgaaccaaatgtaatgcaatggtgcacttcaggatgtagctcaaaaaagtgttctattatttcatcatactccttgcgtgtggcggccataggtagttccatttcgagaatattgatttcggggaaatgatcatacatataatgtctaaaaccaacttcacgattggcttgctgtttagtactcactttgccgccttttatgcgcttcataatcgctatctctttctccttattgccaatgagcatcaagactctggcggaaaaatatccacttcggaaagaatcttgtccaaagaaagataacggattgaggtcgggcatataggagtctaacatcacaaacggaattttttgctcgtgtaattggtctgtgaactgtcgagtgacctccaatgttgacggcaccacaatgacgccatcgggttgttgctcaatacatttggcagctacttgaagaaaagattgctcatctgaacgttcgtaattgaatatctttagttctaaataaaaatcacgtctaatctcaattgccctttttgcaccttcttctatttcttcccaataggcttcaaattcatgctgaggtatgaggagataaaaagtgtacgacttgttgtaagccaaagcacttgcgtacatgttgggttgatagtccatttccttcaacgcctgctctaccttttcccttgctaccttggacacattcggccgattgtgcagcactctatcaacagtgcctactgatacagctgcccttaatgcaatatccttaattctaatctttgctgccataatacgcttatatatgctgcaaaaatacaaataaaacttatattgttagaaaacacagcgtgttattttattgagaacagacttttttaatacctatttgtgtgttttcaaaatgaatttagttatctttgtctgactgaatttctgtaacctatctatgttcataaaaaaactaccgacataccctgccttgatactattgctcttttggtgctatgtaactgtagtatcatgttcggctcctcaccctacagaggtggtggcgctgaatgaaaaggcttatgccttcaggtatagaaatctcgatagtactacattttatgcacagaaagcgttgaaactttcaaagactcgaagtggagattatgcagaagcgctgaacaatttagcctttgtcagtctcgcaaaaatgcaataccagcaagccgattcgctcttgtcgcttatctttcagaacacaaataaccaaatagagcaattgattgccgatgtacaaatgatgcgattgtgtcaaagatgttcagagaacaaggacttttatgtttatcgggagcgcgcaataagacgatttaagcgcataaaagaagagagtgcaaatctgtcagaccatcaagaactgagaatgatttacgctgaaagcgaatttaatattaccaattccacctatttctattatgtgggattggaaaatgagtctgtggaagcaatcaacgtcattgatgtcaatggggatatcacacgagatacgacccaactgttgaactatttgtataatgttggtgcaggaggtgtcattctgaatggtactcgtgaagaaattaaccaaaccgagttcgattatttaatcagatgctatcaattatcaaaacaatttcactatccctattgggaagccaattctcttcaagctattagtgaacggttgcaacgtaaaaaataccgtgacaagctcatacatgataatctgccgtcgttccaatatctcaatccctatcacatgccagactctctcttggcaggacatcttgcacagcgtgccttagataaatttcggaaatacggtgacgtttatcagacagcgggtgcctatcgaacattggcacaatgttattgggaattgcacgactatccctctgctcttatctgtttgacaaatgccttgaatacaaatcaagccattcttcaagcgcctgatttggtggcttctattcgtgaacagttatcattggtatattcggcgatgaatgacaaacagaaaagtgactataacagaaatctatatcttgacatacaagagggaaccagacaagaccgacagttagaggcacgtgccgaacagttgaaccaatctttgcgcattctcaatcgaatgattgtagccattgtcctgatgattgttttcgttagttttctcttatggatgtttgactggatgcgaaaacgcaatgagaagcgcacatctgttcttgagaaactgttggaaccgttagaggagtggaaagtggaaaatgaaaagtttttatccacttatcaagagcggtatgaagagatggaggaaagaaaagagatgacagaggtacgtctatcgcaaaataaaagacgcaatttggaacaacgtgccaaattgtcgttggttcaaattgttcttccgttaatagatagaatattacatgaagtgcatcgcttgtgtgatagacaagaaaattcccaaatccgagcagagcgatatacctatattgccgagctgaccgaccaaatcaatcaatataatgcagttttaacgaattggattcaacttaggaagggttatttgagtttgaaaatagagagttttccacttcaagatttgcttgatatattgagacgtaatcgcatgagtttcaggttgaaaggcatagagctcaacattcaagacaccgatgccgtggtgaaagcagacaagacgcttaccctgtttatgttgaacaccctgtgtgacaatgctcgtaaattcactccgtctggagggaaggtgagagtttatgccaacaatgagcgcgattttgtggaaattgtggtagaagacacgggaataggcatgacttccgaacaacttcagcatttattcgatcacaaacctatcgttgatagtgcagcgcctgatagcgcatctttgcagaagcataatagtcgagttagccatggatttggactgatgaactgtaaaggaattatagaccgatataagaaaatcagtaaaatctttgacgtttgtaccattcaggctgaaagtgaatatcaaaaggggagtaagtttctctttaggttgcccaaaggggtggttagactcctattgacagtggttcttttaggtagtcaactggcgatgccattgtttgcaaaacaattggtggcttctacacattcgtcaagtcatggtaatgcctctatgaagataaacaaaggtgccacaagcatggcaagtgcttttgcagacagtgtttatcaaagtaatattaacggaacatttcacaaaacactgatttatgcggacagttgcatttcatatctgaataagatgtatttagcacaataccctcaaaaagcagataccatggtactcatcactggcagtacggcattgccagcagaaatacaatggttgcaccagcatgtttcaatgccatacaatctcattctgtccttgcgcaatgaggtagcagtggcagcattgggcttaaaatattggaacttatactcctacaacaatcaagtttatatccaattgtttcgcgaacgaagtgccgataatacgttaagcacctatgtcaagatgatgcaaaagtcggagagtaacaaaaatattgccatagcattgctttcgttcatatttcttcttattttcccagcttattatttcttgtattatcgacatcgaatatattaccaattctgtgttcataaaattgacaatatcaatcaagtgctgttgggcgaagacagtgcaaagaataagttggcaaagataaatgagctttgggcttctaacaaacaaatcttcaatccgcagttttcacgtctcaatgccattgtcgcccaaattcagagtgcactcaagcagcgcattcaaacggaagaggtgcaagttcatcaaatggaaatattggaagacgacttgcatcgtagcgattacgaaaattcacagttgtacatcagtaacagcgtgttggataattgtttgtcgaccctcaagcacgaaacaatgtattatccttcgaaaatcaaattgttggtagaaaagaaggatgaaaacttggcaccactcaaagagatttctacctattatagagatttgttcaagatactgagcgcacaagccatgcgccaagttgataacacttcaagagtggatgatgaactgctgcaatacctctttgatatgcttcaacaacagaataaagcaaagcccatcatgcaaattcatcaacgagatgaaacctacaccttcattgatttgacgatgcaaaatctccagctctccgatgaagccctctctgctttgtttacgccagacactcacgatatgcagttttggttgtgtcgacaaattatcagagagttaggagaggcaaccaatgcccgtgcttgtgggattgaagctcggagacttgcagatggatacgtacacatattaataactataacgaaccaaacatggaaaaatttaaaattatcatagtagaagatgtacccttggaactaaagggcacagaaggtattttcaagaatgaaatcccagaagccgaaatcataggtacagcagctaacgagcaggcatattggcaactcatcaagaaggaaatccccgagttggtgctgcttgatctcggtttggctggttctactacggttggcgtagagatttgccgtcaaacgaaagccatgtatccacaggtgaaagtgctgatttttacgggcgagattttgaatgaaaagttatgggtagatgtgttggatgcaggctgtgacggtattattctaaaaagtggcgaactacttacacgcggtgatgtggcaagtgtgatgagtggtaaacggatggttttcaatcagcctatattagaaaaaatagttgacagatttaagcataccgtaaataacgaacttatgaaacaagaagctttcatcaattacgagattgatgaatatgatgaacgcttcttaagacatttggctttgggctacactaaggagcaaatcactaatcttcgaggtatgccttttggtgtaaagagtttggaaaaacggcaaagtgaattaatacaaaaactgttccctgatggaaatcaaggggttggcatcaatgctacacgattggtagtgagagccattgaactaagaatactcgacatagataacttgcaaccagatgaaacataagatttttgccagctccatctttatcttcatcgtattacaaatattagtcatacttggctcttggtttgtcacggtcatgtttccaacattacccgtacgttccatgttaagtagcgaggggataagatggttcttgggtcaatatacttcgaatttagcctctcctctcttggtatggcttgtcttggcaggaatgacttatggcgctttgcggtcaagtggattgtcaagagctattatgtatttctcaaatatttcttatcgtcagcgatttgctttgaaggtggtagtggcagaacttgtcttctttgctatcgtcttgtttttgatgactttcttgccgcaagccattttgttaagcgtcacgggcgaacttttccccagcagtttttcgaggagtcttattcctattgtctgttttctgttgacgctattttcaattacctatggattaatcaatacatcttttacatcgttaactgatatcttcaactctttaacttcaggcatcatcgccatttcaccgtggttagttatttatgtcttcgtgatacaactttattattccattttgtttgtagtcgttacttgacagcttttcatggtgcaagagagttggaaaaggggagaggctcttgagtcatctgtatcttacactcatttattgtatgagcaaatgattactgtagtgtcggaaaaatgttaacgaaatctaaatgcacattttttttataagtaatattttgtcgttttatattttatacttacctttgcaatcgcaaaaaagaaatggtgccatagctcagttggtagagcaaaggactgaaaatccttgtgtccccggttcgattcctggtggtaccacttaaaagtaaaaaatagaaatcctgacagttgttcaggattttttttgtgccaataggataagggtggggaactctttattctgcagagaagtctgcaactgtcttccgatacatggaatacagacgtgtgcggtctacgaaacccgttaaatggtcattgacatctactatggggaggtagttggcattggttttgtcaaatttctccatgacttcttccatagaatcatgaatacctaaagtagcctgaggaggaattaaaatttgactcaccgtaaatcgatgataaagctcagtacggaacatcacatgtctaatcttgttgatgtcgatgattcccaccaagacgcctgcggtatctaccactggaataaaacttgtgtggcttttactaatcgcattgaccaactcgcctaatggcatttcaggttctactgcggtaaagtttttatcaatgacactatccaaactcattaatgtaagcacggagcggtctgtgtggtgagtcaccaagcgtccttgtctcgccagtcgcatggcatatatgctgtgaggttcaaaaatactgatagccatcaccgaaacgatgctgaccataatcaagggtaaaaacaagtcataaccgcctgtaagttctgcaattaagaagacacctgtcaggggagcgtgcatgacacctgccatgacacctgccataccgagcaaggtaaaattcttttctgggatatacacgccaatttggttcatgttccaaactcgtgcaaacaagaatcctccgaagcctcccacaaacaaggaaggtgcaaatgttccacctacaccgcctgcaccgttggttgccgacgtggcaaaaatcttggtgagcaataccaaactgatatagagtaccaacaactcagcgtgccctgaaaacagtgaattgttcatgacagcatcccagtcggcttccgttcttccatttaaaagagtattcagcgaatcgtagccttcaccataaagagaaggaaataaaaagataagcgagctaagtaagactccacctaacatcagtttggcataagggtgatgctgaagtcgcgcaaatactccttcgcattttgtcatcatgcgaataaaatataagcttgctatcccgcaaaagagtcccaacaagatactggctggaatacgctcaatgctccaggcactatctaaggtgaaatcgaacaaagccctgtttcccgtgaagatataggtaaagacagttgcggttacgcacgaggtgagaatgggcagcaaagaagccatactcaggtctaccattagcacttcgagcgtgaatactaaaccagctatgggggccttaaagatgcctgcaatggcagcggcagcaccgcatcccactaacagcatgagggtcttgttgtccatcttaaacagtcgtcctaagttgctgcctatcgcagaaccagtcagtacgataggagcctcagctcctaccgaacctccaaacccaatggtgatagcggatgcaataactgatgaccagcagttatgcactttcaagcgtgatttctttgtagaaatggcatagagcacttgcgtgataccgtgcgaaatgttgtctttcacgatgtaacgcacaaagagggtagtgatataaataccgatggcgggaaataccaaatagagccagttgaaagtgtctgtgtcaaatcgtgcagtaagaagatactgtatttggcgaatgataaagtgcagcacgtaagccgctacagaagcgaagatgccgataaagaaagataagacaaccgttatctgacgagtggtcagatgctctttgcgccaattgtttatctcattaatgagcatgtacgttcttttaaggataatcagaataggtgagtgacccttcctgtttctttttacaaatgttctatgcgattaaatttcgctatctgtgtttcttttgctaattgaaatagtttctaaacatcaggaggaatagttcgttttctatttcctgataatcgtcacctcaccgtcttctttcagtttaatgatgctactgggcgtatgaggtttgtgttcctgcctgcgtgaaaagcagacgtagtccactgcatcaaggagttcttgactaatgtcattatagttagctgcagcgggttcgccactaatgttcgcactggtgcttaccaagggtttttggaatcggtagcatagttcatgggaaaatggttctttagtaatacgcagtgcaatgcttccatcttctgctattaagttcggggctaagtttatggcaccatcgaggataattgtggtgggcttagtggcaatatccaagatgtcccatgctacattgggaacatttctcacatatcgttgtagtcgggcatccgaatctaccaaacagatgagtgccttagagtcatctcgttttttgattttgtacacttttgcgactgcttcggcattcgttgcgtcgcaaccaattccccaaacagtatcagtagggtagaggattactcccccttgcttcattacttcaattgcgttttttatatcttcttgttgattcatcttcttcttttctcccaactctcttatattttattcgagttgtttcgccatggagctttttatagcgaagttattagtgttgtatctctatgaatgataatcatttatgacgtatgcaatggtatatgacttgtgtatagtgcaagctttgagccagccatgacgccttatgaaagattcattgtctatcgtagttctacatacaataaaaatatcatgcaaagataataagattttttaattctacttgaagataaaaattatttttatattttctaagcaatatatacagcggtaatcgatagagctaaacttgcttctctttatgagtccaacaattcaaagcttttctaaatctttaaggcgtcacaactttatctccaaccattgaggaaatccttggcattcattcgctttttgccagccatctgtaattctgtaatttcaagccattcggtggtggtagctacatatatttttctttggtctgtattgatcgaaccaggcttctctgtggtcgtttcacctgttagttgtgtcttgtaaatcttgatcatcacctgtttgctcgttggatcgtctttgctgatattccaagtagtccatgctgcggggtaaggactcagtccacgcacaaagttataaatgtctttggcagattgattccaattgatttcgcatgtttctttgaaaattttaggagcgggacgcaaattatgttccaatcgaacaaattgctcctgtggtgtcgctgcaatctttccatcattagccaacaattggtctatcgtgtccaaacatatttcagctcctaacaccatgagtttatcatatacatattctacgtcagcatcctcagggataggaagctctttctgcataataatgcgccctgtatcaatgttgtgatctaagaaaaacgtggtcactccagttttagtttcgccattgataatcgcccagttaatgggtgctgcgcctcgatattgaggaagaagggcggcatgcacattgaatgtcccaaatcggggcatgctccagacaacttctggcagcattctgaaagctactactacctgtaaatctgccttgtaatcagcaagctgagttaagaaatctgggtccttgagtttcgctggttgtagtacggggaggttttgggatagcgcgtatttctttacttctgaagcttgtaaggtttgttgatgtctaccaacaggcttatcaggttgagtaactacggctacaacatgatatccgccttgcacaagtgcccgtaacgacgcaacagcaaactctggcgtacccataaatataattcgcaagtcttcttttgtcatctcgttcttttttaattttcttgttcttttttagttctttagtttgatgtcaaaaagctattttatttattatatttatcataatcatgattatcttgattaactaagcgcttttggattgatgttttcacttcatcttgaaatgaaactaaaagtaatacttcattgtgaagacactcacattctaatatttcttgatgatgtgctattttaggatgtactgctcattttttattttcactattcaacgaatcatatagctgataaagctgttagtaaacacggatgctgtcaccaaccttaatagtatgatccacgtcaaagttattgagtttataaagacttgaaagacgcataccataaatttgtgcaatgatgtacaagctttctccaggctttacaatatgtggatgattcttaaatacttttggagctttcttgcgtttcttctttaagaatataatttcaccttcttgtaaggggtcgtttttatggcgttcgttatattttgcaatttttcgatatgatatgccaacttctttgcctatgagcttaaaagtatctccctgacgagctcgtagatagtaattatcattgaacattgctatgggatgcaaaggctgggaattattgacattggttcggatactggcctcatctgccataaaattatcataaccctttgcttgatcatacacgtatagcttgtaaagctcaatcagctcaattaatttgtatgcatattgaggattagtggcgtatccacaggccttcaaaccatgcgcccatcctttgtaatccgtttgttttaagctaaagagacttcggtagcgaggactgttaaccaaaaatttactgtgatcttcaaaactatgcaaggggttgtcgtatgccctgaagcattcgccaaattcatcgtcatcttcatttatcgtgttaccaagccagtcgtgacatttaatgccaaaatgattatttcccaatcgagccaagcgacttcttcctgctccactttcaaagacagcttgtgctaaagtgatgctggcaggaattttatacttcaacatctctttgatagccaaatctttatactgattgatatagagctggtaagcttggttccacttcatttgcgcccatgaatgaacggacacaacaaatagaagtgtgagcattataattttcttcatgtcactactcattgccacaaagttacataaaatcataaaaaagcacaataaaaaggaatgtgtttaataattattagtatttttgccaatatgagtgacaaacaaacattgctgatagctcttggcacaaacgtcaaccagaagcagaacattcagaaagccatggaattattacgtaagacatggcatgatatactgtttaccaaatcgaaatggacaaaacccataggtatggatactgatttgttctacaattgtttagcctatacgaaagtagatgaagatttatcacaagtacaacaaatattgaagaatatagaaaaagcttgtggaaatacagagacagatcgtgctcatcaaaagatacagatggatattgacatcctaatgtttggtacacgtaagctccatgaacaagattggcaaagaagttacattcaggaattgattcaagaaattgattattaaagacttattatgagatattgtcagtgtttttatctttttattctttctgttattggaacagtaatccctcgtaatgcttgtggacaaaactttgcgacttacttttgtgacagtacattaagaattgactacattttttcaggtaatgcggttcatcaacaaatcgctgtcgatcaacttcattccttcccccattggtatggcaaaagacagcggctatcacaagttcccatggaaggaaatggtcagatcatcgttcgtgatcatcaatcgaaaacggtcatctatcgcaactctttttctacgctttttcaagaatggctcacttacgaagaagcaaaatcttcgatgaaatcgttcgaaaatgtatttttaatacctctgcccaaagatactgttgatattacaatacgactgaacaacaatcgccgtaacccttttgtagagctgacgcataccgtcgcaccgtcagacatcttgataaggcacattggagagaaacatatcacaccgtatcaaacgattcaaaaagccaaagatacaactcgatgtattcatatcgcctaccttgctgagggttataaaagcgatgaaatggacgtttttttacgtgatgcgcaaaaagcaacggatgcatttttttctcatgaaccctatcgttcgatgaaagataaatttaacatcattgctgttaaagcaccctctgaagagagtggaaccagtattccttcacgtggaatttggaaaaatacagcactccaatctcattttgacacgttttatagtgcaagatacctcactaccctacggctaaaaacggttcacgactggttggcaggcactccttatgaacacattattatattagtaaacacaccagaatatggtggagggggaattttgaactcatataatttagcgatgacacaccatccttctttcaaacccgttgttgttcatgagtttgggcatagctttgctggacttgccgatgaatatgcttacgattttgaaagcattgatatgtatcctacggatgtagaaccttgggagccaaatatcacaacgaaggtaaactttgatgaaaaatggaaagacctcataggtaaaaattcagcaataggactattcgaaggggcaggttacgctctcaaaggtgtctatagacccgcattacattgtagaatgcgcgataatgagacgccagatttttgcccagtatgtcaacgagccattcaacgtgtcattgatttttatacgcaataaaagatgtaaatcgcccatgaagcaaaagttcttcatcctcttatggctcatcgtgtttggggctacttgtcttcaaatgagaggaattgttccgtctccaagtccaactgttgacgacacagaacgtttgaaaatggcattggcttattttcaaagcgaaaaatatcaagaagcgctcaatctctttcatcaacttgataaagaatatcaactgaatccgaggtatcgagcatatattggtttgtgccattatcaactatggaactatgcagaagcgtgcaactatcttgactccgtaagctcagcactccaagtattggctcctgctgagcaggctgtttattattatgccaatgctgaaagccatttcctgctgaaagagtatcaagaatccatcacatattttgagatgtttctcaatgtatgtcatgccaacgaaaaagctgatgcgtattataggttgggcttttgttacctttatcagcatcattggctaactgcatacgagtatttctcaagtgccctctcctattatcgacaatttggagtgacgcaacaaaaaagacaacgactggtacaactacccaaaatgctaagaggatgtagaaagcatttggaaattgtcaccgaaacagttcaactaagcgatagctctcatatcatcattcaacgtattttataaattggcacgaattttgttcatcaataacaatataacaagaaaagaaaggtaaaagatatatgacaagtcagttttcaccaaaagtatctgaagtgctggcttttagcagagaggaagccacacgacttgccagtcggtctgttggacctgaacacctgttattaggaatgttgagagaaaaaaacagccctgttcaagacgtatttgcacggttgaaaattcatctacctacggttaaggcagaacttgaaaacagattacgagaggaagaagtgcaccaacccctcaatacatcagagttggtcctcaatgaaaaagcaagcaacattctgaaattagctgttttagaagcaagaatacaacactcagaaactgtagatgtacaccatttgctactggcaattctgcatgaccaggtagataatggtgctaaacaggttttagaattaaacaatatgaattacgaagatacatttacttaccttcaacggatggcaaagcccaccaagagtggactggatttacctgatgaagaggaagatacatcatttagcaaccatggagattcaaccaatatgggagcgagttctggggcaaaaacgacgctccaaaataaacgaggaaacggtaagacgcctattcttgataatttttctacagaccttacagccgcagcactatcttctaaactcgaccctgtcattggtagagagaaagagattcttcgtgtggtcgaaatcttagggcgacgcaagaaaaacaatccgatacttatcggagaacctggtgttggtaagagtgcaattgtggaagggttggcacaactcatagccatgcgcaaaacttcacccgtgctgttcaacaaaagattggtcagccttgacatgactgcgattgtggcaggcactaaatatagaggacagtttgaagagagagtgcgtgcactattgaaggagctggaacaaaaccctgatatcatcatttttatagatgagatacatacgttgattggtgcaggcagtacacccggtagcatggacgctgcaaatatcatgaaaccagcgttggcacgaggtactatccaatgtattggagcaacgacattagatgaatatagaaactctattgaaaaagatggagcattagagcggcgcttccaaaaggtactggtagagccgacagaccaaaaggaaacattgcagattctccataacatcaaagatagatatgaagatcatcatcatgttcagtattccgatgatgccctcttggcttgtgtcaaattgacagaaagatatgtaaccgatcgattctttcctgacaaggctattgatgccatggacgaagttggttcgaaagtacaccttcaacatgcagaggttcccgcctatatcacagaaaaggaaaaagagctaagcaccgtaacgactaaaaagcaagaggcggtaggcaaccaaaactttgaattggcagccagttatcgagataagcagacggaacttgagatagaattagaagacctcaacaacaaatggttgaacgagaaatcggaagaacgcacacgtatcacagaaaaagacgttgctgatgttgtatctatgatgacaggagttcccgttcaaaagatggctgaagcagagggcattcgactcaaaggaatggcagatgagttgaaacatcaggtaatagcgcaagatatggctattgaaaagatggtgaaggcgatacaacgaaaccgtatcggactcaaagatcctaaccatcccattggagcttttatgttcttgggacctactggagtgggtaaaacgtacttggctaaaaaattagcagagttcatgtttggctccacagatgccctgattagaattgacatgagcgaatttactgaaagtttcaatgtttcaaggcttgttggtgcacctcctggttacgtaggatatgaagaaggaggacagttgactgaaaaagtaaggcgacatccctactctattatcctgttggacgagattgaaaaagcacacgggaacgtgttcaacatgttgctgcaagtcttggacgagggaagattgacagatgggaatggcagactcgtagactttagaaatactgtcatcattatgacatctaatgctggaactcggcagctaaaagactttggacgtggtgtcggatttaatgctggaggaagtttggggttaagtcagaatgaaaaagacaaggagtatgctcgtgccatcatacaaaaaagcctaagcaagcagtttgcacccgagtttttgaatcggttagacgagattatcaccttcgaccaacttgatttagatgctatcaagaagattatcaacatagagttgactggtcttttcaaacgtatggaggatttgggctatcggattaaaattaccgagaaagccaaagagtttgttgctacgaagggttacgatgtgcaatatggagcacgacctttgaagagagccatccaaacatatatagaagataaaatagcagaactgatattgtctggagaactccatttgggtgatactatttcaatcgaaaagagtaccgttaaagaggaactggttttcaagtaaagggacactcaagcgagaacaggtgggcagctcacagctgccaccaatctcaattgttccctgcttaaagaagttcagcttcccaaatatgtcatcttgaccatagacaatacatacaccgacatcacataagttctattgcggctctttcattaaagaaagagccgtttcttttacactttaccattcttggcaaaaacttggagtggcttttgtcctgttattttaccaaaaaacgaccattgaaaattttcaaaatagaaaaatttaataggctggcgaccgacaaaaatactttgattttaacaaaagtgacaccttttcaagttagaatattgatttaacacccttggaggcactctttagagctgttattcacatgcttcaagagcattaaagcatgcaaatagttagcttagaacaatgctttagcggacaaaaaaggcaaaaaatcgacatatagtgaaataacatatgcgtaatttattcaacatcaacgaattatgaaactttctcatttttagcgtatttgcgaccaacattgccgttggttgtttttacgcgagttttgagaggcgctttgtaaagaaaattcagcatttattacgattccatgaagccgtaagcttccgccaatgatagtctcaaaatccacagggtgaaagattttttgagggcacgataccatgactgtaaaacagaagtttgatatatctactgcatttttttattctttactttatagttcaaagaaaatttgtatctttgtgaaaacgaaaaatcaatgaaatatttattattcttaatcatattattcacaggctaccctacctacacaatagctgacaatagccatgtgcgagcaggagttcgccctgttcaaaaagaagaggctttatctcaaaagcacctcttcgagacaatgctttctggaacagcgaaagtgttattcgtagatagtatggtggtggacaaaaacaactttttctctaaaatacctttgagtagtgacgcaggtacactcgagtttattgataagcggtttacttatacaaacgaactaaaaaaccaccgcatctatgccgatggggattctattcacggcttccatttattttctactgactatttaggcgacagttggagtcaacctaaacaattaaaagaattggatgaggaagtaaaagatgcgcaatttccttttttgttatcagatggagttaccctctttttttcagcaaaaggcgacaagagtattggaggttatgacatcttcatgactctctttaacgaggaaagtggaacttattataaaccagagaactatggacttccgtttaattctacggcaaacgattatttgttggctattgatgatgtacacagcttaggttggttggtgtcggatagatttcaacccaaagggaaagtttgtatctataccttcgttcctaccatgccacggcagaattttactgctgataatattgctgacaagcaacttgaagcttatgcaaagctaacaagtattcaagaaacatggaagtttggcaatcgtgaggcagcattgcagcggcttaaattgctaacgaacgaaaggcaacgaagcacagaaaagcaagaattttacttccctatcaatgaccatacggtgtatcaaagcatcaatgattttagaagtgaaaaaacaaaaaaactgtatcaacagttgttagaattaaaaaaacaactatcagcaaatgaagaaactttatcgcagttgcgtttacaatatcagtcatctaacatgtcggggaaattgcagatgcgcccaaatctattaaaagcagaaaaagcgatacagtcacaacgcattgaaataatgaatttttccaaacaacttcgaaacgaagaaaaccgattactcactcaataaaagcttaaacaaaatggagaaaaaatattttgcagaatcagagttaattatcaataaagatggtagtgtcttccatttacatgttaaaccagaacagttggcagacaaaattattttagtgggtgaccccggacgagtttcgctcgtcgcatcgcactttgacgaaaaagagtgtgatattcacaatcgcgaatttcataccatcactggtcactataaaaacaaacgtatcaccgtactgagcactggtatcggttgcgacaacattgatattgttgtgaatgaacttgatgccttggcaaatatagattttaagacgaggtatgagaaatcgcctctcaaatcgctaaccatggttcgtatcggaacttgtggaggacttcaggaatatacgccagaaggaacctatattgccagcgaaaagagcattgggtttgatgggcttttgaactactacgcaggaaggaatgaggtgtgtgacttggctttcgaggaagcatttgtcaagcacatgaattggagtgcacaaaaaggagcgccttatgtcattgattctgatgaggaaacattgaaccgtattgctggcaatgacatggttcgtggtgtaactatctcatgcggaggctttttcggtccacaaggtagagtgcttcgtgtgcctttggcagaccctcatcaaaatgaaaaaatcgagaattttgaatataatgggcatcgaatcacaaactttgaaatggaaagcagtgccttacatggactttcaaagttaatgggacataaggctgtaacttgttgtatggtaattgctaaccgccgagcattaaaggcaaatgtagagtataaaaattcgattgatggattgatagaaacagttcttgatagaatttagacttaattgtcagctttaatcattgcagatcgaagtttgttcttagacacaaagtgtaatggttgaaaatagtgtgtacaaaagacagcttaaccatcaaaaagaactttgtgccaaagaacgtttttaattggttttaagcccccttcagcatgttgaagtataaatgctggaatatagatattgaacgtagacaaaagaaattgagcattgaccatggtaaaagatttggataaccaacagcatttacaagcagaggacaccatttgtgccttagcaactccagcaggaggagccataggaatcattagaatatcgggcaaagatgccattcagatagctgataaggttttcgtaacatcaaaacataaaaaacttcatgatgcaaaatcgcacacaatcctctatgggcgtatcattgatagccagcaagaaacaatagacgacgttttggtgtcggtttttcgttcgcctcattcttacacaggtgaagattctgttgaaatatcatgtcatggctctcgttacatcatcaagaccattttagaaacacttatcaaagaaggctgtcgacaggcagcacctggtgaatacacacagcgtgccttctttaatggaaagttggatttaagtcaggcagaagctgttgccgacttgattgcttctaccaatcgtgctacgcatcatgcagctatgagtcagctgaaaggaaacttctccaacaagttggctacactcagaaacgaacttctgaagatgacttcactcatcgaattggaattagatttcagcgaccatgaggacttagagtttgcaaatcgagacgaattacttgcgttagcgcataaaattaaaaatcgaattaccacgttggcacattcttttgaaacaggaaatgccataaagcaaggggttcccgtagctattattggaaaaaccaatgtggggaaaagcacactattaaatcaattattagaggaagataaagccattgttagcaatattcatggcacaacgcgtgacgtgattgaagacacaaccgagattaatggcattacttttagatttattgacacagcgggtattcggaaaacaacagatgaaattgaaaacttaggcattgaacgaacttaccaaaagatagaagaagcaaaaatcgttttgtggctgatggacgaagcaccaacgaagcaggaggtggatgacttgctaaagaaaataaatgacaagagtttgatttgtattcaaaacaaaatggacatatcaccaacacctaccttatccgtttttgagaatataatcaaccaaaaaagtaatgagggaaatgcaaaaaaacggttttcattacaactgtctgcaaagctcggaacgaatatggagttattaagaagtactttatgtcaagtagcagaagtgcctgaagtaacagaaaatgatgtcattgtaaccagcacacgccattacaacgccttgttaaggtcagaagaaagcatttcacgcgtgattgaaggacttgagcttgagttatctggagacttactgagcgaggatcttcgattatgtcttgagcatttagcagaaattacgggcggccttatcacaacacacgaggtgctgaataatatctttcaacacttctgtatcggaaagtaaaatagctgaattttcctatgtataaaattatagcaagtttatatcgttataacaagaagggacctaaaaagagtattccctattttgctacgttaagcaacatcctcgtgctttttatatttatttactttctaataatagctctattagataccaagagtatatttgatatttggcatgcagactcgaaaggagaaatgtatctaataggtgcatttttagttgtacccttatattctttggcgtggtttttatttcctgaacgaaaaatgaaagaacacgaggcgttactgacgaagaaagaatatcgattgggattattcttttatgttttcttggtcatattcctgatggttcttttatttattgtcgctaaacaaaggaattgtagctaatctcttaaagtatactaacaaattctgtaggtcacacattcccaaaagagtgatttcaaggattttaagaataatcaaactaaagaatatcaatatataataaatgctgtctggtaaaacttttattaattgccaatttgctaatcaccgttctcttaagaagcatcaaaagaaactttgcattctcccagattgtacctatggtgcgtcttacactgatgtactacattaatttgtgaatgattcaaagcacagcgctacatgcgtatatactctgtctgactttcatagacaattgctaagaatcttcgttatttgctcttattcctctgcatcaaacgtatcttatttatataagcattggcataaagtctcatgccgatgtccgttgcatgtactccatctatttgactgtcattgtcattaatgattcctatttcattggctgtgagatattctaagttctttataccctgacgttttaattccataaaagccttatacaaaagactgttggctttaagggcttgttcccgtaagcctttctgagtcaaactgttggtatatccacaatgctctatcaatagtatgggtgccaaagtcttggagcgtagatagtgaacaccagctattatgcgtggataaatgttatccacacgctcgggagaatccatgttcggaatacagtcgataataaaaagacgggcgtttgtcagctctcccatgatacgaaagacttctggctctaatcttccatttcccgaaaagccaagattaaatacaggaatatcaagtttacgttgtaaaatgttactccatgacatgccagggcgagatgcagaagcaccctgcgcaattgatgttccatagacaactatgggattcgatgagttgatgggcgtgaaagtaagttggttattagctggtatgccgattcgtagagacgacaccgtgttataaagaggtaaataaagtctgaatgtggcagcactgtctttttccccaatcatgttttgataatgataagagatggtgtctgagacgctgctaccaaaattgaacgagccaaaacaggagcagaaattccactcaccttgcgcattccttcgataaaggtcaataccactggtagccattgtacccacattgtttagactctttagacatgtaaccgtatatttcacagcgatgtcagtggcatctgttgtaaagtcaatataaagtccactactgttttcagacaggttccacagttcttcgcgtacctctttcttaaaccgaatgggaaaacgatgatacgtttttcctatttcattaccccagcctcttccgcttatcggcatgtccttttgttcttgtggatgataccacacggtttgtgcatatagtgttggaaagtaatatccaatcaataacaaacaaatgagtttcttcaacattcttaaaaataatttttagggatgaatagatgtacaattcagccatgaatcgcacttctacaaaagtactattttattaccaaaggaacgatccctacaacaagaaacttatgaaatgaaagaatgttggttaagaaagaacagagtagcttttaactcacaaacagttacaaatattgatctacttgtttgcggatgataaacaacattgcaataaggtggcatcgtggtacaactcaccatcatacaaccaatctttgagttggcaggtttctttgaatctcatgcgaagaaacagtccgatggtgagcttctgtgaagagttgaccacgacatacaattggtgcaaatgaagaacctctttggcatatctcatcactttctgtatggcatcctttccataccctttctgtctaaaggcttcttgtaccacaatccccatttctgctcttctgttttgaggattaaaattcatgatgtccaccaacccaatcgtctgatgttcttcgttttcaatgattaaccttacttgtttatcggtataaatatcaccagaggacgtggcaatataatcgtgtaagacgtaacgagaatacggaacattcgtcaatccaatgttccaaagctttgtatcattttctatttgatagagcaagtctaaatcttctggctccatcgccctcaaaacaacatttgccataagcgctaagcaacgttttattttaatatttcagaaggagtaatcacgatttcgttcatgggattgaatgtacctaaatgaacatgagattgtgaaccttttgaaaatatatggaatatttgattaaatgtataagccgagatatcataaacaacacatacctctgatgcttgtggtaactcaaatgcaagatgtccttcagggtattctgctgctgtggctactataaatttggctttcaatccttttctttcagcaattttctggcatttcaacatcgactcactactgccaataaagatataaaaaggaggcgtatatcgctgtggatggaacaatcccaaacttttccttgtcttgcctatttgcatttggattaaggcaatgattgccttaaagtagatagccaactttataggtaaactaagaaacaaactcattcctccaaaatgcttttggaaaaagatgagcatcgcttcataaaagacatgaacatacttaaaagaagacttctgtgtactttctcctttgtaatgaagtattcttaaaggcaaataccaattgtgataaccgcccttcaaaagtcggtatgacaaatcaatatcttcgccatacataaaaaagtcttcatctaacaaaccgatatcttctaaagaagtacggggaacggcaaagaaagcaccactcacgatttctatttcggcaggtttgtcccaaggcaaatgtcctaaataataacgtgcaaattgtttgtgttgagggtactttgcacacagcccacacatcttgtaaaaggctgttaaaggcgtaggaatgccacgccttgattcttttgcatcgctaccttgcgtagaaatcatcctcacccctactgcaccgagcttcgattgctcgtccataaagtcaacaagttgccggatagtgtcttcacccacaatggtatcaggatttaacaacaagacatatttccccctactttgtcgaatagccaagttattggcacgtgcaaaacctaaattatgattgttgctgataaaggtaacatgcggaaatttgtcactcaaatacgctactgaaccatcttgcgaagcattgtcaacgaccaagatttccgcttcaacatcctgtaatgcccgttgcaaagagacaagacattgctcaacataatattttacattatagttgacgatgatgacagatagttctaaagtatgcattcgtattttttaatcgttttggtttacatcttttgtttcctgcatacaacgctcggttgaaggaaagataaaaaataaacaaagaaagagaatgatagccaaatacccaaatgccactttcatgaaaagataatacaagatggtattaacgagcatggggattgttagcattgcaagtcggcaacttccccaaacgaggagtgcttttagcgatgtcgctgggtgctgcaaagctgcttgtatctttttgaacttaaacaatcgtaaagaaagaggaatgcaacagatagtcactatttccatgacagacaaccaaataaattccgtctgactttgctcagtacaagcaccgggtaccaatgtttctgtttcaaacaagacaatgagtcccaaagccaatatcagcggtacaaaaaactgtgccagcaactttttttgtacacgatttaattttttcatataccctttatttgatgattttgtaaaaagacctaagcgcgcgttttgaacgaagtcttacatctatattaacgctcaaaaggaatgcgattgagtatagaacgccctaaagtaacttcatcggtatattcaagttcatcacctataggaatacctcgtgctatcaccgttagcttaacctctgaactattcagtttacgagagatataaaagttggtagtatcgccttccatggtagaattgagtgctaagatgacttctgaaatgccgccagtttccactcgctcaaccaaagattgaatttccaactggtcgggaccaatcccatccatgggcgaaattagtcctcccaacacatggtacagtcctctatattgcatggtattctcaatagccattacatcttggatgttctccacaacgcaaatcgtagatgcgtctcgacgaggatcagcgcaaatcgggcaaatatctgtatcgctgatgttatgacattggcgacagcacttcacatcgtggcgcatcgttgaaatagcctgtgcaaactgctccacttcttctacatctcgccgaagcatgttcagcactaatctcaaggctgtcttccgccctatcccagggagctttgcaaattcactaaccgctttttcgaggagtaacgaaggatattgctgctccatttacaaataaacgcctatccctaacttaaatcctatcgtggaataattgctatgatcttttaacgactggtcataatagatagcgggttctaccgttaccgtgcgactaagaaaatacgcatagcccacctcaataccaggcataacatcattgtaattatggtacgcatgcacaaatttgcagttagcacccaaatagattccgttctgaacaatgtaataacgccctcctactcctgcggaaatataatcaggtaccgtttcattaccattgtgttggtagttcacagttcccaacagcatgaggttgtcttctactaaataacctgcatgtgcctgagcaccaaagttaaacttatccaaaccgctgtaactcagattaaatccactcaatgcgccaccaatgtagactttatcttgttcaaactgtgcacttgctgtcaaggtcaagagcagtgctgcaatcattgtaatcagctttttcatctttactcaattacgttattattgttaattttttaatcgtctgtcgctttacctatcaagttgcccgttacgttttcttctgccaagtacctcatctgcttgtcaaagatgaaaacttgaagtacacacgaatcatgtaaaggcaaaccttttaggtatatgttgcaaaagtacacaatatatttgaaaactaaaaaaatataagtatctttgtgagcaatattaaatttcacgcaacaaactggatgaaacgatttttatggatactgatgtggagcttttccacattatttatatatgctcaacccaacaagatttcattacaaaactctctctcttcttctcctaaatacgaagtaagagctgtttggctcacgacgattggagggttagactggccacatacctatgctcgaacaacctatacagtagaacggcagaaacaagaattacgcacgttgttagaccaatatcagcgtgcaggtattaacaccgtactgctacaaactcgtgttcgaggaacagtgatttacccttctgcttatgagccttgggacgggtgtctctctggcataccgggaaaatctccggggtatgatgccttggcatttatcattgacgaatgtcatcagcgtggcatggaactgcatgcgtggattgtcaccatacccgttggaaaatggagaggtttaggctgtaaatctttacaaagaaaatatcctaaaatgataaaaaaggataaagacgagggctatatgaatcctgaaagttcacagactgccacttacttggcaaatctttgtgaagaaatcatccgtaattacgatatagacggcatccatctggattatatcagatatcccgaaacgtggcgaatccaaatcaatagagccaccgctcgccagcatatcacgaatatcgtacaagccattcacgaccgagtaaaacgattgaagccatgggtaaaaatgagttgttcgccgattggcaaatacaatgacttgcccagatattggagtcatggctggaatgcctattctaaagtgtgtcaagatgcgcaagcgtggctaaaggaaggactgatggaccagctctatcccatgatgtattttaagggcgaccagttttatccctttgcactcaactggaaagaagagagtcacgggcggatgattgtgccaggattaggcatttatttcatgtctcctaccgaacgcaactggcccttacaagtcattagtcaagaaatgcaagtgataaggcagtatggcatggggcatgcttacttccggggtaagtttttaaccgataacgtaaaaggaatatacgattttgcatccaacgatttttgtcgctatcctgccctcattcctgcaatgacgtggcaacatgccacccctccaacgcctcctacacaactgaagtgggacgaaaagacagcaaccctatcgtgggcaggtgccaaagatcgaagcaatgcgccttatcttgtctataacatttatgccagccgacaggttcctgtggatatccacgatgcccgtaacctgattgctactcgtgtacaaagcactaccctgcaactgcccaaggcgacagcactggcttatgcggtcacggctatggatagatacggcaacgaaagtgatgccatacaatcgcacaaaggcaacgatgcaagcgtaagggctaccacacgattactttattgtgatggtaaacacgtggaactcccagcaaagggacagacattggatgccacttttgtactcatagaatcattgcaaggcacgatgattaccactcgtgtctaccaaggcaaatatgctgatatctctacgctccccgaagggatgtacaccctacgctcgttggatcgatacaaccacactcatcgcttgggtatatttatggtgaaaagaaattctcttaggtaattttataacaatccgtctatcatttcttgcttgctttcttatcatttttgataagacagtagagacatttttgtcctatcattttaccaaaaaacgaccattgaaaatctgcaaaatagaaaaaatcaataggcaaacgacagacaaaaatgggctgattttaccaaaaatgacgtctcttcaaactaaaacattaacttaacgccgttggaaacacgcattagaggtgttattcacatgcttcagcggcattagagcatgcaaatagtgcgcttatctcaatgggttagtcgccaaaaaagagtaagattagagctgagaggaaatagaatgagtgtaacatcataaataacaatagattatgaaactttctcatatttggcgtatttgccaccaacagtgacgttggtgatttatacgcgagttatgagaggcactttgtaaagaaaattcagcattaattatcttgttgtaggcattatccaaaatcagtttggaaaacatctgcgtaagcattattacagatatcgatattcagcacataccgccttgatgtcctgatccacttggctggtacagagataaacctgaagacaaacgtttttatgcgacttgttgcattgagtccgaacttctttacgtcaagtctttgaataatggccttataaaagttacggattataccgattatcaaatcgccaataaccgccacgccagggcgataaccaaggaacttcttattacagatgataatgtggagtcaaattgctccatgattgaaaataatcccccaaaaggagtgagtctctcagatttaatttgtatcttcgccatgtctatcgtcggattctcttggttttttgcaacactaagataagtgaaaattctgacatagcaaaatcctgagcaactttttgttgctcaggtacttaaaaagtttaatttataatagtattgcggaattaaggattgtaaaactttaagtgtatggttgactattgttattataaacaaatattcttgtggtggctattgctatttcgtattctccttcctgcattttctcaaacagatattatcggaagggttgtcaataaaaaccataaaggactatccgatatatccgtacggctgatgcttccggcagacagcagtattataggttattgtttcacggacgaaaaaggaaattacaaactttcttacaaaggagataacccatatttactaatcaatatatctgcaataaacatcaagcaacaaacgaaacgcgttgaaaataagagccaaaccgtagattttatagcagaagaagggagtgtttctcttcgggaagtggtcgtgaaatctaataaaatatggggcaataaagacactatcaattattcggttacagctttcaaagataagaaagacttggttattggcgacgtgttgaaaaaaatgccgggtattgatgtgaaagaaagtggacaaatcacttacaagggcaaacctatcaataagttttatattgaaaaccttgatatgttgcaaggtcgttatggtattgcgacaaacaatctttctgccaatgacatagcaactgtgcaggtatttgaaaatcaccagcccataaaagctttggaaaaatcacagttctctaatgaagcggctatcaacctgaaaatcaaggaaggcaagaaaggtgtttttagcataatggccatgttgggattgggcgtcgataaacacttgctttggcaggaagaactcactgggatgtatttcaccaaaggacgccagcacctgttcacttataaaaccaacaataatggtacagatgtaaaccaagaactgcgctcgtttactgccaataatcccatcggagaattgcaaatgaccggtgtgcaacaaccgtcgccaccatccatacgttttgaacgatacaacttcaatacttcacatgctattacgtcaaacaatctgttcaagttgaaaaatgatgcggaaataagcactaatcttatttattacaacaataaagataaacggcacagtttcgcccgaacatcatacgtgttgccaggcgaagacacgagaatcatcgaagaagatatttcgacccgaaacagaaccaataacattgaagcagaatttcgatacaacttgaacaaggatcgcaactatttcaacaattatctcaatgtatcgggaagctggaatgacgattcgggtgaagtcaatacaagacagttgattggacaacgactgaacagcaagagttttttcgccaataatgttacacattggatcaagcggaaggaaaatgaaagaggcatagagctgatatctcgaaatgcttttcgcacacaaccgcatcacttgcgcattaccccggggttgtatcctgacctcataaacgcaggcaatgaatacaaagctctttcacaaagcgtgcgctacaacgctttcgcatcagacagcagattctcatttctttcggcagttgtgttcggtaatgtacggttcagtccgacggcaaatgtcaaaatagaacatcaaagactgcattccgtcatggaaataacggctaatgataacgccactcatgctgttttgaatgacgacatgcgaaatgatatcaattggacacgcgtcaataccggcatttcacttgatgtggcatacaacggagataatttgaaaatcagtttctctatgcctgttacctaccaatatactgttatgaatgccccacaaacaaaacgtaaaatgcagaacatcggtaaattctattttcaaccatcgctgatgactcggtatcgtttcaccaatcagctggaagccaacggtgctgcgggatattataccctaacaccgggaatgatgactctttatcctggctatatcctgcaaaactatcgcactatcaacagatataatgcacggctgtttgataccagcagtttgatagcttcgctcggcttatcctataaagacgtcttaaatatgttcttcgcaagtggagacatttcattcagtcacgatcatagcgagggtatgtatgctcagactttcgatggacaattatccgtaactcaggtggctatgcaacccaatgatggtaattccttttcggtaagcggacgaatgagcaaaggatttaattggaaagctttggttctttcggcagaggcttcgtggggaagagctgtaattgaccaactgcgtcaaaataaattggtgaattacaagagtcaatggataaatgcaagcacatcggtaaacttaaagccattccgctggtttctcacagaatataaaatatcgtggggacgtaatagagggaagattagttcgggagaaaatttcaaaccgatacagtcgatcaagcagcgagctgttgtcgatatttcgctcccgttcaacatcaatcttaatggttcattggaacattattataacaatgccatccaaggcgacaaaagttttacgcttgcagacttggggttgacatttgtgagcaaaggtattcgatattcgctcgactggacaaatatcttcaacacgaagaaatatgtttcggcttcttacggctcattaaattcttattattccgaatatgacattcgaccaaggtctgtgatgctaaaagttagatttaaactgttataaacaaaatctatatatagattatgaacgtaatcagaaatgacattcactttttgtgtaaaaacaatttgagccatttagcccttgctaattgcttatggtttgtcgttccattagcaggaactatgacatgacgaaaacgcttgggaacgatacaattaattcataaaagtaataacaataaaaagtaacaactatatgaaactcaaaaaaatcaaactgaataaattggctgaaaatagtttggctaatcgtgaaatgaaagaattgaaaggtggtaattgctgtctttgtgcttatcgttatgctgatcatggtggttcatccacagccgccaatagggatgcaaactatgatcacaattacacgagcgtaggctacccacatccctgtaaataactcttaacacctatcagtctaagcttataattgacttagactgataggatttaaatttcacttaaaataacgacaacattaatgatgaataaaattgcgattgccatattggtcttgttctctttgactacaaatgcacaagttctgaagacggataacgttgatgaatggggaggaggggcatcttttcaattaaccaataaatttgaagtaaaagatactgctaatgtgaaagttatttatcagttgaaagccaaggacaggcatggcaaagaatatttcgatgatatacagattctgttaatcgggaagaatttgtccaaaacatacagcaattatacttatctagccgactctactgcaacagcttggatcagaaaaggttcacaagaaattccctctgggagtggaaaaaagacaatgccaatagaggtcttcaaggactataaattaaaaaaaatcaccataaattgtcggaatatgatgaaggaagtatatcagtatatagagccttatcctattaatttcaattggcagcttgacatagaaaaaaagaaaatattgggctatacgtgtcaaaaagccaaatgctcattccgaggacgcaactatgttgcgtggtttacatctgaaattccaataagcgagggtccctataagtttagcggattgcctggccttatccttcagatacatgatgaaacaagtcaatatgattttacttgtattggtatagagaatacgctgggaaaagagacgattaagttatggaaatggaattacaaaagtataagtagagagaaatatctgaaatttgagaaaagtatctatcatgatcctattttttatttaaatcaagcaggagttaaagtatttaacgcagccaataaagaaataaagaatgcttccatctcttataatcccatagagatagaataaatacaagtaaaaggacttaactgtaattatttatgaaagaatacttaaagcctgatgacataaggaaatgtttagcaaatactcctcaagtaacttttgaagtgacggatgcgtgcaatctgagatgtgagtattgcggttatggaaattttttttccgattatgaagaaagaaaaagtcaaatgttatctaccccaaaggtaattaaattcattgactttttgattgatttgtggaattctacttttaatacttcctcaaatccgcaactaagcccttgaacgtccttattgcgtttacacgtcctctcattactgaatttgcagataatttgaacttgaagcacccacttctgcctacaatatccgcttaccccacaatgtgacttgaggcaatacacaatatcattcccataagttgtaggcattatccaaaatcagtctggaaaacatctgcataagcattattacaggtatagatattcagcacataccgccttgatgtcctgatccacttggttggtacagagataaacctgaagataaacgcttttatgcgacttgttgcattgagtccgaacttctttacgtcaagtctttgaataatgaccttgtaaaagttacggattataccgactatcaaatcgccaataaccgccacgccagggcgataaccaaggaacttcttgttacagatgataatgtggagtcaaatagctccatgattgaaaataatcccccaaaaggagtgagtctctcagatttaatttgtatcttcgccatgcctatcgtcggattttcttgtttttttttgcaacactaagataagtgaaaattctgacatggcaaaatcctgagcaactttttgttgctcaggtacttaaaaagtttaatttataatagtattgcggaattaaggtttaaataaaaattcaagataaatatgaaatatttacgcctatttgtagtatatttagttattgcatttccaacgtcggctttttcacactcgcaacgaatattagaggagaagcagttcttagaatatctatataaaggtagatattgggagatgactcagttctatagtaaatcaaacattgattgccctactctaaaattgctgaattctgtatatactgcgattggcgataatagaaatgatttagccatacagttgctagatgaaaatatgaagactcactggaaagaatatgacagaaatactcagatattttctggtctcatggtgaatctatgtttaacagaaggacgttatgatgatgctttagctcaatacaactggcttaaggatgtctattcaccattacaacagcagtattataaaaaccaaaaaattactgctgatgtcaataagatgattgatgaggaggctaaagtcatgaaaatagctcgtaaaagaccacagatgcgcatcgtatgtaaaggtgagccaaacccgattaagtttacacttgaaccgcatattaaaacaaagttgaaggttaatgaaactacggaaacctttctgtgggatacaggatcacctgtagcaatatccttaccgcatcgatatgctgatgagctagatcttgattatagaagcgatagtatcgtttctggtaatgaaaaaatcgcaatagcttatattgattctttaatgattgggaattataccctctaccatgttcccacgtgtatcgtagatatgaaaagtccaattccagccctatataagcaacatgcatcaaaaaagaagctcttggaggcaatgaatgtatataatgaaatgaactgtccaataatcggcttgcctattattaaactttttgaaaagtttggaattgactggaaatacgaatgctttttctttcctaaagagcaattgcctactccccactttgaagaacgtatttttatgactaattattcacggccatatttattaacaccaatcactattaattcaatgtcaatgatgggatcagtagatacaggatcctctttttacatggggcttaatcgacaatatcagaaagataatagcaagttgtttcccattgggtatgataaaagtaatgacatatattccgttacaatggtaggcttacaagatacgcttggcgtatttttgttaaatccttctttaacatatgggtatacagcaatgaaaccaacatatttgattaaactacgggattctgtaatgacgaatgaaccgtgggatgtactattaggttacccattctttaagtctttgggtgaagcgatggtgattgactttaaagaaatgaaagtaaagatatgggagaaaagtgataatccacgattatactaatgaattattaattatttgagtgaataaattctaaaggaaacgttaatgaaaatttataagagtatgaagaactttaggttattggtattagttatgtctacagtctgtgcactatccacatattctcaggattataaatctaagtttgggctttatggcaatcttctcagctcgggtagatatttggaaatgagcaaggtgtataccgataaggattctattgagccattcttaaaactcaataacaagatagtagcagctattgcaaacaatcaaaatcgctatgccataagcttaatcaatgataacctaaggtataattggcaagcatacggatttgatgcactatatttagccgatgtatattttacgctttgtaaagcagagggtctctacgatcaagaagaagctcttctggagtggctgaagcaagattattatccttctcagatgatttactataatgacaagaaatatactgctgctacagagaaattaatttctgatgaagaaaatagtttgaaggcaaaagtattaatttcaccagtacatgctattcgtaaggatgagagtcaagccgttaaattttcggttaatccaattatcagaacaaaaatcaaactcaatggtgagactttagacgctatttggacaactgaattaagatatccacttcaaataactcctcaggttgcagaccaattgggcatagtatgtgggaaagatagtgttgcaggatgcccagttgtgtatttggattctatcaatatcggcaatcttcaattcacccatgttccagcattagtttctgttatggtagatcctacagcttatattaaggagcataagctgtcaaggaaatatgcgaaagaactaaaagcgttttatacaaggataaatgttccacagataggactcccaattattaggctgttggagaaaattgccattgattggaaacatcaaataattaactttcctacagatacgcttccaaaggcagactttgaagaatccatgtactttgcctacccagattttcctgcactctacctgcctgtttcaataaacaatgaattcgcggttggtcagataaatttaggtaatagtgattatatcgttgtgcgtgataatttctataagaagtgtaattttccttctattaaaggcaagaatataactgttttaaagaataataggttgttttcggttccgctcattacgttgaaatcgccttctgtattatttggagggcatacagtggattcaaagaaaaaactatctgtaagatcagttaatgatagaagctctgatgtggaaatcggtttgtctttctttaagtctttggggcaaacagtcgtgtttgattttaagcaaatgaaggtgcaggtatggaagaaaggtattccttctaaatagaaacacttaaacatagtcaaaaaatgaatttaacctcaaatccgcaactaagaccttgaacgtccttattgcgtttacacgtcctctcattactgaatttgcagataatttgaacttgaagcactcacttctgcctacaatgtccccttaccccacaatgtgacgtgaggtaatacacaatatcattcccataagttggtcagcattaattatcttgttatgcaacgtagttccaattttacaaacgctgtttagtggatgttttttcgatgtaaaaatgttgttcttcaatgaaagagctgtgcatttagcgcaaacaaacgttaaagctttggcttttatgcgtgatttctgtacctttgtaatctaaatatcattttattttatgcatcccatttttatagcaggcccttgcgtcatcgaatcgtgggaactgctggaaacagtggcttcgagactggttgaaatcaatcagcgcttgggtacagagattatcttcaaagcgtcgttcgacaaggcaaatcgaacgtctatacactcatttcggggtcccggtctcgaaaaaggactgcaaattctggaacaggtaaagaaaaagtaccacctgcgcatcactaccgacattcacgagagctatcaggcagaagccgcaggacaggtgtgcgacatcttgcaaatccctgccttcctctgtcgacaaaccgacctgttggttgcagccgccaaaacgggcaaggtggtgaacatcaagaaagcccagtttttgagcggaaaggacatgaaatatcccgttgagaaagtacgtgagagcggtgccaacgaagtgtggctcaccgaacgtggtaactgttttggatataacaacttaattgttgattttagaaatattcccgacatgctcgaactggtagacacggtcatcatggattgtacccacagtgtgcaaagaccaagtgcgggtaacggaaagacgattggcgacaggcactttgtaccctctatggcaaaagcagccaaagcttttggggcgacaggttatttcttcgagacacatcccacgcccgaccaaggtcttagcgacgctgccaacatgatagcgctcgaccaacttgagttgattatacaagacttgttgaaagcataaaccattctgacaccaagaggaaacgatattaggatatggacgagaatacgaacaacttactgaaacagacgaaagattttgctgcgcaatgtatcaaggatgaagcccaagcattgttagaactcatcccacagttagatgaacactttgaaaaggcagtcgaactgatgttcaactgcaaaggaaaaatcattgtaacgggggtaggaaaaagtggtcatattggtgcaaagatagccgcaacactgtcctcgactggtactccagcgttctttatcaatccgctggatgtctatcacggtgatttgggagtgatgacacccgatgatgtggtgttggctttgagcaatagcggacagacagacgagttgttgcgctttctgcccatggtgctacacatgaatgtacccgtggtatctatcagcagaaacgcccactccctactggctaaatattccacaacccatattctttgctcggtgaagaaagaggcttgtccgctgaacttggcaccaaccagtagtactacagcagcacttgccatgggtgacgcattggcaattgccttaatgaaggtaagaaaattcaagccaaaggattttgcgcagtttcatccaggaggtgaattaggtaaacgattgctcaccacagctgcagatgtgatgcgttcggacaatcttcctatcattcccaaggagatgcatcttggtgatgctattattcatgtaagcaaaggcaaattgggattgggcgtgtcgttagagaacgaacaagtagtaggcttgattacagatggcgacatcaggcgagccatggagaaatggcaagcgcagtttttcgacaaaacggtgagcgatatcatgacaacaaatccgaaaaccgtagctcccagtacaaaaataacggaaatacaacgaatcatgcatcagtataagatacatacagtgttggtggtggacgaagcaaaccatttattaggaatagtcgaccactattcgtgcatgatttagtaagacaaggtaagaaaatttgaggacagttttatttattctaagtatagctttttgtgtcaccacaagagcacaatcatccgattccatcattgctcaagcgttgtgcaaggaaggcgttacattcacacacgataacaaggtaacccttttgaccaatggacaggaaaagtttgatgacttgttcaaagccattgagcaagccaaaagtagtgtacacctcgaatactttaactttagaaacgactcgatagcaagccttttatttcagcttcttgagcaaaaagcaagtgaaggaattgaggtgagggcgctttttgatgcttttgggaatgcctcaaataaccgtcccttaaagaagcgacacatcgactccatacgtgcaaagggcatcgagatttataaattcgatcctattaccttcccttgggtgaatcatgcactaagcagagatcaccgaaaaattgtggtgattgacggtgaagtgggttacacagggggaatgaacgtggctgattattatataaaaggtacgaaacaagttggaaaatggaacgatatgcactgtcgcatcgaaggacttgcggtaaacactttgcaaagtatttttctaaaaatgtggaacaaaacggcaaaacaaaacgtacatggttccaaatattacagaggacacagaagtagagattacatagagggcttaaaccccgacacttgtgactctgctgggcataaaacggttgggatgatcaatcgtgaacccagaataagtaacaaaatcattagggatttttacgttgaggcaatcaatgcagctcgtgacagtttgaagattatcaacccctacttcacgctcaatcgtggcatcaaaaaagcactgaaaaatgcgattcatcgtggtgtgaaagtagaaatcatgctttctaccagtagcgacatccccttgacccccgattgcggattttataatgcacatcaactcatgaagcaaggggcaagggtgtggatgtttaccgatgggtttcaccatacaaaggtgatgatggtggatggaaaattttgtaccgtaggcagtgccaaccttaatgcgagaagtttaagatatgactatgagaacaatgccgtcattcttgatcagtgtacaacaaaacaattagatcatctttttgaccgagacaagaaatacagttttctgttgacgccaaagagttgggatgagtttaggagtccatggcagaaatttcggggttggtttgcacatttgttagctcctttcttgtagccacaaacttatcggaaatgcacaaaaataggtttgcaagcaaatctgtacagacgctgaactattatatattgttgatgtctacatacccatgcgttacggcgtaaatggttaaagcagagacactcttcacccctaatttctccatgatattttttcggtgggtaataaccgttgtcattccgatgtttaatcgatcggctatttccttattgatatagccttgcacgattaaggacaacacttctatttcacggtcagacagtacttttttctttagcactttgggtaaaggcggaaggtgttgccccgtaccatgcgcatgctgttcgagcatgaggacagagcgaacaagttcgtcctctggaacattcacacaaatgctatgaaaccctgttagttgggtcattggatcattagacgtggtgaggacaatggtctttctacgccggtcaagaaagaagccccgattttctaaaacaatgctcaccgatacaaaatagtgaaagaaagaatctggaaagttttgactcaattcatcaaaggaattgaaagtcgatacttccataattggaaatacatcctgcaatatttgctgtaatcccaaaattgcaagcgtattggaatcgataattgcaatttgaggacgcccgttttttatcatttgtttctccatagcaacgacaaagttaccatttctttttgggttcgcgatagaattttattaacaattagtattgcgaggcataaaaatgacactatcattggcatacctcgagagcaactcaatgccaattagtgatgctctgggacgatagcaaaatatttaacatcagtactcgtgagattttccatatagtgctggtgtcccattggacagtaatgtacctgacctgcatgcacagtttcaatctcttgatcgtaatgaaaggtcaatgttccttccaagacataaataatttcacagttttgttcgtgtgtatgtagtcccgaacttgcgcctggcttaagtgtagagagcattattttgcacttatcgtctgcaaaacttttcgttcttaattctcctactccacccttaaagccctgaatgacctgttctttaatctgttcgaaatcgataaccatagtctatttttttgatttttattgcttatacaaaagtatataaaatatagaaaaatacaaaatcaatggatgaaaaactcgggattgtgggtaaagaataaaataggtgcacccttttgagaatgcacctatataagtttgtaacagaatgaagtctgcgattatttggctgattcgtgtttgtagtaaacgccattagccaattgtgccgtacctttgaaggtagactttgtagcgatgaccgtaagtttgtcgcctaccttgagtccaagtttaccaacagcacccttacgagcatcgtcagtagcaccataacctgggtagcatccatatagatagatttcgctatctccatctttcaacgtcatgttgccgtaatcagcattctttatttctttaattgtacctgtcaccaaataatgaacttctttgctatccgactttttcagcacatctgcaatggtgataggcgtaacgtgtttaacattttccaaagcacctttgaccatttgttgggttcctttgtattcgccacgcttacccacaacggtgatgatatcgccttctttaacatccttgcccttgaatccatgcagtccataaacatagacttcgccagaaaaatctttcagataaacgttgccatactctgcattttttatcttagtgacaatgccagttagtctatattgggtttcacccacaggtgcagcaaggaagttggctacagatgcctttacgatagctcccaactgcacaatagtagccgaagaggtataatctttctttccgtctgtggtatggaagataatcttgcaatggcggtctccacctgtattggcaggtgccatgaacttaacaacggcgttagtacctctcgactgaatggaagagatagcgagccaagacttagccgattcgggtatttctaccgatacaccttgtcccttacaagtaagataaactgtcgtttcgcctccaccaacggctattgtgtcgttaaagacggaatcgacttttatcaaagacttaacgatattgagtacatcaacatctgctaactctatggttgaaccataaatcttttttggtccttctaccgtgacttcatcacccacttcaattccaagacttgcaaagttctttttattacccttttcatctttcgtgccataaatcaaaatctctcccgtcttgtctttaagaatccagttaccatagagcgtattgctgatagaagatacaatacctttcacgcgataggtcttgccagcaggaccagccagcacattagcgacggttacgacttctttctttgacaagccctgaatgacattgacgtattgagtctcgccagcacaatggataagtacttgtgcagagcgtccatccaaagtcttatcggctttgaaagtgagtaactcattaccctcattgtctttacccttcgtgatagaaagccatttaacagagtctgttttggtgacgactttttccatcgtccaatccgttgatgctttcacgatgatagaagattctccaccttcaacaggtatcgacacataagaggaggaaacctgaactgcatctaacagtgtgatgtctttattgtcttcacagctggtgaacccaagagctataaaggcaatgaatgtaagaaaaatatattttagtttcatgttttcaatttttcaactatatgaattaattaaatgtatatttaataccaatggaggcataccagcactgtccgagagagtaacttggtgtgaaggtttcggtattgccttgtatggacgaaggagttgagtaagtggcataaccttctttgtctacaccttcgaatttaaggatacgtgcttcagcaccaatagcaggattcaaatattttgctacaccccaactggaattgaaaagattcatgaggttcttgacgtcacaactgagttgcagtttgtgtttggtgttgccaatgttgactttgaaatcgtgcttataactaaagtcgatgcggtgaacccatggagaatacagactgtaagcctctgcatattcgccctgatgctttttgaggtagttattgttatgcacgtaatccatgaaacgagtcttatcatcttcagaaacaaatcggaaatcattgttcgctacttgttcatcggtaggaatatatagggcatcgtaattatagccgtcgttattgatatcattcaccgtcatgtaagagtagttggctccacctcgccatgcttcgtagaagaaaccatagtggttaccactcttgtcatgaatggttgcagatgccattaagcgatcgggagtaacatactgtgaattgtgcaaacgaatgtggttaggtccttcaaccgtaggtacataagtaaatgctgactcagcgttagaaccaggcatacctgttacgttcttagacaccgtgtgcgtataagctgctgtgaaatccaaccattcggtaggttgggtattcaaagtaatgtttcctatccaaccatatccacgactggtattctcaagaacgaaggcactggtgttggtatgatatcctgtgggataaataggtcggttgtctacaccgttgaagcgtgcaaagcctcctactgaaggaatgctccaatcagagatagaagtctcgttgatggatttgttgaaaattaattcgcctgtcagagttgcaggaaatgaaattgggagctggtagtcaacagcaatggaggttttccatacctgtggcatcttaaaatcagaagcgattccagccactgccgaaggcactacgccatcttcaggcttgaccgttgtgggataacctaaagacgccaatttatcgtaaagagcggcatgtgtggctctcccctctccgtctgttaccaatccacctgcaaactgtgtcatgtcaaaacctcgcttggcagcaattcctgcattgatgtgtgcattgtattgcaccataccaccgttggtaggcatgttggtaaagaatacaagtggcagatttcctgcaaacagtcccgtaccaccacgtactttcagcgtcttattacccaaaacatcccagctgaatccaacacgtggagagaatatccagttggcattaggccacttgccagtgtcaaggtgtcgaccattaaagtctaagtcattgattgctttattggcaatcaaatctttgttatcgaagactaaattatcaatgcgcaatccgtatgtcaacttaaagttatcggtcattgaccattcgtcttgtgcatagagactgtatttgttggtacgtacacgagctgcgggagctttttcgccatcatatccgtaggtaaggttcacaatctcaggtgtacctccattcagaaagtcatctaaagaagtatagcgataatatcctgtaccattacgcatataagagttatcagccattttatattcataagccaagcctcctattatcttatgattacccaagtaataggtcaactcatctttcacgttccatacattgttatgaacagcgttgttccaagtaaacaactcgtatccaagtgacaaataagcttgtccatctttaaggatatctatgaatgggaattcacttgaattggtaccacgaacatcgtccaatttagaataagtagccaataattggtttgataagttttctgataatctactattcaaatcaaaggagaacgaatgtaccaagttatccttggaatacatcgaattagcataagccatagacgcttttgacaagcgaccttctgacatacgcgtaccaccgtccatagaagaagcattaggagaaatccagttttgattctttgtatagttataacgcaaagccaaacgatgttggtcggtaatgttccaatcaatacgtgccaacagcttataattattcttgtcggcagggaaatcggtgtaagaaccagtgtcatagccatatttgtttttgacaaagtctgacactgtctgcaaatccttcaaagatgtacgagaaataaagttgtcagggtctgcaatgcccttagcagaacctctccaacggttcactatcgtagggatgttaatagcctcggcatttacaaagaaaaacaatttattcttaagaattggacctccgagcgtaaaaccgtaggtggtcttctgatccttttcgcgagctccagatatttgttgcctttttacagcgtctcctctaaggttctcgttttcatgatatacatatgccgttccttgaaactggttatttccagatttggtaattgcgttaacaccaccaccaataaagtttgtttgtcgcacatcgtatggtgcaacaaccacttgtaactcttcgatagcctctattgaaataggatttcctccaccaggaagtgagggactcaaaccaaaattgttattgaagttggcaccgtctaccgtaaagtttgcagtacgaccgtctacacctccaaaactcataccgttgccaccatagggagacaagcgtgtgatatcagtaatacttcggctaactgtcggcaaatttgctatctgcgacttgttgatgttggtagaggcaccagtcttttcggcagcaaacttcgaagccgtagcacttacaacaacctctcctaacagtgctgcatcctcagaaagctcaacattcaggttgtaaacttcggccaattgtaacttaatgcccgtgtaagtcttagtttgataaccaacataacttactgttaccttgtatggtccgcctgtacgcataccttgaatattgaaacgaccatctacattcgtcactgctccataacgcgttccagaaggttcgtgaaccgcttgaatggtagcaccaacgagttgttcacccgttcccttaagtgtaaccttaccattcatggaagaagttgtaacctgagccatgatagaatgacaaactatcatcatcatgctcaccagaaaaagaattcttttctgcattttgtttgataaattttaatgaataatgcggtaaaatatcgtgtaatacagattacgattgcaaatttagctaaaaatatcgataaagttgttacaactttattaaaaatgtatgcaactgaacatttatcgacatttattgataggattcacattgaaagaatgttgttgcttgttttaccacttgtcttagaacttaacaattcaaagagttacacagcagcaagaatcaaatattgaagatcatacgcattccacaaatgtattcaatgaactgtattgctcttccagatagatgccatcttatttcgaataatccaactgttaatggctgtaacgcctaataatagaactacgcccaataagcaagtcggaccaagaccgccattatcaagactgggcaacagattatacaatacatccatgtacaagggacgaacgattgctaaaattcctatcgcaagtacgaacacaagtccatggagtgacaaggtcagaagctgatatggttgggcaacttgtgatggactatatcctatgagcatcaaattttgtagcttagaagtatttttttgtaccaaaagataaatgcttaacatcaaaatataaaagctcaatacggatatgattaatcctatcatcatcactatcactacaatcaggcgaaagaaataagccatcttttctgcagaagaattgctgttttctacttcatatccttttttttctaagtattgtgagaattgtgtatctgtgggatttgctacatctacgatgagtcgattaggttcattttgaggagttgatgagaatctttggttactccacaccataaaactttctggaaccaaaatggtactgagttggctggagaagcctatcacctttccttttagtgtttgttcttgtccatttccacggatatggatttgtacatcaagcatacccactaaaccttcagaaatctttggcagcgaatgatttcttgcatagccgaagttatacatcgccaaatacgattttgggaatatgataggcacgatatcgtctttcccatcatacttccactctgataaaggaacatttacaaaagcgtctggaatactttcaaaaaagaactcggagtcaaagagacgatttccttgtacatccatgcttacctctgattgataattagctgaatgaaaggaacctactttttgtataaatggttgttgagaaagatgatttatttctgatgaggaaaaattgtttgtcctaccactaaacgatgtattggtatctatacgtttactgataacgagataatcgctcttcatgaaactgtctttatcttggaagaacggcaaaacatcacggtagaattggtagccaaacaacacaataaacatcccaaaaagacttgcaaaaaagaatccaacaaattgtgggatactcatattctgcttcagcagtttccaaactaacttcataatcgtatcatcttatcgtataaagcaggcatgtgcttaccgatactggtaataatgacacctgctccttgcttgtttacttctgtcatcatgaggtcttgcattaccttcgcattcatatcgtcaagatgactaatgggttcatctgccaacaagaagtcgaaaggctgaactaaggcacgcatcattgccactcgctgctgttgtccaaaagacattttagagacttgaacattcgtcttgtctgcgatacctaatgcttcgaaccagctcattatctcgctcttcgatttatacttggtcatgttattcttaatctcaacattctcccaagccgtcaattctggaaatagtcgaagttcttgaaacatataactgatatgatgtcttcgaatatctatccaatgacgaatattgaaactgcgaatgtcttgttgatcaaacaagatacagccagcataatcgtgtctataccctattacataactgcaaaaagtactttttcctttgcctgaatgtgcttcaatcaggtaattcttacctttctctaaggtgatatgtttgttccaaacttcggattgtaagcctttcgttttttcaaaaacgtgtggcattacatggtcaaaaagaatcgattccacgagttaattgagtttatacacgagggtatgtatgtttccaaaaacaggtctgagcaaatctgtgatcatgctaagcctttcgttacgataatccctcacattgataatcatcaccatcttttcaccttttatctgatggagtattgaactcttaaatggatgattagatgcctttattgaattggatgcctcttgcggagttgctccactgtaaaattgcagattgtcagtaacaccaaagaaaaatcttgttttgccattcgtatatacaaaagcatgcttgttccaatctgttagcttcccacccgcaggaacagactgcttccagtaatctacatctgccaaccatttggagtgtgctaattgagccgccatcgagatactgatgttttgctgctcatattgaggaatcaccacactcatatctccgttgacacttcgaataatgttatccaaatcaatggcttgattgattccagtcagtagcacttgtaagcttttattattctgcaatatgggtaaaaactgcttgccatctacgttaacaaacattccaaacaatgctgtatctggcattgcttctatgtatttgccttgaataggacgataaatctttttcgattcctgtatcgtttggttgatacgtttattccacgaaaacggtgaaccttctacataccaacaccccttctctactttcatcttggcagctatcaagacatctgttgtcgttgcatccttaggggctccaagcatcaacggagcaatgattttatcgggcaaggcttgtgcttgtgccactaacgtcataggactgtccaaagagtctaaaacttggtatatcggtgacgccaagatactttcttcttcgtcttgttgcaagtatttagcaatggtggctttcgtttcttcttgcttcgtcagtggaataggccccatgattaacaacgactgcttgttatatcccaccatccacgaatcacgaattgtagaaaagaacgcatccctaaatgaaacggattcactccccatacgttggagcatagttgatattttatcagcattatccactttagcacaaataccaagatttccatcaggagatgtaaaaagataaatcttttgcgtgaagtctattccactctcatcaagatttttcatcttaagaatggttctgagaagtgttttattattgatgccactcatctgactggcatcaaaagataccaatgctgtagactccttaggaatggcttgctgatagctttcattggcacatcctgtgaataaaaacacagtgaagataaatgctacaatagaataggtgtaagagaatttcattgtagaaataagagtttatggataagtacgtctaaacatttgggtcatcgcaactgccatcagtccagcggtttcagtgcgaagtcggtttttcccaagtgagattgattcaaaccctgcttgttcggctaatttcacttcatcaacagagaagtcaccttcaggacctaccaagatagttatatcgtcatcgtctgtcatttggtggagcgtagtgagcaaatctttgcgttcaatctctgggtagcagtgtgcgatatagcgatgtccagtggtttgatgatgaataaaattcttatacgaaaccattggattaacaattggcttccaaggttttctactttgtttcattgccgctatcacaatcttttctaatcggattggacgtatctgtttgcgttcagaaaattgacaattcaagaacgtgatttcatcaaatcctacctctgtcatcttctcaaccatccattctatacgctccatcgtcttggtaggtgcaatcgctaaatgaatatgtccacgccagcttttttgttgcggtagtgtttcctgtatttcatagaagcaatgcttggttgaagcaatcgtaactattgctcgataaaaatttccaacgccatccatgagaaacatctcatctccactcgatagtcttagtacgcgtaacgcgtggagtgcttcacttgtaggaagttcgttaacgtggtcggcatcaggaacaaaaaaatatctaacttctttcattttttgtcatctgtatcaagtaaattgcgtcttttcatttcgtctctcaagtgtgatgccatttcgtaattttcttcttcaatggctttatttaatgcttttctcagcatatcatcagtcagcgtgttgagaggaatagacatccctttagaatccttcttaaaagcaacactttgtttcttcatcaaattctcatccatataaatgggcgttttactaatcaaggagagcagcaaagcatcgcttacccttatcgtataaggctcaaatgtcgaattgttcatcaacatacaccgatattgaccatctatcacatcatggataagaatttcaaagtctgcagttgtttcactccgcactacgtgccatagcacctctggcaataacaaaggtgtaatagggatattttgtattcgtaactgcaactggtacaacatctgatagtcgcaaggaatagcgatttggcgttgctcattttcatctacaagtaccaccaatcccacatccttgttacccactatttctgtcacacttttaacagttagccgtaccttattcatactttcacttcttttttaggtctaaacatgaaaccaaagcaaatgcctactaccaaagcatagcctgcaaaaatataccagcatataggccaattcgtcacgccattcaccgtatgcgaagtaacgacagcttgcgcagcaaacgaacctgccgtggcacctattccattggtcatcaacataaacaatccctgtgcacttgaacgaagagagtgtggtgtagcttggtctacatatagcgacccactaatattaaagaagtcaaatgctacaccatatataatcatagaaagcaaaaacatccacacgccactcccagggttacctaaaccgagtaaaccaaatctgagtacccaagcaaacatcgctatcaacatcacattcttgatgccataccttttcataaagaaaggaatcatcaaaatgcacagtgtctcactcacttgcgacaaagaatataagatgacaggatattttacaccaaacgaatcagcataggctggtatcgatttgaaactttctataaagggagtggcaaaaccgttggttatctgcaaacttactcctaataacatggagaagataaagaagatagccatgtgtttatccttaaacaaggagaaagcgcgcaacccaaaagcatccaccaaagaggttgcctcatgatgcttactgactggacatttgggtaaggtaaaggtatataagaaaaggagtacactcaaaaccccactcaccacaaattggttttggttgctcttaaatcccataatatctacaaaccacatggcacaaataaatccgatggtgccaaaggtacgaatgggtggaaaatctttaatcgtatccatccttgcttgtgtcagcgcagtgtatgcaaccgagttagataaagctaaggtcggcatataaaacgctacactcaatgaatacaatgtaaagagaacaccaaactctgccgcactaccttgcaaatatccataataagcagcaccaaacataaacaaccccgcaagcaaatgacacacccccaaaagtcgttgtgcgggtatccacctgtcggcaatgatacccatcaatgcaggcataaatatagacacgatgccctgcatggcgaaaaagattcctatatttgacgccattccaatattcgtcaaataaatgcccatacaggtaagatatgatccccaaacggcgaactccagaaagttcatggccgccaaacgcacttttaagttcatggttaactcttttcgttgtttaattgatgatgcaagccgatgccaaacaagctctgcttgatttaatacaaaggtacgctaattgtaacaactcacaaaataaatgagtattttttaagtctcatctcacgactcttgctcaaaataaaataaatgccagaccaagaaaaatattgggattcagaatatcaagtgagacttttttcttaaatttgcaaacgtagttgaattttgaagttgaatctactatgcagcatatctaacacacctttgttgttttatgattatttaatgagcatctatgtataaaattatagcaagtttatatcgttataacatgagaggatttaataagagtatcccctattttgctacgttaactaatatcctcgtgctttttatatttatttactttcttataataagtttgttagatgccaagagtatatttgatatttggcatgcagactcgaaaggagaacagtatctgataggtgcaattttagttgtaccgttgtattctttagcgtggtttttatttcctgaacgaaaaatgaaagaacacgagacgttactgacaaagaaagaatatcgattgggattattcttttatgttttcttggtaatattcctgatggttcttttatttattgtcgctaaggcaagggtataaagaagtatttaaagtttgtaagcatcacaccgtgcatcctttccaactatcatgtcgcgccaccctatttctctgcagcctataaaaaatcgggtaggaggtaaatgttattcataaaaggcatttacctcctactttcacatttaccgacctcccacaccaccgtacgtgccgttcggcatacggcggtttcgtacttttacacctcacggtgtgtggcaagttgttttcagctatccctttgagtaacgtcacttctatcctattgtcggattccgtcctatcgtcttggatagagagttcctttcggacatctgacgaagtggttcgcagggtagcattcattttactattgcactgcacgattcggtccttccctgtaggcacacgtaccttgggtactatgacctctgctgacttctcacggcaagctttactccgcttctttcgtaaaaacaactattagaaacgtccgtgagacctcctcggataagaacattatctttccatcttatgcctacttcatttagaccaaccattccgaatagctataggactttgatttgtttggcaatctcatccatggtcatatgccttatatgaagtttctgtacgttaggccagatgtttgccgcctgcttctttcagattccacttcgcagtggacacccttgctattggctatacaattcccgctattagggcttgttagggacttgcacccattagaataagctcatgccgagcataccaaaaaaagtctgcgtcaataactgaacgcagactttttttattatagactcatccgtatgagcattatactttctgtaagattctttacttcttagtcttagcacgctcatcacgcagaatattctgcatagagtatactatctttgggttttggttagcaaggttgttgctttcccattcgcttgcagaaatatcgaaaagctgtggcataggattgttacctgtctcgaccttcggtccccattgtatcatcttcggaccattgctcggctcgatgtatttccactgctttgtacgaacagagagtacatgattagaggcaagctcaagaacatacttgcggtttttagtttccttaccaagcaatgttgacatacagtcctcactatcgggagccgtaccttgtggcatacgtgcaccgagcatacttgcgaacgaacgaatatagtcaatctgtgaaacaagagcatttgatgtctgaccagccttaacctttgccggccatcttacaatagccggtacacatgtaccaccctcaaaagcactgtacttattgccacgccacggccctgaaggcttatgaccattcaacagttcctcagcctgatcctgatagccatcgtcaacaactggtccattgtcactggtaagaagaataatagtgttatcagcaataccaagtttgtcgagtgtctccataatctgacctaccgaccagtcgaactgtactatagcatcgccacgcactcccatactgctttttccacggaaacgctgatgtgggaaacgaggcacatgcacatcgtttgtagcgaaatacatgaagaagggattgttcttgtttgccttgatgaagtcgatagcgtgcgatgtaatagagtcggcaatattctcatccttccacaaagcctttccaccgcccttcatatagcctatgcgaccaataccattgacgatagacatgttgtgaccatgacttgacttcatgttatagcaaagttccggattctgcttgccagtaggctcaccggggaaattctgcttgtagctcacctcaataggagcactctcatcccaattggccacactgccattctcaataaacacacatggtacacggtcggctgttgcagccataatgtaatggtagtcaaaaccaatgtctgtaagtccagccggcaacggagcattccaatcctgtgtaccagccttatcgccaagaccaaggtgccacttgccaatggcgcaagtacggtagccctgactgcggaacatatcagccattgtatagtcctccggacgaattatcatgccagcattaccagctgccacatcagtgccaggacgacgccaagcatactcaccagtaagaatagagtagcgcgacggagtactcgtagcagcaatagcatgagtatcggtaaaacgtatgccctgactcgccagacggtcaacattaggagtctccacattctttgctccatagcatccaaggtcgccataaccaaggtcgtcggcaagaattattatcacattaggacggttagggtcattattaggctttactttctttgcagcatgagctatctgagtagcaaacggtgcaagaagcgataatgccaaatatgatttcttcatacttaatatttattattagatgttataaacagacaggaggctgtaccttaaagcgttaagcctcctgtcgtatttgtagtcatttttttaatcctctctcaagtttgggttgatgttctgttctgacaatggaacaggccatatgtagtcttgcggagcacggaagctgcgcttgcctacataccagcggcacttgcccgttggatctatttccttgctgctagagtacttcgctgcattaggataaggagcaccccaaatcttgcctacaagtaccttgtcagcaatctgccaacggaatatatcccaaagacgtataccctcatatgccaactcaacgcgacgctcgtggcgtacaatctcacgcagcttgtcgacattagtctccgtaatagcaggcatatgcacatcagcacgtccgcgaaccttatttatagtagcatcaagcaaagcctgatcgacggtttggttgctctcaatcatacactcaaggtagctaagcaacacctctgcatagcggatgataggagtaacggccgagtaacttgtgatgtcagctatagggtcctctgtatagtacttacgccacatgaagcctgtgcgcgaagcctccgacgagtaatcaaggcgctccttcttaccagcctcgtagtctggactcatgcgatactcagtaccgcggaacatagcaccattatagaaaatggtgtagtctagacgtggatctcgattcttacccaagttgtttggatcgtatcttgggtcatcgtagctgaatggtgtaccatcgttgaactcgtaagcctcaaacaatccagcagatggattagacaaactccaaccgccatcctttgcaggcagaccatgctgaggcaaaccacaaccaaagtaaccctcaagatagcttatgtagaatatgttctccttattgccaacacccgaactagggaggaacagattcgagtaattaggctcaatgtcgttatctccaagagttattatctccttataggtctcagcagcatcgctccacttcttgtccaacataagtgttcgtccaaggaaagccaaagcagcctgcttgcaggcgcgaccagtctccgacgagccaaggtccttaaagcgtggcaggtcaacagcagcttccttaaattctttttcacaccattctagaatgtttgcctgtgtctccttcttcacgttgtttgcctcttcgcctgttagcacagttgtaacaagaggtacatcatgaaagtagctggcaagatagtgatactgtgttgctcttaggaagcgtgcctctgcaatcatacgcttgcgctgggcaaagtcattgccactttgaataccatcaaggaaacggttgcacttgcctatgcgtgcataagccgacgaccagtatctacctacaaaggcattgttgttaagcagctgtccacttgtaatcttaaaaaatggattgttctcgccacgtcggtcgaaagcgttgtcggtaagatgctcggtaaaaagcagtccgtgatacgaccagaagtcgcttggattatattctactccatttgcaatattaccacgatagagtggtgtaagggccagtttggccttgttttcgatatcagatccactccagtagttgttgtctggcaagtcggtgagcggcgagcgctccagatcgcaagaattgaagcataaagctgatgccaatgcgatgcctatatataataatttggttttcataatttgttaaaaagctaaagttagaccgaatgtgtacgaagacataacgggatagtaagaaccgcggttgttggtgttctcaggatcccatcccttgcggtaaccattgaacgagaatgggttgtccatagagatgtatgcgcgcatgctgctgatgccagccttgctgataatgctcttgggcaacttgtagccaaactgtatgttgcgcacctttacaaacgacgcgtccagaatccagtagtcagacaacaaagtgttgttactaccagcgttagacattacctcaaggcgtggatacttaggatagcggtttgttgggttcatgttccagcattcctccatctgccacttctgtatattaccctcctggaagaaggcgaaacctgcccactcgttgagacggcccttgacaccagctacaccctgcaagagcacgctgaagtcaaatcccctatagtcgccaccaaaactcaaaccaaaagtatactttggaatagaagagccaaggtaagtcatatccttaggtgttaccttgttgtcgccgtcaaggtctacgtaacgtatgtcaccagcctttgaacccttggcaattgcactttggtcgtaccactcgccaacttcctcatctgtgaggaatacaccatcggtcttgtagccatagtacatctgcattggatagccaatgaagaggttactaccattacctaccataccattagcctgtgtaacattacccataccaagtgttattaccttgttcttgatgattgagaaattgccatttacccaataattgaatccaccaactttgtcgcggtagccagcctcaaactcaaagcccttgttctctacagcaccagtattgacctgtgatacattaagaccgaatatagaagagtagcttgccgatggcttatagagcacgtcggtagtcttgcggtaaaagtatgttgcattaagtgtaaggcgattctggaaaaatccggtctcaatacctatatcagatgtgcgtgttttctcccacttcaggttcggatctacgtatgtagtgatagacgcaccagtagtgtatacaccaccaaatacatagttctgattactaccgagtctgtaaaccgactgataaggatagttaccaatattattgttaccaagcacaccggtagaagcctttatcttgagattggtgaaccactttgctatagaagagtctttccagaacttctcctcactcacacgccaacccaaagctgcagaagggaagaaaccatacttagaatctgttgggaaacgtgaagaaccgtcatagcgcattgttgcttcaaagaggtaacgctcatcataattatatgtaagacgtccaaaaacagactgtattgcccagtcgtatccaccaccaaaattggtctgtccatcagcaccgcccgctgtaaggtaaggcacgtcattcgacggaaaattctggcgataaccgcctatagaacgttggttctcgtcctcccaagtatagcccacgagcacgtcgatagcgtgcttcttggcgatagtggtgttatagtcggcagttgcttggaatgtcttgtacacggtgcggtacatgtcgtccgagagtgacgacggaccgttatttctaccacttgctgttacaaactcgctacgatagtttctaacatgctgcaaagagtacttgtagccaccaatacctttaagtgtaaggcccttaataggcttataggtaaggtcgagattgccaccgaacttgtcgaagtcctgacgatagaacgatgcgcacttctccacccaagccactggtgtaccgctacccttaagaccattgccattagagccgtcagacatatatgaaggcagcaatcctgggtagcgcagagcagcaagcatgataccttcatatccagcagtatcgagctgtctaggagtagaaggctcatgacggtcgcttgccataccattaaagcgtatgcccatagaaaggtccttggttatcttagcgttgaggttgagacgtacgttatacttattataatagttattcttaagcaaaccgtcgtgacgaaggtatccagcagtagccatatactgtacacgctcgttgccaccgtttacattaagtgtatgctttgttaggaacgagtgaccaccgaacaacttatctagatagttctcgtctgcatagttatctggatccgaaccatccttatacttctgtatatcctcagctgtatatgtgtcagtaccgatagccatgttatagaacttggcatagtcgtaagaatgtgccatttcaggcagttcggctgccttactaaaacctacagaaccattgtaagaaaccttagtacgtccttccttaccacgcttggttgtaacgagtactacaccattggctgcacgcgaaccgtagatggcagctgaagatgcatccttaagaacagagatgttatcgatttcatccggactgagatcactcaatgatcctggcataccgtcaacgagcacaagtggacttggtgtagcaccaaaagaacctacaccacgcacacggattgtaccaccatcttgaccaggattaccacttgtctgtgtgatggttacacccgacatctggccggtgagcatgttgctgacatcacttgccgaacgagcttcgagcgatttggagtcaacagttgcgatagaaccaatgacgtttaccttcttctgtgagccataacccacaactacgagttcttcgaggctctgtgcattttccttcatcgttacattgatagttgcaccaccacgagccttaacttgctgcgaaaggaaaccaatgtaagaaatatctaatgttggattttccttactgctactcaacacaaaatttccatctatatccgtaactgtaccattctttgttccctgctcaacaacagatgcgccaatgatgggttcgccattattgtcaagcacacggcccgttattttagttttgcctacaccttggcgtactgattgttctggctgcgctccattatgtcctgctttaacaataatgatgtgacggtctacaatcttgtaggtaaggttgccattacccttcaagatttgattcatcaactcgccaagcgtttccaacttcgacttcaacgacactgtcttgttaagattgatagtgttctgtgagaaatcaaccgacatttgggtctgcttctcaatagccttgataattgacgataccgtagccttgttctgagtcagatgaatcacctgactttgtccgaatgtgctcaccgacatcgacagacagagtgcaagtgcggctgctgtcttcttgttcaataaggtcttcattgttttgttagtttatattaatatttaggtgtaactatttggtggtattttttaaatagagccgtatattacggccatctattttgtatgctatattgccagatatcattgacaatactttcagtactctgtctaccggttcttcccttttgaagttcatggtataacgcttgcccaaattgacatccggtgccactgttattgatacatcatacttacgttccaaggtcttgacaatcaccgaaagaggctgcgatgcaaaatccacatttcctcctacccacgcaccgtaagccatagcgtcaactgtattcttgcgcattgtgccattcctacgattgtaaactacctgctcattgggctttagtgtcatcgattgtttattgtcaaacacctttaccaatccttcctcaagtgtcactgtaatattatcatcttcgttgtatgagtctactgtgaaatgagttccaagcaccttaaccttcagactacccatattcaccacgaatggatgcattcggtctttagccacagcaaaatgacacttaccgttgacatacacattgcgattgtacgttctattgctaaaacgagctggatagattatcgatgtacctgcatcgagctttacacaagtattgtccgagagtatcagactgtctatctttccttctggaacataaaattgtgtcaactccgtctcctgtacatgatattctgccgaataattccaagcaacaaaagcggtgattataggcgcaatgaatagtgcagcatacttcatgatgcttagcacacgcaccttgcgacgatttgcacgattgtatgccgtgcgacgattgcggaaaacatcaagtgcatctgacatctcactttctgatatgtctgatacatcttgattccacaagcgacgcagtgcatcgtcctttggtgttgattctgtatatttggtactatttggttgcatagctgtttatggttttctactaataagagtaaaaaactggcaaccacacgtagttacttatagttaatcaatgttaacaatgcaagtaatggcaataacttgcgcaaatgggcaagtgcaacagatatatgcgtctccacagtacgcttgcttatgccaagacgctcagcaatctcagcattgcccaatccgtctacacgactcatcacaaacacacggcgacgctgctcgggcatagagtcaatctcgctcattatgaaatcgtagagttcatcgtagcacatcttcatgtcacccgtcacgtcattgccttgaatgtcacatgccgactcatcatcacaatacacaagcgactgcttcacataatgtatggcggcattacgagcagaaatgaaaaggtaattgtcgagattttctatcttcaaaaaacgttcatgcttaatccatagttccataaacaaatcctgaactatgttctcagcctcactcttctcacgacaaaagcgcattacaaactgtaacaccttgggataatactccacaaacaatgcgtcaaatgccatctcattgtcatcggcaagggctgacataaggaatgtattatttgtgaacttatccataactatattactttaataaaacttaatctacttttgtaagctttgccataaacgtagcaatcatttctgctaccttttcgagatattttctatcaacatcatcgaatattgacaattcggtgctgtcgatgtctatctcacctattactactccgtcagaaaataatggaactacaatctccgatcttgagagcgacgaacacgctatatgtccgggaaaagcttccacatcctcaactacaagactacgaccttccttccatgctgtgccacaaacaccgagtccgaactttatcctcgtacatgcaggagtgccttgaaacggaccgagtatcagttcgtcaccatctacaatataaaatccgacccagaaatattcctttgggaagactactttcatcaccgctgcacaattcgacaatacgctaataggattgtcatcagcattggcgaagacttctatctgcgagagaagttcacggtatcttgattgtttatccatagtttaatcgttttgatttagcgacaaaattaataaaataatgtaaacaagcaaaagaacactgcaaaaaaaaaggtctccaaagtcgttagaccttgaagaccctaagtaaaaaaaggcagctacctactctcccacattgcattgtagtaccatcggcgcaagcaggcttaacttctctgttcggaatgggaagaggtggaaccctgccgctataaccacctgataaaggggttgacaaatcttcacaagcaaaacatggataaaataaaatgtaacgttggtagtatatttcagggacacacacattgatgtgtaacctatataaaatatactatcgttgaactgatgttgttgacgtgtctattttcatagcactacaacacacgatacaactgaaagaatggctcacaaaagaaagtcttgggcaattagtagtgctcggctttgccatcgctggctttacacctgcaccctatcaacgtcgtcgtctacaacgacccttgtatggagttctcatcttgcggatggcttcgcacttagatgctttcagcgcttatcctaaccagacttagatacccagcggtgcgcctggcggcacaactggtaaaccagaggtctgtccatcacggtcctctcgtactagtgacggcaccacgcaaaactcctgcgcccacgatagatagagaccgaactgtctcacgacgttctgaacccagctcgcgtgccactttaatgggcgaacagcccaacccctgtctcttaaacacaact

SEQ ID NO: 117 - DNA, 232646 bp, Prevotella timonensis
  source 1..232646: mol_type = genomic DNA
ccttagcacccgcccccttactgcactactgctatacataagcattcggagttcgtcaggtcgcgataggcggtgaagccctcttgacctatcggtcgctctacctcttatgtaaatcatagcacgcggcacctaaatgcctttcggggagtacgagctatctccaagtttgattggcctttcactcctacacacacctcatccagaagcttttcaacgcttattggtgcggtcctccatctcgtgttaccgagacttcaacctggacatgtgtagatcacttggtttcgcgtctacctccaccgactaaaacgccctattcaggctcgccttcactacggttgacggatatcaatatccttaaccttgccggtgacggtaactcgtaggttcattatgcaaaaggcacgccgtcactgcataaagcagctccgaccgcttgtaggcgtatggtttcaggatctattgcactcctctcatcgaggttcttttcacctttccctcacggtactggttcactatcggtctcatgggagtatttagccttaccggatgggcccggctgattcgcgcagaatttctcgtgctccgcgttactcaggataacactatgtcttctcttacttcatataaggggctttcacccgctatggctgaacgttccagttcattctattcacaatcaaagtacaatattatgctcctactaccccacgattgcattgctacaaccgtggtttgggcttctccccgttcgctcgccactactaagggaatcatttaattattttcttctcctagaggtactaagatgtttcagttccctccgtttgccttactgattaacagtaataactatctgatgatagttgggttgtcccattcggaaatccttggatcaaaggttatttgcacctacccaaggcttaacgcagcttatcacgtccttcatcgcctccatgagcctaggcatccgccatacgcccttatttactttctttcgccacgatcatacgtcttcacactgatgtaaacatcgatggaaaaatcgtatgattggttgctcatactttcagctgtattgtttggttgataggcatcttaaatcaataaaatgcgttatcaaggttcatttgaacttttattttactctacagttttacttgtgtcaatatgtcaaagatcgtttgtcttggaattcataattcttaattcatattcatactttaatcggtatgaaatgaatttacgtgcttatgaatttaagactgaagtggagaataacggattcgaaccgttgaccccctgcttgcaaagcaggtgctctagccagctgagctaatcccccatttttaattcataattatgaattatgaattgagaattatgaattaaagattgtagtcccaggcagacttgaactgccgacctccacattatcagtgtggcgctctaaccaactgagctataggacttcaatgctccggtctgtcgtatcaagtcgcagggctgcaaactctattgcccggcttcctttttctcttttgtatcttaaaaaacagaggtggtgtacaaaaagcactattgacatgcaatagcagggtcgtcttacaaaaccttgataagaaatatcgtcttataaatcctttgtgtaattcttatatcattcttcaacctgtaggtcgttttaattatgaatgatgaattcttaattatgaattatgaattgcactcgttgtttcgtctccagaaaggaggtgttccagccgcaccttccggtacggctaccttgttacgacttagccccaatcaccagttttgccctaggccgctccttaacggttacggacttcaggcacccccagctttcatggcttgacgggcggtgtgtacaaggcccgggaacgtattcaccgcgccatggctgatgcgcgattactagcgaatccagcttcatggggtcgggttgcagaccccaatccgaactgggagacactttgaagattagaccaaacttgcgttaagccaacactctgtatgccccattgtaacacgtgtgtagccccggacgtaagggccgtgctgatttgacgtcatccccaccttcctcacaccttacggtggcagtatccatagagtgcccagcatgacctgatggcaactaaagaaaagggttgcgctcgttatggcacttaagccgacacctcacggcacgagctgacgacaaccatgcagcacctccaccagcgccccgaagggcctcaacatctctgtatcgttcgctggcagttcaagcccgggtaaggttcctcgcgtatcatcgaattaaaccacatgttcctccgcttgtgcgggcccccgtcaattcctttgagtttcaccgttgccggcgtactccccaggtgggatgcttaatgttttcacttggccactcatccaaaacggacgaatagcgagcatccatcgtttaccgtgcggactaccagggtatctaatcctgtttgatacccgcactttcgagcatcagcgtcagttatgctacagtaagctgcctgcgcaatcggagttcgtcatgatatctaagcatttcaccgctacaccatgaattccgcctacttcctgcatactcaagtcgaccagttcgcgctgcaagccaccggttgagccggtatatttcacaacacgcttaatagacagcctacgctccctttaaacccaataaatccggataacgcccggaccttccgtattaccgcggctgctggcacggaattagccggtccttattcatgtggtacctgcaatgcatgacacgtcacgcactttatccccacataaaagcagtttacaacccatagggccgtcatcctgcacgctacttggctggttcaggctctcgcccattgaccaatattcctcactgctgcctcccgtaggagtttggaccgtgtctcagttccaatgtgggggaccttcctctcagaacccctactgatcgtagccttggtgggccgttaccccgccaacaagctaatcagacgcatccccatccataaccgctaaacctttaatcgttatttgatgtcagcaaacgatatcatacggtattaggccgtctttcaacgggttatcccgtagttatgggaaggttggatacgcgttactcacccgtgcgccagtcgtcatcaaggaaagcaagctttcctcatgttaccctgcgacttgcatgtgttaagcctgtagctagcgttcatcctgagccaggatcaaactctacattgtaaaatattattgaaatggaaaagataaaacatataaagcctacgccatataccctatctcaaccaacttcgttgtctctgttcagaacgaaactccagaatttaaaagtattctcaccttagttcttttctaatgaattgaacggttcgtaaaacttgttacctatgtatttacgcttcaagaaaactcgttaactcgtcgcctcatcaactcgcttcctaaaaagccatacatgcttcttgtactacttctgtcttatgtaaatctttttcaaagaacgcttcttttatcgccccgaagaatgtttcattttcgtttcattctcgaaagcggatgcaaaagtacaaactttacgactaacttccaaatatttttcaagaaaagttttagaaatttgcaaaaattgatttaggtcaagggagaaatgagttgacgagttgacgagttgacaagttcacaagttgacgagttgacaagttgatgagtttgtgagttgatgagtgtataagttttttagttgacgagttgacaagttgacgagttgatgagtttgtgagtttttctaaagcatgtgaacaacgccgctatctacatacaatagaccgactattacattactttagcgcctttatctccatgttccaacaacgccagctgtcgaatcatgcaacgtcacctgccgactcttctaacataacctgccgaatcgcgcaacctcacctgtcgacttgtgtaacgccagctgccgaatcgttcaacctcagctgccgacttgtgtaacgccagctgtcgaattgtgcaacctcaactgccgaattatgtaacgctaactaccgactcgagatttgagtagacaatttatttcttttctgaaaaaactttacaaaacgtcgacgtcggcgatctcacgcgcgcttcgtcgtcgtattattgatattatagatattattgatattattgatatataaggaacggggtttgattatcaacgagttaagaggggtaaaattgaacggttcttcaacggttctctcacggttgttcaacgaacgattcatttccaacgaaaaaatgaacccataacgactccttttttatggtaaaaaaagaggacaaaagcgatatttgtctcttattatttaaggagagaaatccttttgcttctcatcgaaaaaacatcatggttcaagatacctacaaatgggtattgcaaatttattttatatgcagtacctttgccgccaacaaaaaaaaatacttcaatggcaagaaagcaaaagaaagacaaatctttttgtagaaaatttatatgtagatgcatcaactttaagttggtgcatcttttttttgtgaataattttgaatttcattcattattcaaaactcctcaaaaaccaaaaaagcaaaacatggaacgcctatcaacacattctttaagcctgctacgtctcttttacatactatgcttgctccacgccgcaagttacaacgctaacgcacaaacacatggcacaaccatactgtatggatatgttaccgatgagcagcgacatattccattgagtggtgccagtgttgaaatcatagggacggagaagcgtgccaccagcaacgaagaaggtagatatattctgcccatcagcgaagaaggaaagtttaccctacaggtgtcttacgtcggctataaaactaaaaagaccaatgtagatttatttgtcaacaaacaagacagcatttgcatcaacatagctctacatgcaaacagtaacacactacaaggtgtaaccatcttgggcaaaaacaagataagacaactaaagcagtcggctttgcctgtatcggtcataggcaaacaacaattagagggaactgccacgaatattaatgacgtactggctcgcaccgtaggggtaacagtacgcaacacaggtggcatgggaagtgcgtcacgcatatcaatacgagggctggaaggcaagcgcatgggcatgtttgttgacgaaagccccttaggaggagtgaataattttgtggcactcaatgacattcctacctcaatgatagagcgtattgaggtgtataaaggtattgtgccctacaagtttggtggttctgcattaggtggagccgtaaacgtagtaaccaaagagtatcctcccctttactttgacgcatcgtacgagataagctcgttcaacactcaccaattatctactgttctgaagcgtaccaaccaacgcacaggactgcagtttggcattggtggagtgtacacccattcggacaacgattacgacatggttttagaccatttggatggaagaaccgtaaagcgcacccatgacaaattttccaagattattggtggcgcatctgtgaaagccaccaaatggtggtttgacgaactaaaatgggaactgatatttacccacacccgacaagagatacaaggtattgaccaatatattcgtgaggctttcaataagtcacaaaacctcatgactgcgctgaaactgcaaaaagagaacttttttgcaccgggcttagacctgacttttgagacactactctcgtacggacgatatggaatgacagataaagccaagtgtcgctacgactgggatggcaaccaactgcctgccgtatcgccttttggtggtgagcaaggcagccatccaagcgatggcgataacaagtcgtatgattggagcggcaagctcaacctaaattatctcatcaacgcgcaccacagcctcaacctcaatgtatgtgccaacaatacgaatatgtttcccaccgactcgcttatggataaggctttaggattcaatgccaactttcatagcagaatgacatctactactataggactatcgtacgacttgacactctttaatggcagatttcaaaacgcattcacgataaaagactttatatatagttccgactcacggagtatttccacttactctattagtgagccaaagcccatcagcagttcaaaaaactttgcaggttttagcaatgccatgcgctggaagttctccgacgaactgttggtcaaggcatcgttcaactcagaagtgcgcataccatctaccgaggagcttattggcaacggctattccatattaccttcgccagctctaaaacccgagcgcacgacaggatataatattggcttgctctatcacaaagcattaaaagatggtggaatgatagaaatggagttaaacagcttttacaacactttaaaagacatgatacgtttcacacccgacatgatacctaccatggctcgatataggaactttggtgaagtgcaaaccatgggaatagagttagaagccaaaggagacgtgttgcccatgctctatttatatgctaacaccacataccaagacttgcgtgacaagcgaaagatgattcctggcacagtggtggaaaaccccacctacaacatgcgtattccaaatgtaccttacttcatggctaatggagggctggaatatcatcaggagaatatttttggcggtcgaggacagaatacccgcatcatggttgacgcctcatatataaaccaatattactatgattttgagatgagcaaatatcaagagcgcaaaatacccacctctatgatagtggatgctgccatagaacacacattacagaacagtacatggagctttacgctaaaggttaagaatatagccaaccgccgcgtcgtatccgatttgaattgtccattgcctggacggtctgttgctttcaaagtaagatatttattaaagtgagatttatagtatcaattcatcaattatatcattaaaacaaaaaaaacgtatgaaaatcaagatgttattgtcagccattgctctttccgtactggctgcatcgtgtggtagcgacgacaacgctacgccccaatcaaagaaaaatactggtgccaatgctttccaaggcattgtttttgcgacaggagttaccaaccccgaaggcaccaacggcagcgtgtacatgcaagcacttgccgacatgacgcccgggaagtacaacaacaaaaacgccacacccacaggatttggttcaacacctatcatcacaccaagtggtaatctatattccttccccgattatatggggaactccaaggcagagattacccgatacaacattgacgcgcaaggcaactttgtacaaaaaggcacactgtccatccctgcaggagctgctgccagcaatgtggtagaactgaataaagaaaaggcttacgttagttttaatggtttgggaaaaatcatggtatttaatccgaaaaccatgaaaaaactgacagagatagaccttaactctttagcacacaaagacaccaaggtagccccagctgccatgattatccgagacggcatgttgtttgttgggcttaatcagtttaatgcacagtggatgccaacctccaacaccatagagcttgccatgattgacaccaagacagaccaagtaaaaaagcacattaccaacacatcattaggcatgagttttgcaacacgccccatagacgccaattctatcttcatggatgagaacaaagacatatacatcaactgcattggggcatttggttttatgcctcaacatcctggaggtattgcccgcattaagaacggaagcgaagagatagaccccacattctgcattcggttcgaccaaacagaagtaaaaggcttatcggtcaagaagggtgaatttgctgcaaccatgctctatggaggtaaaggcaaactatacgcttatctaaacgcctatggcttagatcctaacgccatgagcaatccgtatctatcaatgaccaacgtacccgtggagatagatttataccaaaaaagtattaccaagatagagggcatggaggttggcaaccctcaaggaacagccattggtaaacacaaaaatctaattgtatttgggagtgccaacaaaaaagcaaatggcttttacacctacaatccagaaacaaaggaagtaaaaggtcctgtattggaagtaatgggtaatccaagcttcttttatagttttgctaaataaagagaaatagaagattgagtctgttcgttgcttctgcttcagaattccaaaagaacagactcaaactttttcgcagtataaaatacgctcaacatgcagacacaaaaagacgaaatcaaagaacgaatcatcgctgttgcccgacaagagtttattgcgaatggagtgaaaaacacatctatgcagcgcattgcatcactttcgggcattgcggttggcaacatatatcattatttcaaaagcaaagaccatttgttcaggtgtgtcatacaccccttattaaaagcctttgaaacctatcggcaaaatgccaaccagtcatcatacgcctcattggacatattcagatacgactcatacttggaaagtatgaaagaattggtcacatcgttagttgttccctatcgtaatgaattaaaacttttgctgaacgaggctgccaacacctcacttcatcatgccattgacaagatgatagaacaacaaagttttgacggaatgaactacatcaaacgaatgaagcagcaatatccatacattaacgaccaaatatcacctcattttctccgtgtgctgtgcaatttatggaaagaagtaatcaaagaaattgtaatgcacgacaatctgacacccaaagaacaagaaagccttatcctcgattacgttaaatttgacgtgggtggctggaaatacatgatgaacattcagggcacattggacttagaaaccgaagactaaacaacaaaggttccaatatctgtcactcttgaggaataaaaaaaagacgcaagtgtaaatcgtaaaagatccgagcggagaagttttatcgcagacgcttttttataacagcaggattgcccactgccaaacagtcatcgggtatgtcatgcactaccaccgaacccgccccgatgatacatcgcctaccaatatggacacccggacacacaatgactcccccacccaaccatgtatcatcgcctatgctgataggataagaggtttcttgcggcaagcgacgctccaaatagttcatcggatgttgcggcgtgtacaactggcaattgggacctataaggacatgatgcccaatgcgcacataagcaccgtccaagatagtacagttataattgagaaacgtatgctcacccatcacaatgccatgcccgtggtcgcaatgaaagggaggacagatggcagaagacgaaggaatgccaggaacaagttcctctatgatttcacgataacggtcatcgtccatcgacatggtttgcaattggcgacacagttctttggcatgcgcaagactggcagcaatttctgggtcagcaaaggaatataactcctctgtgcgcatcttttggaattctgtcttcatctcatcaagaattgagcggtttgtctaaatgcaagcaacagtccacggataactaacgctgctcatcgtgtccgttgcatagacctcataatttttgtaaggtatctctatgcctacaaatataagaataattgtggacaacgagggctaagattgttaattattgtagtttttaacggaaaaatggcatggcgtttgcatgtttgttataaatcatttatcttagcaaaaaattcaagaagtaaattatttatggaagtaaaagagttagaaaaactaattagagaaaaggaaggctcgttgtcattggctttccctgccctgatgcgcaaagtatatgtatggatgacattggctttggtcatcactggcataacggcatacggagtggcatcatcgcccaatattatgatgtggctggtacagaagcctgctattttgtggggactgattattgccgaactggcattagtgctaacggtatccgcagccatcaaccgactctcgctgacgacagccaccctgttgtttgtgctttattcggtactcaatggtgccaccttgtcactcatctttatggtgtacacccttacatcgatagccagcgtgttcttcatcacggcaggaacctttggagtcatggcagcctatggatattttaccaagcgtgaccttacctcattaggaaagttattgctcatggcactgattgggcttatcattgccagcgtggtaaatatcttcttcgtgaagagtagtggctttgacttgatagtaagttacatcggtgttttgatattcgtaggtctgaccgcctatgacactcagaagattaagcaaatgcttgccctacaaacagacatgggcgaaggcgcacagaagattgcactcatgggtgcactgtcactgtatcttgattttatcaacctgttcttgcatttgttgcgaatatttggcagtcgggagtaaaaacaatgaaaaccatccatttgaaactcgccgccctatcttgtgcggcattgatgagctgtggcagcttgcaaacaaatagcacacagactcaaaagaaagaaactagcacgtttggtcagatactcagcgccgtgaccaatggcgatgccttgggcaatgccttcaacagcgtcattggtctggacaaaccaaccgaagcccagctttatggctcgtggcactacactcaaccgggtgtagcgttcaccagtaagaatgctttggcgaaagccggaggcgaagtggcagccacacaagccaaggagaagctgaaagcaccgtaccaaagcgttggattcaatgcaagcaacaccactcttcagttaaacaaggacaagaccttcaccattcagttggctgggaagacctttcaaggctcgtacatttaccatgccgacgaatgcaaactggatttgcagacgttcctgattacacttccttgttacgtcaagcgcacgccaaaaggcatgagctttctcatggaatcgaaaaagctgctcaccctgtttcaggcaatcgccagcatcagcggtaacagtaagctggaaaccgtcggcaagatcagcaaaaactatgatggcatccgcatgggattcgaaatgggaaagtaggcaaaccaagacattactgtccgctaaacttttgggtaagtcactgacatactgtcatccgaactattgtgtctcaatgagttggaatgaggatctctatgtttagcggacagtaagaattgaaaatacattgtaaactttcaatccgtttcttatttgtcatacatcaagcagtcgtgtgttacaaatcgaacagatgcttgtaacttaatgtgacataattggttagcgtgaggtataatgattcgagctcttttgtgttaactttaccgttctcataccatttcatggacacggcgttggtcttgttgaaaatttctttctcaacaggtttcaatttttgcataattccatcgccctgtttgttgtagagcgcttcccaattgaaatatctgtcagaaccaattccttggtgataggaataaacccgatcttttagcgtgtccactttctttccaaaaacggtcacttgctggcctgccccgatcgtgtataaagctggcagcaatttatccgcgtttttaacccaaaaggggaacgctgtgctcacaggaggatagccaatgacggtccacatggttgttagctcagggttttcgtgcggttttactccttcgataacacctgagcaagcagttcccactcttgagatgaaatcgtggtcaacaaaccatccggatgtgttgggaatgttatgggtgccatcgtgtaggtctatgccaagtttggggttaaggaaagagcggtctaaatgttcgaatatccagtcgggggtgatagctttggcttttgcggcttggtttaaagcatcatcggcagttttataacgtacatatcccaacccctcattgggctctcctgtgaaactgaaatttgttctcacggcatatccgttgggtgctattttggggtcgtttacgtcaaaaaaatgataacttcgcgtgctcacttccacccacacggctccaccctcagcatcgattacaccaaagttggcacacagtcctacgagcttagtggtatcaagatagtgccttaggtcttgtacggtggcgcaaacgctaagcgttttgtacatgaactcgccatttttcccacccggctctataccgttaaccgttttctcaagattgaatgattgtgtgtttataattgaaaatccagccgtgtttgttcccaaccacacttcttcttttgatcgaggttggcaatctacaacgccaataaagtcatatttctgtcctttgaaaaaacgcatgcagttttgtagggcgtctgtatcacgcactttccatatcataggccgaccgtctttggtggctttgcccgttattaccgcggccgtgcaggcatgcccaatggcaactatcatgcaaaaaatgtaagtgattagtagtgtttttttcatattccttaattccgcaacactattataaattaaactttttaagtacctgagcaacaaaaagttgctcaggattttgccatgtcagaattttcacttatcttagtgttgcaaaaaaaaacaagagaatccgacgataggcatggcgaagatacaaattaaatctgagagactcactccttttgggggattattttcaatcatggagcaatttgactccacattatcatctgtaatcgactcaaccctcggtctaaggtgtagatcgtttggttatcagtacagcgaaatcatccgttggattttatccttcgttttctcgccatggcagagttcaagcaagcttaactctgctcatctggcttaacgaaaacgttctctcatgagtatctacttctgtggcggttcatgtaccccaggatgtcacttctcatttgatgaaccacctctcgcttcatccgacacttcgcacttgtagctctgatactatcctcagagcgataaaggagttgacgcaagaaaacatttcatacacatcagatatgggcaagacctacgatttcaatacggctgacactctcaatactactttattgctcaaggctggttctataaattagctttgttagattttgagcttatttttgagatcaaaatgcaagagagtaaaggagtgtaatgttaaccacaatccatatgctccaatcttattttttattgcaggaattatttgcattgaatattcttgcttattttcaaattcttttataatatgttgccttcgttctatccttgaaagtaagttacatacaaatactggtattttaatatcactcatattttatttcttttaaaagataatcagatagatcttgtaaacaaaatgctttattattgcaatcttggttatagccacttcgagagtctaatataatatttccatcactattagtaacaatgaaagagggaaaaactgtaacccgcattttttgagatacattatttttagagtgttggaaacatgctaaggaaagccaactcaccttatctttttgaacggcttttatccatgcttttttgttttcatctaccgacagattgataaaggcaacatctctcttatatcgattgtacaaatcaattaggtctgggatttctcttctacaaggtgcacaccaacttgcccaaaatacgatgacgagatattttttattaccaatgcaatccttaaatgaatacttttttcctttggtatcgaagaaaggaaaaaactgttgaatgctgttcttccttatttcttggatatattgtttcacggacataccatctttagtattctttagactatcagcaaaagaattataaatcctatataatagagctgtgtctttgtatgctgttatatgctcacatatctcttgtagtaataatctactatgtggatatctatttactaatttttcattcataagacatcctctgttgtcaaaataccagcgagtgggagatgttcctttaggagcataatcaatttcgctatctctttgacgtataaaagctacttccatgttatcagttagctgagatatgttaccaataaaagacgtagaatcacgcatgtgtaagtctatgtgcaaatccttattatctaaatacaaatctcctaaaaataaattcatataatcagaatatacatttttaaagtatacatctttcattatatttttattattttctatagatttgataattatttgagcgagtgcaatgtttttcattggtgaatagtttaaaactgcttttccatttttaaactgtacagaatctattctttcccattttttatctaatatacataaaaatcccttcatatcttgtttggcaattctgtccaattgcaagataatgcgtactttttgtccgtagttaggtaaatttgatgcagccgttgatattatccagctcgataaaaccaaaatatataatatttttttcatattttcttgatataagatagggaagctgacttaaacaagtcagctattccctattcgaaattcaaattccttataacatgtgtaataaggtaggaaatatccttagataatctttaatcattccaacagttactctttttgtcataattaccacaaccagagtttataccctccgcatcacaatagcatgtcaccgaactattatagtcaatctcttgacattggccagttcgagatatacctgtgtagcttccattactatcaaagtaacaaacagtgcatggtccatttttgcactttcttcgccctgatcacattaaactacctccataaagattcttcatactttcttctgaaagaacttctaaattttcatttggtaaaatttaagttttaatttcataattttattatttatccttaatttcgcaacactattataaattaaactttttaagtacctgagcaacaaaaagttgctcaggattttgccatatcagaattttcacttatcttagtgttgcaaaaaaacaagagaatccgacgatagacatggcgaagatacaaattaaatctgagagactcactccttttggggggattattttcaatcatagagcaatttgactccacattatcatctgtaatcgactcaaccctcggtctaaggtgtagatcgttcggttatcattacagcgaaatcatccgttctctcatgagtatctacttctgtggcggttcatgtaccccaggatgtcactactcatttgatgaaccaactctcgcttcatccgacacttcgcacttgtagctctgataatgactatgtgcggtggtaatttatagaaccagcctcaattgtatatttgcatctggccaactgaaagagggtgagatgtatgatgttgatttcgaccatcagttcatagagacagagaagtatgatgcaaagcctacatacaagaagttccttggttatcgccctggcgtgacggttattggcgatttgatagtcggtataatccgtaacttttacaaggtcattattcaaagacttgacgtaaagaagttcggactcaatgcaacaagtcgcataaaagcgtttgtcttcaggtttatctctgtaccagccaagtggatcaggacatcaaggcggtatgtgctgaatatctatacctgtaataatgcttatgcagatgttttccagactgattttggataatgcctacaacttatgggaatgatattgtgtattgcctcaagtcacattgtggggtaaggggacattgtaggcagaagtgggtgcttcaagttcaaattatctgcaaatttagtaatgagaggacgtgtaaacgcaataaggacgttcaagggcttagcagcggatttgaggtatataacatcttgacatagacatcttgagcttttttgtttccaggcaagaagatctcttttccatctgtatctatcaactttacaggattccctacacaatacacatagcttccaatatttagatatttctctgctaacggatccacacacatccatcttcccagcacagcgtcatagtggcgtatctggtcaactaagagccagccacctattataaaaagtgagctacaaaagagcttcatcctttttattttggcaaaagcaccgcgcttcacccctgcatgaagcgttgcttgtccacgataaagcggagatgctcaccttcgccaatcacctcgccattctcttttgcgacaacatggaatgagagcttgcggcggtcgacctttgtcaatgtcgctgtagcctctacagttgcaccgagcttgctgggcttgacatgcgatgcaccgagataaccgcccactgtggtttgcccctcatccaattcgtttgccacagccaacatggcagcgttctccataagtgccaacatggcaggtgtacccaacacgggaagatcgccagagcccaaggcttgcgccgtataggcttcggtaacggttaaaacactggtatgcgataatccttcttttaacatcatcattctttcaatttaagatttacttttttcggtttcatggtcacagtgacactggtaggaaacatataactccagtcattgcgctcaaaaagtgtctgtcgcatcgtggattccttgcgcttcagacgtcctttgaacaacactcgtttgccgtatttaacagtgacgaacttatccaaatccaccaactcgtcattgagataaagcgtaagcgttgtgtaatcacactgcgtgatatggacacaatttccttggatataagccctgagcattttacccggtgccaattctgctggtggcacgcccaaccaatagaagtaaggtttcaccacttcggcttgttgccagacaatcttctttggatacggattgcgtctgaactttgtcatccatggcacggcagccgaatcaacccgattcatccaatgccccataccttttataatatgtgtttgatgaacatatcccagagggtcgtgctgctgcagcgagtccatttgtagtcctcgctgtgcagccaacgtattacgattgtaggcagcatcgtgctcaccacaccaaatcatgaaaggcgtgttacgcaaattcagcaatgacacatcgcccggatgtcctgccatcatcgaagctgccgcccacgagtctgccatgcgtggagccatgcgccacacgccatcgccaccagccgaatagcccataagatacaccttgtcgggattgacaccctcgaaagccacacacatctgaataagttgttcgtagagtgggtcgatgccgtcgtgacaccacatatcccacaaattccatggcgcacgcggtgccacataaaccgcttgttggggacggtaaagatacttttggttctcccactgctggttgttcgtctcttgagtcgttccaccacccccatgcagtgagataaacaagctataaccatcggcaggtttttcaccgtaggtcacccaccacaacggcattgtaacgccattatgggtcagcgtacgctgacgataataaagtcctaaccgtgccttggtgagctttacccaatctttcttcaatcgctctcccaccagtgccacttcgggcttagccatcgcacgttcacgcatggcacgctttgactgtccaaacaggtgaagactgaaacaacagaaccctatcagacaaaggctccattttgtatttagttgaaccaatttcatcgtttcatgatttgttgttggacaaagatactactttttttacaatgcaatgcgctacgttctaaaatacttgtttcttttcaaaggacctccaaccgcctgaatacttccaaacagtacgcctgtcctattggctcaaataatggataaagcaagaaggagagcatccgatatcaacatatctatgcaatgacagcattggaaacgacaaaattatcaagcgtttttgttaataattgtcgaaataaagcttttttagcgataaattacttgcctattatgcagatatttttaattttgtgaatagaaacgtataaagttacagtgaatgagatttaagaacgacagacttgaagcaattaagctactcatatcgagccaagaaataggaagtcagaaagaattgctggaagccttggaggcagaaggatttattgttacacaagcgacattgagccgcgacctcaaacagctgaaagtggcaaaagccgccagcatgaacggcagatacgtatatgtactccccaatgaaacgatgtaccgcagggtacagaagcctcttcctgctcgcgaaatgatgttgacacctgggtttctgtccatccagttttctgggaatattggagtcatcaaaacacgcccaggctacgccagtagtatcgcttacaacattgacaacagtgacatacccgagatattaggaaccatagctggcgacgacaccataatgattgtggtgaaagaaggagtccaagagtttgaaattatagacttgctccacgagttagtctttaagatataagtcatcgcagccaaacatgttgtgcattccttacccccaaacagggaagcacagactacataggtggcaacacgatacacttctaaacactcactaaaagaaaggaaaagaaaaatgaaaaaattgacattgtcaaatgacaaaaagattggtggcgtatgtggcggaatagccgaatattttgatttagacaaaacattagttcgtgcgctttatgccgttatcaccttgttcaccgcctttagcggagtgattctctacattcttttgtggatgattcttcctaagaaataacatggcattgccaaccctttccaaacatatcgactcggcatgcacgctgcgtcggtgtgaaagggggagtatgtccgcctgatttggtaaaggctaagaaatgaaaacttcaatttctctcgatatcttatattttatgcacaggcaataagggtctgtgcattttttattatttatcaacaattgttagcactacataacaaaaaggtaaattctattccaaaaggtttttatacttttgaacggctatcagggatttcctgaataccacacattattaatataacaccgcatggaagagtcaataaaacaaataggacagcgactgaaaggactgcgagaggtcttgaacatcccagccgaagagattgcgcaactgtgtaacatctcaacagagcattacaaaaaaatagaggcgggagaagccgatccttcactctaccggttaacgcgaatatccaagcactatggcattgcgctcgacgtgttgctgtttggagaagagcctcgcatgagctcttatttcattacccgtaaggggcaaggactgaccgttgacagacatcaagaatacaaatttcaaagtttggcgagtggctttaggggtaggaaagtagacccgtttttagttcaagtagacccgctgccagataatgagaaatataataagaatacacacaagggtcaagagtttgacatcatcattgaaggaactttggagattacaatagaagacaaggttctggtactacaaccgggtgacagcatctattttgattcctcgaagatgcactgcatgcgagccgttaatgacgagccttgtcgttttttgtgtatcgttatctaaaacacataagttcatggtagaaagatttttaacgcaaacttcgtttacttcagaggaagatttcaaggcgaatttgcactttaaggttcccgagaattttaattttgcttatgacgtcatggacgtatgggcagaagaaagaccagataagttagcattgctatggaccaatgagcagggcgcagagttaagatttacgtttcaagacttaaaagaacaaacagaccagaccgctgcttattttcaaagtttaggcattgggcatggcgacaaagtaatgctcatcttgaagcgtcattaccaatggtggctcgccatgctgggtttgcataagttaggagcgatagccattcctgccacccacatgctgaccacgcacgacatcatctatcgcaatcagcgagccagtgtcaaagccattgtctgtgcagacgacacctatattattgagcaaattcgagcagccttacccaagagtccaaccgtcgaaacggtaattagcattggagaaaccgtacatccagacttccacaactgggagaaagaatggaaacaagcacctccatttgttcgtcccaagtacgtgaacaccaatgaagacaccatgctgatgtattttaccagtggcaccagtggtgaaccaaagatggtggcgcacgactttctatatgccttgggacacatcacaaccggcgtttactggcacaatctacaagaagacagcatccatctcacagtggctgacacgggatggggaaaagccgtgtgggggaagctctatggacaatggtttgcaggagcggttgtttttgtctatgatcatgagaaatttaatgcaccatcactcatgagacaaatggagaaataccatatcacctcattttgcgcaccaccaacggtctatcgctttatgattcgagaagatttttccaaatacgacttgagtgcattgcgctattgtaccaccgcaggcgaagccctcaaccctgctgtgtaccaaaagtttttccaactaacgggcatccaactcatggagggctttggacaaactgagactaccatgacattaggaacattcccatggcagacacctaagccaggctctatgggaaaacccaatccgcaatataatgtacaactgctcagaagcgatgacacccaatgcgaggatggtgaaaagggcgaaatctgtatctatatcggaaataaaaaaccaatcggtttgttcaaaggttattaccgtgaccaaaacctaacactgaaaatatggcatcatggctattaccatacaggcgatatggcatggcgcgaccaggacggctattactggttcgtcggtcgttcggacgatgtcatcaagagttcaggctatcgcatcggtccgttcgaagtagagagtgcactcatgacccaccctgctgttgtagagtgtgctatcacaggcgtacccgatgacattcgcggcatggtggtgaaagcaactgtggtattggcggatgaatggaagtcgaaagccgatgacacgctcatcaaggagttgcaaaatcacgtgaagcacgaaacagctccctacaaatatcctcgtgtcatcgagtttgtggacgaactgccaaagaccatcagtggaaaaattcgtcgagtggaaatcagagagaaagataaccaaaagaaatcatagattgccaacgatattgcaaaaaacgctgtacagaattctgcacagcgtttttttttgtaaaaatagcgaatgttattcatcttatttcaatacgcctaattctttaccaatcttgataaatgcagcaatacacttatccaattgttcatgcgtatgagcagcagagagctgaacacgaatacgagcctcgccctttggtactactgggtagtagaaaccagtcacatagatgccctcttcgagcaacttcgcagcatacttctgagacaaaggtgcatcgtacagcatcactgcacaaatagcactttgtgttggtttgatgtcaaaacctgcttccatcatcttgtcacggaaatatttcacgttctctaccaaatgatcgtgcaagctattgctttccttcaacatcttgaacacctctaaactggcgccaataatgccgggtgccaacgagttagagaagagataaggacgactgctttggcgcagcatctcaataatctctttacgacctgttgtaaatccaccaagtgcaccaccaaacgccttgcctaaagtgccagtatagatgtctactctgccataagtatcggtcagttcgctgacaccatgtcctgtagcaccaacgacacctgccgagtgactttcgtcaaccatcaccagtgcatcgtacttttctgccaaatcgcatattttatctatcggtgccacattgccatccatagagaatacgccatcggtgcagatgatacggaaacgctgtgcctgtgcttcttgcaaacacttctccagctcctccatattggcattggcataacgataccgcttcgccttgcaaagacgcacaccgtcgataatggaagcatgattcaacgagtcggatataatggcatcctcatcggtgagcaacgcaccaaacaaacctccgttggcatcaaaacaagccgcatagagaatggtatcgtcggttttgaaataatcagaaatggctgcctccaactctttatgggcgtcttgtgtaccacagataaagcgtaccgaagacataccgaaaccgcgacgatccatcatcttcttagatgcttcgatgagtcggggataattagaaagacctaaataattattggcacagaagttcaacacttcctttccttttacttggattgccgcatcctgcggactttcaataattctctcctctttataaagtcctgcttctcttagcttttcgaggctctggctaagatgttctttcattttaccgtacataagatttagatttaaatgattttacttacaaagtaaggcaatatttttgagaccacatcgtgttaagtgttattttttataaaaaacacatagcggaaaagtaaatttgggcaaagcgtagtgaattagctgatagagcggtcgttaccctttgtttttctatggggctgagccaacgaaataccacctcgaagccaaacggtgcagaagctcagctatcacctcgttacttccgtaacgggtgcagatttcttgctaagaggttctttttctgcgttttgcgttgatttacatagctgtcagtaactcactaagaactaattttgtaaccccaaaaaggagtgagttatgcgaagtacatttaaaatattattttacgtgaagaaaggcagacgggcaaacagacgacatgccgcagggtatttacggatgaaataccttaacttattagggaattttccgagccgcgatactacgtatcgctgaaaattccccaataaagcaagggacaagcccctctacacaccccttcgggaaccacaatcgctaaatttaagtcaaaaaaaatattggcttgatatagtgcataaacaaaataaaagtagtatatttgctaaatattgtcaatacaataaagagtaaacctaatgttttcagaccgcataaaagaacttcgtattcaaaaccaaatgccgcaacgtcaattggctgcggcactggatattgatactgcaacatatttcaaaatagagaaaaggtgagaggaaagcaagacgggagcaagttgaagcaattgcccaaatattgcaaattgaaaaaataagcttgtaactttatggcttgcagaaaaagtttgcaggcttattaaaaatgagaataatgctactcagatattgaaaatggcacaaaaaactttataagtatatgaataatattgaagttataggaaataccgaacataagataattcattcagatgcaataatagctttgaatgaagaaattgcggatgaatcgattgatttaatattcgcagaccctccctataacataggaaaggatttcgcaggttgtaaagataagtgggaaacggatgaagcctatttagaatggtgttatgaatggctgaatttatgtgttaaaaaattgaaaccatcaggggctttttatgttatgacatcgacacaattcatgccgtattttgatatttttctacgtaagaaactaacaattctatctcgtcttgtatgggcttatgatagttcgggggtacaagctaaacgctactttggctctatgtatgaaccgattcttttttgtgtaaaggataaaaacaactatacttttaatgctgaagatataaaggtagaggcaaagactggcgcaaaacgcaaattgatagactataggaaaagaccaccacagccttacaatacagaaaaagttccgggcaatgtttgggatttcgcacgagttaggtataggatggatgaatatgaaaatcatccgacccaaaaacctatagccttacttgaaagaataataaaagcaagttccaaagtgggagatgttgtattagacccattttctggtacatttacaacttcttatgtggcaaaaactttagggaggcaatcgattggaattgagttgcaagaagaatatattaaaatcggacttagacgattagaattagcaacagaatacaaaggattaccattagaagcattaaaaaaagtgtataaaccaacaatatctacagatattcagcaaccatcattatttttttaaatttatggaacacggctttacacctatcattaaagatattttattccgaatatacggggaaattggaacggagatttacacaaaaaatcttttgattcaatatatcaatgaaaaaactaaatctgcaagtaaaggttctaaatctcgttccagttttgccaatctttatgctatatatgttataattgaagattatatagcacatgatttcgatacaaattccatgtatagaaattatgaaggagcgcaattttctcgtttatttcagaggcaacgagaacttccttttggaaataaattgcaaaatcacgcattgaataatcgaatgaatgcggaattccaaaagttctttcccacatcagaaataactcctattttgcgaaacttggaaactaaccgttattggataaatgaaaatttattaatagttgacgtcaatgggaaccaatataatattgctaaagctattatcgcaattatagatgaatatgtgaaagttaagcaagattcgtttcaacgcttcatcgcacaatgcgaaaaattacaggctatcgaagatagcaatagtgtaaatgttcatgagtttataatagggttacttgctccaagtgttgatgcaagattatttgagatagttagttatgctattctcaaatattactataaagaacaaactattatatggggctattcttgggaaaatttgaaagaagaagccttaaaactttataagacaggaagaacaaatgccaatgatggaggtattgattttgtaatgaagcctttgggaagatttttccaagtaacagaaacgttggatttcaaaaagtattttcttgacattgagaaaatagaaaaatatcctattacattcgtggtcaaatcgcttgatgatgtggatgttttgaaagataaattgtataaagatgcttccaaaacttatgttgtagaagatattgtttgtaagtatatggaatgcatagaggaaattataaatatcccaacactgctacaccattttcaaagagtagaagatgcagggctgatttcaaatatactcaaagagataatacttcaaagtagagttgagtttaactatgaggataaattataaaaaataaaatggaagttaatatcaaacaagctttgaaaatgtttttctctaaatcgtcatttgagatgatttattttgaagcgtttgcaaatgctttagatgcgaatgctaccgaattcaatatcaatatatcattgagtaattatggagaattgcataatttaatagttacactttcagataatggggttggattcaatgatgtaagatttggaaagttttccaaattatttgatgttgaagaacaaagccacaaaggtttaggacgcttggtctatttatgctattttgataaagttgaagttaaaagcatttttgataattcaaaacaacgagttttcgaatttaatgaagcttttgataaagattgtactataactgaaatcgagccaacactcaatggctcaatttttagaatgagtggcttcacaggagaaagacttggcaaaaatgattatataaatccacattatataaagaaagctttattggaaaacttttatatgaagttctataaagcaaaacttgctggcaaacaaataagtgttcatatcaaaaccaccactggaggctcttgtgttgaagatgcaattaatacagatgaattaccgaattttcaaataaagccattaggtactcaaatagacctttttaacaaagttgaattatattataatgggcggtttcaacatgcaaatgcactaacgattgcaaagttaaaaaatattttcataaaagcattcaaatggacaacgaaaattcaatttttctctcggacgacgatttattttgtctgtgaccttagttacatactgatgacttatatcatcaaaagaagatgattttggaatatattgtcttataagaccattttgattttctatcaaacctttttgccatgatgaatacggatctgtgaaatagacagtaatgccaagtttctttgtgatgtattcatgacaggcaaattctaatccgttatcagttgttatagtcttgataaatttcttatatggcatcaataaccgaactaccgtttttgccagctcttttgcctcctttcctttattaagtttcctcataaacaacattcctgttttcttttccgtaatggtcaaaatggcacctcgattccctttgccaagaatagtgtccatctcgaaatctccgaagcgtctgccatctgcttcttctggtcgatctgttatttttgtcctgttacaaatcattgatccatcaatacttacgggacgtgaccggtgtttgagtttatggcgacaatatagatataaagtccctccatttttcttatccttacgaatgattttatatatagtttcatgagatattatcatgccacgttcttttagcacagcagagatttgttgtggagaccattgttcttctatcaacaatcttattgcttcatttttcacttcatccgaaatggcacggttgcctggctttcgtttcttcctttggtccgcatttttctgagccgtttcccaattataatttccacggacaccgctgttccgtttgatttcccgggaaatggtagaaggatcaacacctattgattgtgcaatttttgccttactacatccgtttttagtaagtacagaaatcgcacatctttgctgtgaggttaaatggttatacatgtatataaaattagtttatgaatgagacaagtcatctttattgcgtgattaaatgtttttaacacataccttgaaatgcctatgtttatgatattttaatatttacatatagacgtatttattattcaagaaactactgcaaaaatacattcaatccatttaattgatgtatatctattcacccattcacgtggccgttttcacctttaggcaggccttacaggaaaaagctcccgaaaagcggtatggcagagtcttgcagacactgcctccattgttaaacaggaaagattacttccctttctctatatagtggtatatacttattgttatatgctcatattgccgtatatatgtatatatgtatatacgtctatacggcaatataaattcacgcttacacagattactttgcagaccttatactgatcatacaccttttcccgtctcctcgccatggaatggcttttcaggccttctttggcgtgccttttcagacaactacgctttctcacctgactgacggtggtacccaatagcgataaggcatcatagaatctcttgctgtccatgttctcgctccctttcggcttatctccctgccagttcctttcctttcttcggcatcgacagccatttttacaactcaccgttcacccggtttcagggcttaatagaagtggtggtattttcgttctccgatgcccatgtgcatttcccgatactgtaagcggtgtcagccccctctccttttacatcctctctccaccttccacttcaaatccgttcatgcgttcttttcatttttcagataagtccgacatccattttcctttgcaaagttagcgcaagcggtgttccgcaagggtcgccttccaggacttgcctcgtgattttttttcaagtttttggggtgcggttgctcctgatccaaaaactcattggtcggagatgaaaaaaaataacggtcatcccttgcctttgcacaccttcatacttgcctgctccttcatgcacgtaaaataaatatcaacttaaaaaattacaattatgaacgcaatgaacaatttcacagttacaggttatgtatgcaaggatgcagaagtaaagaaatttgagaaggctgccatcgcacgcttcggtctcatcatcaagtacacggagcataaggggaacgaaaccgtaacggtctcatcgattatcagccttgaaacttgggttaagaacgatgacacggcaactttggaactgctgaagaaaggaagggaacttacggcagagggattcttcaagccagagagctacagcaaggacggcaagaatgtcacggttctgaagaacatcgctacaaaggttacagccttcgtcagggataaaaagcaggaagctcccaagaaaaaggacaagaaggcttaaaaagccctccgaggtgagagagactcttttgaaaagggtctcntttttttgtctgctgcaatctgctaagctcggagcattatcttcgcacaactgtctatccttcttggcacacgcctgaaggcaagtgccgttcttagaagcccggcacccacgtctgcgacgaggatacctctcactgcctgtcaccttgcggtcacagtccgtgagtcaagggagagcggacgggcaaagaccaaaggtcactgcccaaacagtctgtatttaggattatcgacaggctgtctataacagcgcaccgcacttcgtgcgccaatacatatagccgtatatatgtatatacggctatatgtctatatggcaatacgggcatgtgtatatacattgcccctcttggtgcttaccatacttaaccaataactatacttccatttccgtttctgccttcgacctcactttccatcacctttgtagtcatcatcgacttttatagtgcaaaggtatcgtaggcagggaacacggcaagtaccagctgaaagcctattggcggaaaacttttcatgaccctccgaaatcaaagattgcggtttcctgaaaactttgccaccaattccttgcctttcattccctttcatgccgacgatcttaccatgcacataaaaggttcgagatgacggttacaccggaataataaaaaaaagttcgggtcgaagaaacgaaaaatcctttaaggttgagaatcgggatgcccagaataataataaacttcaaaatataagattatgtcaaacaacgaaatgattttaactgcattaggtttttctaattgggacaagcaattggacgagttcaaaaacaattttggtttcgactggacaaatgaagatttagatgaagcaattgaggtcgctggctgtaatacctctaatgtgagaaattgtctcatggagatactttggcttaaagtagtctattactttgttgatacaatggaatgttgtcgagagttgtttgatagttacatcaatgggtcgcttgatactcatttttattacaacggaacagaggttaagtctgaagaagaactgttggaactcgtcaacgaagtataaagcaacccacaaatcaataaccatgtaaataagaaataaaatgaaaacaaagacaaacaggtattttttcagaaaagctggaaaaggctggactataatgaagcgtagaatggacaattatatcattgtcatacgttgggtgtcaagctggcaagaggcacgtcagcaagtctataagctcaatggatggaattgaacacctaatattaatcctatatataacgaactcaatttataaacctttttatacagaagaaatgaaaacattatcaatccaaaaaaataagacggtatcggtatttgaaaatgccaataaatggtggaacacaaaaaacgcattcttctcaatgcttacaggagaaaagttttccaacagagaagtagtactcacacatttaattcttatggcgttttgtgctggaatagtttgtgcagagactctcccctctgtatctatccttgccattgctgtaagtgcagtttgtgtaagatttctaaaccaaaaagataataatgctaatattactgattagtttcatttttttatatcctaaaatattaacatttgagcaaaacgagttagagagtatttattgctattataagttccaaatatgtattatttggaacttatatatggtttcattctttattgagcaatgaaaatttctcccatgaagattttgaaaacgttaatataagacttttattttttttatccatcatttttacggcaaggtttgtatcttcgccatcgttaaataaatatttttatgaaaataaatcacctatcaccaatgcttgcattgacagtgtttgtctccttttcatgtacgagacatccgtcattcaaaacttctaccgaagcgatagaggcttgcaaagaaaaattgtcggaagtgagatcctgcaaggatgccgacatcgagaaagtaacaaagtttacggcacagtggcaagaactacgggactcgtcgtacagtgtcttttcaaaagactctaccgttaatttgaaaagtccgatagctcttgcatattttgttatttccgattcgatgagaacggaactaacacgattagcattctcaagacaacgttcgcttcaggatgtaatgtacctcaaactcaatacggcaggggaacgtgcaaagatcgaaagctccgatacctataaaaaagcttccgaattttatgccagccttgataaagtgcaaactattaacaggttaccacaaatattgattagctataataaactactgaacagtacccatgactttaagcaggaatcccagttgcttgcttttatcagagaggaagacaggtgctttcgatcgcttatggaacatcttagtaatgttcccacgaatgagatgcagcaattgactcaaaaaacaacaagactctttgaccgcctttattcttcagttggtcaaaaagaagatgaagtgaatgacaggacgatgctgtatcttacaatgcgctttaacaggcgtatcatgcaaaatgccattgcatgcagggaagatatattaaacaataaaaaactcgaccaagagcaacggataagctaccgatggatgctcattcagccctatgtgtcgttggatagttattcaactgcaactttgacaaaaaaacaaaggaaagaactaatggaactttccaaagaactccctgtgcttttaaaccgtctggatgaaaaaagaaaaacaaaggaagaagagaacaaactaataactaccttggccgattatttccttaaatcctatatttctgcaactttataaataaaaatcgtatggaaaaagcattagactacaacaaacttgaagacggaacttacaagcgttccatcctcctgctttatcaaaagttgataaagttgctccctcactattttacggaacaacagataggcattatcaaacacacttattttacagaggttgttttcaacatggatgaacataacatgttagaaaatgcagtatcagaattggtagagaaattgcatatacacgttctttatgcctcgagggaagaaagcggaaagatatataaggtggtagcatactcgactcctgtagaagatgaaatgtttgtaatctacctttcttcgaccaactatggaatcatagactcaatgacagtcttcttttttgatagtttggaaacaatgtactatcagctactttctgaaagaaagcggaaaccaaggcttcaaaaggacattctggagcaagaatcatacgcagaaacattgtcgaactttaattgaaagaaatatggtgatgttaatattaaaattgatacttttcgttgtgttgacgaccattcctttcctgtaccattttctaattaaaccaagaagggaaagcgtgaaaaattataggaatgtttttgctgcagcacaaccccatatgtcgaagataaagaagttggcttggagactgggttcctatattatcaacttttatgataagatgaaacatagggaaaagccaagaaaattctttacattattgatcttattatttcttctctgcattcaaggtgtggacaattttgcatctggagaagtggcagccacatataaaacaatggcaaaggaaaaaagactggaacagcttagtagcagcggaaagaaaactgcagctcctttcatgcaacgaaagatgaataattatctatatcctttcctcacacgtcctgttatttatctcctgacttttggaataacattgctgttcttctcttataaattagcgaacagaatattcacggaaatacataacagtaaaaaaatcctgatagccatatcctgcataataatattgttttctttcttcgatgaaggaagatatatattgctttcagaggtgctttacgtcatcacaatggcggcattattttatcctaatttccaagacttcgaagcccccaaaggaagaaaaagaataccacaaaaatacatggaagaaagaaaggcagcatgacctttatttaatcatgatttttatataaaaaagttaatgggaaaaagcctgatttttacatctaatatttacaataaaaaacgataatggttaatgaaaaaatgatagataaaaaaacagttcaaactgacaacaaagaatatgacgtaaggatgccttctgctttgttagagtttctctgtggcgactacacttacaagaacacaaggcgtttttctcgtctacaagcctttcgtgatctcgtagtgcgtcattgtatatctgagaggaaacaagaggacatggccgcaaacatagagtgcttatcaaagtcttggggatggagtcgtccttctgtcatgaagttcatccaaaatttggaagcaatggagattttggaagtcttcaatgttgtcacgagcaaaatggttagacttcaaaaaggcgttgttatttttgtacccaaaaaagagacgaagaaatgatggtgagaatctttattcattcggagaaatctaaattgacatttcatttttaatatttacagatgaaaaagacaaagtcattgtacatgcgcttgcgcatgaggaatcgttttgcaaacgaaataaattattttatattgggaggtagcctaataccccccaaatagaaatttggaggaattgacaccccaaaagagggggacttcgtgcggcaagccgtgtcaatattaggctctccgagggtttagacgacgattacctctaaaaatccaaaatgggtatacaaaatagacgtttgtaaaccattgacccctatgaatattacattgaccccaccgttgacccctctgaatgttataaaatgaagctgttgacccctgtaaatgttacaaaatgacagttctaataataaccttgttttttatgggtaaaatttcttgtttagaaaaggggttgacccccttaaaactttcattttgttacattgacccctatgtttgacccccttgaagtgacaaaatgtaacattgaccccaccgttgacccctcaatgtgtaagtttagaaaaagggagaagaaagttttataaatattaccactaattgacccccatcgaaaaatattaaaaaatagaaatatatggcaaaacaagtaatggatctcatgcccacaaagggcattactgttgctcaaagtaatgagcatctgcgaaacttctctgcggaagcctacaagagaaaactatcatatgcttttgatccaacccgtgaacatcttaactttgaggttcgcaagggtggggtaataactcctgtcgacaaaaaacactcaatcacacaaagaatcaaagataatttgaaggcaaggaatataatagaccctaacctcggacttccggaaccaaagtatcgaactgttgcaaatttcatcttgggcggttcaagggatcagatgcaccgtttggcattcggcgagcaacatgtaagcctggacaaagaagctgacaattcaaagattactcgtaattcagaaatagaaaaatgggctgttgatatgtacaagtttatgagtaaaaaatatggtgaaaaaaatatcgcagcttttatagtacatcttgatgaaacaaatcctcacattcactgtacaattttaccaataacagagcggaataaattctcttggaaaatggtcatggctggacagaataaatttgaatacagtcaacgaatgacagcccttcataatgagctttcggaagtcaacaaaaagtattctcttgatagaggtgatagcatcgcagaaacaggacgtaaacataggtcaatgaaagaattctatgcacaaaaaagagaagacctaaagaacgaagttgacaatttgaaagagaatgttgctgatcaaaaactacaaatttcaaggaataaggttacactgtcagaacaagaaaaagcgattaagcatggagaagcaagattgaaaggtttgagtactatgatagctaatcttgaaagtcataagaacgatttattaaaagaaattgaaagattagaaaacgatgtcaaggctggaaaaattaccaaggaacaggcagatgctgaacgtgcgagaattatcgctgatattgaaaaaacaaaaggaaaaattattgacaaacaagaaaaacttgcagaagcagaaagaaagcttaaattggtgaaaggactgaccgagaccaccgaagaacgatataaggaaataaggagtgacatacactctattgcaccgaacttgaacacacaagccttacatgaaatgcaagctgttggctggaatatggcctcgatagaagcacaaaagtcttatagtaaatttaatgcttatcgtgagtctcttccgcaggaacagagagctgcattcgataaagctacagaaaacctttcagaagggtctgtcttcgaacagatggcagaaaattcaagccaagtgacgttggttgcaacagccctttttcttggatatctcgataaggcaacggccatttcggagagtgctggaggtggggccgccccaaaaggaggctggggaaagaaacccgacgaggatgatatggctttccggcaacgctgtttccttatggggatgcacatgttgaaatcgggtaaaaaacgaaatgtcaagcggtaacgccactacttccaaatccgaaaacttaggaacaggaccacagcgtagaatgttaccattttcattgacgagattttcagagaattgcttgcatatctcaagtattttgacgaattttgtataaaggttgtacatacaatggtttgaacttaacgttttgaacattaataagttactaaaaatcaacaatatgtggaactttttattcatgtttatcaacttaaattaattccgccaacgggtttataatgtgaagtaatatggataataagaattttacaaatcaacagcacaaacatgcgcaatccaaacaggatgctcaatggtctcaagtacaaagttttgtggatggttatagacaagcagtcttggacttcaaagctattctccaagagcaagaaggaaaaggttacaaaactcttaaagaccatctgtggaataaggttaacgaagactttgtgactatcgagactgttaagaactatgagaatagtcaacgggtacccgataataaaactcaaatgtatcatgttaggtttgtatatgatccaacgggaactcatcaactttactttgataaggatatgccttttattcctgtagtggggcaaaagttctattggaaagattggaacgacttagattccgcctttatcataggagaagtgcatttggcttttaaggatgacggattgcacaattttgatggaatttggtgctggtgtgatttggcaacagtaaaatatatgcagttaaaatgaacaagcaggaaattttagatacactggaagaatataagcgtttgggcttccaagaacagatagactatgaaaaattctatctctattctatcataacgcattcaacggctatcgagggatctacgatgaccgagatagagaaccaactgctttttgatgaaggtctttctgccaaaggtaaaagcattgaagagcaaaacatgaaccttgacctaaaggctgcctacgaaagaagcatggacatggtaaggaaacatacacctttctccattgacatgctaaaagagctatcatcaatagtcatgagaagaactgggacagcatacagtacgcttggaggaacatttgactcctcaaaaggagatttgcgactggtaaacgtaacagctggggcaggtggaaaatcatatatgaaccacctgaaagtaccacagagactaaaagatttctgtgaggaaatgaacgaaagacgggaacaattattaaaaaatccagatatatacgagcaataccagttgagctttgacgcacatctgaagctcgtgacgattcatccatgggtagacggtaatggcaggatgtcgaggttgataatgaatcatattcagaatgagtttgggctggttcccagtaaggttttgaaagaggacaaagccgaatacatcgaagcgttggttgaatcaagagagaaagattcatgtttgccgttccaagattttatgttcaaagaacatgccaggaatcttcaacaggaaatcgataattacaagttatctatggaagaggaggaaggggaagaagaacagaaaccccgtcgccatttcagaagataaaattaattaagggtcatttaggactttatcatccaagtgacccttaatcattctgttgaaaaagaaagaagccatcattgtttgggaggtgttctgttactctttttatgtgtcgtttgagagcctccctcctttttgaactccgtctggataatctttatcatctcttttacttcattcttaatccgatcaaagttggcttgtaggatgcgtgcctttgagtcttcagaatcgaagtgatagaatttcggaatgggataattttcataatcgttttcttctgccttaatctgctccatgtcaaaagaggtcttgcaaaagaacttggttgtcttgaattcttcggcagtttgaatatccatagagtcccgcctgccagttttcgtgacgacaaaatcgccagctgtctggccacataaccatcctggtctcatatcggctatttttgatgctggcaacaggctgtccatgttctcattgagattgatggatgtcctgtccctgtcaatggtaatgccctttttgagctgtactaccttgccgaaaatatcgcctgacaaccagtcgagcgtctcttttgctcgagcagaaccggaaacaacattacctacggtggttataatcttatcctttcccaccttgccataatctgcctcgagctgtggaagttcctggaagcctaacgtgacggcgaccttgttgcttctggctgttcctatcaggcggtctatcttgtggaaatatagagtcggcagctcatcaacgatgatacttactgggacattctttcccattccactgttgacacgggtaacaagacggttcagaatcaatgcgttcaatgcaccgttaatgctttccatttctgggtcattggcaatgagcaggtaactcggatgtcttggatcagataccttcaggtcgaagtcatccccactgaacacccagtatgactcatgggtagccaaacgggaagtctgtacacgtagcgttcctatcataccttcgagctgttccatggctccattttcataggctgtcatgaaaggacccagtagaggataaacttcggggttggttgtcaacacttcaaagatctcatcataggagtgatttagtaatgcgagtacatgtggcatatcagaatactgtcctttccaataagacggctgcacttggtaatccttgttacctatatgttttttgtctcggaagactcttcctgtcaaacgcttatgatgagtttcattatcctcaccatactctgggaaaagttcatttccattctcatcgaaaggttttttattgtagtttacaaaaaagaaaatacaggctgcaagaaagttggttgcggaagtctgaaagaattggtcagaaccacctccagaggctttctgccctttttgaagtgactctattagtgtctctgctgtttcttgtgcagctgccaaatttgttatgtatttctgctgaataggattgacacgtgcgctatattctatattgacaaagttgatgatgttgaagttgcaatccttgggtaggtttccttgtaattggtttattctataatggtaatatagcttttgggcaagagtcggaaacttgtagtcgtagaccaccattgcaaaaccttttttcgaatgttggcggatgtacggttcgatgacagagaacgtcttaccagaaccaggagtgccgacaacccatgtaccacggaatggattgacaatattgatccatcctttcctgaactttcccttataatagtaacgcatgggaatgttgacggaatacttgttttctacaaggttcgttgtttgtttaaaactttcgttctcaaaattgaacggatccttgagcataccgtccctgaaatacttcgacacgttgtcaagagcaacatggacgagtaccgttcctacgacagacagaacgatatagatccacatgttggatttcaagatccataacctgacgtgccagtcgaagttatagacaaataccgatgccgctacaaggacaagcccgaaggcaagggggtagaataccatttttcgagcatcgaactctatttgcttcttgttcttggtacctatgcaagtgatgattaccaacatgagcgtaaccatcttcgaatatggcaggaactgatacatggataatacaccaagtcggtgatggaaagtgttgacgattccacctaacccatgtagggcgataggatccagggcatacatgaagaactctaaaaggagcgatacgtatatggctgtcctgaaaatactatatgtgccttgtatttctttgctttcttccattgtttttaatattttacgctttgtgcatgtttcttccaagtctgtaggcagtcctttgttacagctgccattttacgtggctggtattcctttcctgtaccttttaggtcgtaccatgagtccattattgtagtgtaatgaaccaaacggcttaatgttcggagcttccggttgagtgtccgcaaattaacacgtattttatccatcactttgagccgttcgaattgtgtcatctttgcatttttgtccttgttcttcttcagtggaagaacctgctttacatcggctgcgagtttcaaaccttcttcaataagatccgtgtaaattttattctttgaccttgatagggcaaccgccaaaacgttagcaggctgtcgcacgactatcccttggacaaccttgagattcttccgtgcttcatccacctccatgtaaataccatagatgttagcagccacagtcaggatgtcatcaaactggttcaaataattattgaactgtcgttggaagtttgttgtagcagcaacttcttcgttcagatatttatgccccgtgaggttcgcacacaacaaggcatcctgtgccattaaagcctttttcgcttgtttggcataattataaaacattgtcgccctgacaggatcagggccactctgcgcaaataggcttggtgtaaaaagaatagctacaacgatgcctatgaacttgaaataaacgctctttattgtccccatggcttatgtgtttgtctgtatttatagaatttagcaacattactgatggctctgcgcattcgcttggatgaatcttcggccaacattttattgctcttgttgatttttccgctaattgctctgttccacacgtcatcaaaagagtgtacggttatactcaccgaaagcctacggagctttctgttcaaccgctctaaattatcattcaagttccacacgagctgtgtcctttctgctccgttgagcatgttgccttctcctcccttggcaagtatgtttttcaaaatcctgtatgtacggataaactccgctgccgtttccatatagagattattcatcgacacagaagcagctataccttgcggattgattctgcaagctgtgtggacttcccatagtgcggtaagcgtctgtaatccatccgcatagagcgtagtggcggcttttatggctgaagcataacctgacacagtcttcaaataagaattgtatttactttcccattctttcatcttggtattggcacgtgtcatggctgcctgctctatggcaagggctgccatagctcttgactgtttctttatctgactggcaagacgttcctcacctccagcaatagctgcgtattcaagcggattggattgcgttagtccctgtcctgatgctgttatagctcctaaaagaagaaacataaaaattgaaatgcgcttaaagcctgtttgtaatttcataaataccctttcttttcttgttaaattcgactcgttgacgtatctcatcgacaatattcatccttgccttaataccaatcatatccagctgtggattgtttctgtctccagaatagatggtgatggtcttcagtccaaacagttgctggggcaacgactgatgctgccgatagtcgacaacacgataaagctcgatatagtccgttgaatgcgaaaacaacccatgcagagtgattaactgttcccctgtcaggacatattcgatccttgccatataaaccacttggaaaaacagatagaaaacaagaaacaatgctggccatatgaaaaactcatggaaacgaaactccataaatttgcttatccaaaaacttgccaggcacagcaatatcccaggcagctcattgatacagaactgcccccagtggggacgaattgttaccgtttggaaaggcataaattcatgattgagcatatagcgaatattgtgagtggttaaatacccatacctctgccttcagatggacctcttctaagctgctcattctctgactcgtaaagagccgcagaaaccgcttcgggagaaacaacgccgggcttggaaaatacgtttcggctcgcataaatttcaggacggaaacgtggctctgccataacagaaccaacaacatccattcccacagagacggcagcaaggatagcagctcccaagttaaagccgtgtcccgcttttgtcttcatctccacttctgggaaaatcttatcgaagagcttcattcgctgggtgtcattgatggcacggaacttatcaaaatctttttgagtaatctcgtgggaaaagacattgccgtctatgacggcggtcatcttgtacttcccttctattatctttccttctgcgtcacgcagacgctccacggctatatctccgacttcggttgcccttccatgtccaccgctcctgacccattccttgtttggtttcagattctccaaggactcaccgtttacgttagcctctccgttaagggcaatccttacgctttgacgcaattcagtcaatgtgggttggctcttgccttcagctaccaaaatcctttcgctcttggaaacgattttttcatccgactctgatagggctgtggctttgatatgttccgtatctttgaaaatcgttctgttcagagcatctgccatacgttcgttgtacttcttttctacctcggtttccagcgaatcttttatatcaacattctcggaataggaagatgtgcgtttctctgtagtagaaagaggcaactgaacttccttgacgactgacaggggttgttttttctcatcagttataggaatgatggtggaaagtagtttcgcctttcccgcatcatccgcattcttgaaagcaagatactgctcttcggtgattttgtatgaccacatgccaatatctttactctcacgcatattcagcatatactcgccggaaatcttgtccttgtaagccattgctcccataatggcggcagtgatgttgtcattaacaaggttgtaacgaccgcccaatacggcaacaccgttggcttcttcaatccttccagaacgcacagggtcctccaaagtaccattggaagaactctttatctttacttcatcaaatactttgtcgaacagcttcagacggtactcgtcattatagttgatgaacttaatgtagtcctctttggatatgtcatgtgccatgacttgattgttgattacggcggtcatacgaaacgtggttgctcccttgccatcattgacaggtgacacttgaatctcaccgacagaaacagcacgtccgtcctttactggaagataaaaaccttcatttggattaaggacacgcccatcaacgacaccgatagagttccagctgtctataaagccgcttcggtagtcctcacgcatgtctttcatatctatgatatcaagtttggatgccatatattgattggctacctcctgatgaacccctaattctttctccacttctggcttcagtttgatgtctacataatccttgctgttcagcatctctatggttatcctgtcggcaaagtctttccctatgacggcatttaatatggcgaggcgttcattcacggacacaccgtccttgttgtgtacgcccttcttatcgctgtacttaaatttctcattcataagtttcttagtctcatcaagatttaacttatattcgagattggtaggaacggaggcggacttgatggtcagcaagttatttttttcgtctatgacaactccgtgtgaagacaatacttgttggaatttctgggctgacatataaactggcgaactgatggagtcaaggggtacagcctgtcccttcggtctttcaaccttgggcttctgctgttcactgatactcatggactgaagaacgtcctgtttctgcttcacacctttgtcatagaaaccataggcaccagttttcatctctccgggacgcaaacgtccgtcaggacggtctataacaacaggtgcgctgctggcatagaagggtctgtcatctatacgcctgatacgtccaccgtggacaagtcctatcaagccatctataatattgtcaaaacgtccgtatctcggtccttcaaaggggaagaagaaatgtggttctctgtaaccatattctccatgagcaagacggtgtccgtcaagtcccatgttgatagggctgttagcattgcgagcagcaacaaacgatccaggaatgtaataatcctccttaacgatgtcaacaaaagtattgtaggctttcttatcccaggcatttgtcccactgttcatcaggttctcaacctgctgctggttgagaggatagcgtcttggctctgatgaattatgcgacaaagtgacaagctcatagtcacctgtctgtgtcatggcgatgtgcgcttgcataccgttggcgttgagagtgtcttgaagacgctgtgatatatctgtaacgccatagttgatgttttttcttaaaatagccatattcttttgttttagtacttcttatttttgtctataaaggataacacaggtgtgacggttggcagtataaggcttgtaaagattgataccacctctgcttgctcccgtcattctcgacttaggcactccagcgtttagtaacagtttggcaatataacggcagcgtttgatggccaatcttctgttatgccttggtgaaccagtcttgctgtccgcagcaccgacaatacgtacgtccaagttatactccttaacggcagcggcaatctctggaatattgactaactgttgcctgtcgacaagttgcgtggtattgcgtttgaagaaaaacaaaataggagcatcaaacatggcaatgttctcatcaacagtttcttttgtactatctgtattgcctgcggcaattctttcctgaagggatttaagaccgctgtaattgttgcgtggataggttaacggaaaccgtgacgattcatcatttacagcaatcaatcttttattcttagctttccagcccaaatgaccaatgcctatggtaagcccgatactccctgaaagaaggttgtcaccaaaacgccccttctcgccatatccatcaaaattctggctggctgttattccgtcaaaggaagcggacaaactgatacgttcagttaaattgtaacttcccaaaataccgtatgaaaaagcaaaggagttttccttcaggttattgtgccttataagtcccgcacctatataaggacttatattccattttgcaggtttctcgaaggagggtcggaagaatgaggatatattcagaaggagatcggcatgatagctgctaaaaggctgggatgttcgttggctatcaacgaacctaataccttgataagcgattctcgtgccgaagtatggcgagtgccatttacctatagcaaaatgcaaaccgaacttggttctgccgtaaaaatccgtgtgtgagacaggattacccaaaaatgatataaaaccaccatgagcggagacaaaccaattgtctcctaatcctgacagctcatatttcacatggctgtctatcggattgggcagggttgcggaagaactcacatagtttgcagaaacttcgtactgggattttacatagatttgttcattattaccgtacactacttgtgcatgggtgtcgtgacctacaagtgtaaggactgacaacaaaatgagatacttgttcatcatatattttattctttgcttatatttatattctattacagtctctcggccgctgcatcatagagatagagcttatgtttcatgataatacgctcgcatctttgtacataatctcttgccgtggcatacccagcggctttaatggaaacaagccagttatgaaaatctttagagctatattttctgcaccgcttgtaacgttcgcttaacaatagtcttgaatgatattccatgctggcttctggagaagcgaaattgcaaaacttttcgttgggacgatcatcatcatggaggctatatggcagtccactttccagccaatctttattggctttgataccgaagtagttgaatcctgcttgggcaagactgcttttcccccaacggctttcaagtgccatctgggcgaggatgacagaagaagggatgccgtatttctgctgctgtctcatggcggcatgcgcatacttcttgaaaaaatcatcaggagtgagaatgtctttttcattgacgtgaagtgctgtgatacattgcaactttacatcccggatataggtcaggaggttgtaggggtcttctaaatttcctcttaacctgctggtgatatggaggtgtgcgcctgtcgatcgaccagaagaaccgctgacaccaacagggtcacctgcatagattcgttctcctttcttcacccaaatttgagataagtgacagtagctcacggcgtagtcaccgtgcttcatgataatgtaattgccgctaccagaatcatagccagtgttcatgacataaccatcaaacatggcaagtacattttcatagcgtgcctttaagtccaaaccgcaatgttcctttgtcttaccagtaaacggatctttgcgtatgccgaaagcagaatttacctcgatactttgcaaaggaaaacttacactgaagtatttgtctatccaatagtcttgaaggctgttatctacagtctgcttttgtgcaaggacaaagagacaagatgcgctcaaaactgcaaggaaaatatgtctaagaaatataaccatcgtctccttttttatgcttacaaaagtaaaataaaccagtttaatagctggctcaaaaaaaaaggaagtcttatattaacatttcaaaaactgaaaaccccacaaatcagcctaaaatcgttttgaaaatgttaatataaaaggtttattattttggaaggcagacttttcaagtaacaaactatctttgcaaaaacaaaaatcaatgaatttatgaaaacaacttttgacgagaatgagattccgtacgagaaatttgcaagtctcggattgactcaagaaatggtggatgaccttcctgaaatagtgatgaaaaagatgcttggaggtcaatggactcctatcttacctatcagcgtagacttgggtgatggtgtacgaagatcaattcaagcccgcataaaacttgaaaaaagaaatgatgccgtagatataatgatcgctccaagaagcgaaatggcagacttggaggactttacgcccgaggaacagaatacgctccgaagtggtaaagttatcataactaaaatgccaggaaaggagcaatgtttcgtacaacttgacgataagacgaacagggtcttctatatcccagtttccttgatggaggataatttggcatcactgcaaaatgagctggaactcaccaatgaacaggtggcgcagatgtgtactgggaatattatatcggtagacaagcaggaaggaaaattcaccttcggacttgatttccttgctgacggatgtatcaaagtcgtcagtggtgataggaaagaatacgacagtgttgtttctcgtgagatgcctacatataatttcggtatatacggatgttgggtaaaagagtctgacaactccttcaaaaattatgttcccgaagaggaatatacggaagatatgcaaagggaattctatcatttaggagatgaaaactcacagaaagcggaacagaagaacagaggcatgcacagataatcttataaatttacaatatggcaaaaataataaatgagttaattgataaactcgaccgtgaggaaataacaaacctgcagtgtatcacaatgcacggtcaggaaatggtgaatacctataaagaatggtgccaagtattgggcttccaagaaggtgatgaagacggagctgaacaatttgtcaacgaattgcgatacggtgatgaacctgatgatggtgatttgcccgaagaagcgtgggacaaaattggaggatttttcaacagatcctcgaaagatacaaatatgcaccacaacacagtacaaaataaaggaaacggcttttcatcaatggatctttataataagtggaaagaagataataatttacttaccactctaaaaaactctgatgaagcagtgaagattacactttggagataccttcatgttgacggaggaattaaaacctgtgcaagatctatcaacgtgtccaaaaatacagtaaaaaaatggtggaatatccgttactttattgatgctgcccttgctgacggcggtcacgttcacccaataagattggattatgacaccataaaaaaaactatcatccaagcggttgataaggcggaacaaggataacaacaaattgtatcataagctgtattggaaggcggtttgcagggattgcaaaccgtctttgttatatcagcttttttgtgggactgacatttgactttctctatgctaaggctgattcgaggacttggcttgaagctgcatctgcctgttccatgatattctttgtgtattcggggttgttttccaaccgttctctccatatttgagagtattctggattggtcgcatcgaaacggcagctctggctgataataccactacccaaatgggaaactaaattctcaaagaggaaactatcaaggcggagtgtatcaaaatcgacatcacgggtgctttctaccattgcaacggtcaaatcacgataatagtcatcctcgatttcaaaactgtctttcggagctatatgtatgactttttcgatattgtcataaagggataggccaggagtgccgtcaaacttcaatgcgattttatagaaattgctggaatcaagaaactgatacccagctgttttccttcgctctgccgctatcatgttcaatttaagagattcataagaacgcttttggataatgggaaaggtggtttgggctatattgtacactcttgacacttctgtctttgtaagtatgaaaaggctctctgcgtcttgtaaaattccgagaccttttgtccttagttcgtcttctgtaataaagaagggaagctcaaatccctgttcttccatccatagcgcaagcataatagcattcgagcctgtaaaaaaggtgccattagcatctctgggaatcatcatttgctttgacacccaaggattgtcgtcattttcaagctgctttttgagtttggtgcttaataacttcccataagctcgataggcttcccgtcgcaacatttctggcgtatgccatctgccttttgaagaagatgctaaccggatatagccttctggtatggactttacaacttgatcgactggttgttcttccgctgactgattaggcatatccgtttcatcaacactcccatcaacaggctctggaatggtttgcgactctttttgaatttgccccgaatgctctcctgttccatccggcaatggctgtgagggcgcatcttttttggaagatattgatgtgggttcaacgtttgtggtcttccgactcacaccgtacatagaggtgatatgctcccacagctcatccaaggtctgataattgtcatcgatattgtatactgacaattctcggtagatttgttcaatattatcctgtaatactttttttacggtttcgtcctgtgttctctgaatatcggacattaacttcgcaaatagcatatccgaatgaacaataactgctttcagcaaggtcgctctgtcttcagaagagagtgtcacggttttcaacgtggcattgttgaaggcgactatcgtatctgaagcctttgccacaacacggtctattcttataccttttatttcgcaaaaaggatgcttcatagatgataatactttgtctccgcaaaattctttaccgaatgccctgacaaaggtcagcaattcccgaccgccatcttgctcacttatggcttccttgatgtaggtcagtatatttataaattggtaagatttactgggcgtaatcaaacgggaacttctgtctacgaaaacattaggatcaaagtctaatacgatcgtttcacctgaaagcgaccatgctattggataaaaattcttcccatcgatagagctgacaccaatagaatcgttggcagggaacatgccttgacaaatattattttttttcattagggaaactgattctgcaaacatttcctccgccatatccctcaccttggcttcttcgttccattgatgctgctcgtctttatcgagagcgattattttcttattttcaatcagtgatttgaactttttgtatgggacggtttcttcagaatcatggtaatggctgattttgctataatgatatagagataaagctaaatccataccgggtttgtcgacaatggattttacccaaataaactgtttgctgccgtcacgccccgtttcctttgtaaaaaggttgttctgaagacttctgcaagctcttgcgtctatcatccttacaaagtcggattctaattcataaccttcaagctgcaatcggcatagacgatcggcttgttgatctatgctgtctggagttgcccttgaatctatccatgtactcatcaacccatcctgccattgaacaggagggaaaaactgcgggtcgtttatatcttgtcctttggactgcgattttgcccaaaggcttttctccactgcccaactttgaagaagggtgcattgcgcacgattcttcgacaaaaaaataagttcttccttggagaaaaaatgattgggcggaaaaggctttaagttgccatgtttttgtccttttccactgtctgttttgcttttgttatcttgtttgttgctaaatatcctgctccacccacttaacaaacgcttgttgaagattcctgatgggttatcgctttcaatcatatacttgtcagagtttaatatggaataaacacactggcttataaagaattgattgtgtcaacactctataatgccagtgcttatgtaaaatataaaattatggcggctattctgtatgtgtggaagttaactcccaaggctcaacactgcttgtacggcattctatgttaacattgccttgatatatatggaataacaactctcccttgacttccacataggcatcgggcttgaaaaaatcctgctgtattggtttcggtacaaggaaacgaacccaaagccagccacgtttttctccatccttgtcctgcgacaccccagaaaaagtttgaaacttgtttccgtgcttgttggttcgttctgttatctcgccttttatcttgcctttgaaatcaatagaacccttgagtgagtcttcatcagtagactttacaatttctatttcatcatcagtacggagattgtaataggttcggtcatctattcgcctgatataaagcgtaccgctaattcttactctacgacccgtggaatactgctcaacagtgtctttattgcccggagcggaaacgaaaacctgaagctcggctccgcttccatcgctgccggcaatagggatggtgatagtgaaggaaataaaggaatgaccttccttgttttgcttttcaactgcagaattacttatgattccacaggctgtaacattgcatttaatcatatcgataattattataataagatagttaagctcttttgatgttgtttgcttgttgctcttctggcaggtcgctgtcgaaattcaaagaggctgtctgcgcaagttgcttgacatcgacactttctctgtctcttctaatagaagcggcttctttggtctccttgttttcatttgcctctttggacgcttgcagatctttcatattatcatctccctgcaagtcttgggcaagtgttaggatgcccatgaaaagagatgagataagattggagatgggattgccaccgccagaaagccctgcactgtcaccatttttattcatcaagtattccaaccatcggtcaggatcgtcggaatttgtgatgtgagcaagcaacatctgcatctgggaattatccattggggattcccgtatttctgaaggcgcattggtataccccatttgagaggaatagcgtgtcatcaagtcttgaccgcccttattcaatgtgccggggaggttcccacggaatgagagttcggcaagatattctacaggatcatagctttgaagtgtaccctgtgcattatagaacttggtctcaaaatgaagatgtggccccgtggagcgtccagtatttcctgaatatcccaactgtgttcccgcattcaccgcatcaccgacttttactccgatctcgctaaggtgcatataagtgcattgaaggcgagtaccgtccgttcgatgatattctaccgtaatcatattgccagctgcaccgttgttgggtttaacggcaatgactgtaccattgtcttcagtaccgtaaatgggaagatacctaccgttggtgccaagatcgatgcctccatgatggtgacctgtgcgtttctctccatattctcccgttattttcaaaccttctaagttaatgggcatgcaccaatttccttgtaagggtgtgagtgaaatgcccgagggggcaaccttcgtttgatcaggttgctgacctcgcatatatcccacctgcaatccatgctgttgcgcctgttgaacggcaatacgatcaaatctgtccaaaccatatccgctgataatgctttctatttgagatacgtagttctttgcagtggcataaccaccagctttgataccttttgcccagcctaaatgatccgtactgtcattgatcgggcaatttcgcagatagcgttgctgaagcaatatggcggaatggtcactaaggctttgagatacgttatcgtatgaccgaaatgcttcatggggacggtcatcatcataataacttactctacctgtccaagacgagcctttcttgattccgaagaaattgttgtcgtgaagagcgagagccgaggttccccaagaactctcaatggccatttgagcaagaatgacagaggaggggatgccatacttgacctgttgctccatagcatagggtgcgtatctggcaatgaattctgaagttgatatggccatgtttttaataatatgtcatgtcgaatagttactgaatttgttaattgagatgaagggaacgtactttctgtttgagattggactgattctcttcttccttttcggaaggtgattgtgaagttccttcaactttattttctttcatatcggattcctgttggccattctcaacagactgctttccattctctgcagatttttcggtctgcacattttctttcagaaaaggggcgaaagcaactgctgcaatagctttcttgtaggcggacatatcatccgccagccacatcctgtcccatcgctgtttagaaatttcctttttcatgaattttccgtctacagtggccatgacatattttttgtcgggattttccctgtctttagtgatggtaggacgctctattttgctgatgtctacattgggaactttcggcatgataagatctaccttaatttctggatgtgccttggcaacagcgtagtatttctgtgcaagggcttgatgaatttcctgctgcctatccgttcctctgacatcgaagtataacttcttatgagagtcattgggataaatggcgaacgagggttctttctctgccttgaagaaaaatgcccattgtcctttttcgtcacgcattggcgtaaatatttcaatctttggtaaggctgctgctgcaatctgcggttttacatcaatatctctatgctgactgaactcatattgtttcaaccgatctacggagacggtcttatccttatagtagtcgtcaggctctttgagtcctaaagcaccaccggcattatagaacttgacatcggtgatgccctcgtgtcctaatgctattttgatacgatctttgcgaatgcccgagatctctacgttgtcttcaagagaagctccttcaggaagaatgacatcggctgaaccttttgctgtatctctgacaatgacgatttcttttgaatctatatctgggagcttagacaagtcggtggaaatctgatattgcctctcactgacggccaggtcttttaggggcaaatccttacgaatttcttcgtacttgacaagctgcttctgcatgtgcttatcgatggactcaacggcattgttgacatctttctccagcagtcccagcagtttgggattttccttgatctctcgtttccaatagtcaatatgttgcatactttcttttgaaaggcttgcaggaagtccctgacgtgccatcagaattccagcagagaggtcttgaacaaatctctcgtatttcgcatcatcgttggggaggagattattgcgtcccatgcggtctaaacgttgctcgctgcctgtggctgctacaatggctcggtaaatatcattggccttcgcaatggcagcctgtcggctattaccgctattcttatccatcataccgctgacaataatcttgtcagcttgcttgtcatattctgcatcttgcaacaccatgacacgctcatagccgatacctgcggatttggctactttttgggcggttgaatatgccttgttcaacacatccttttcattggctactctttttatgagttctgaactgtcaaggttgtcggcaacaacaacccactgcttggcttgaacgagctttggcagatagtcgtcgattctgtcaagtggaaaacctgtggacttgattttttgaccattgacctcagtttgacctactggtaaacctaatattttacctgctctggtggcatcattgccgtaaatatgatactggttatcgttacgcgcaacgacaatggctgttggatggttggatttaagtttttcggaataatttatcatatttgtcacgccacgttcggagagttcctcatatttggcaccagtctctttcagtaaatcactgtacatttcttttcctgtcagggatgtttggtcgatattgaaaatctgctgggtctgacgggtatggtgtttgacataaagagacttctcatcctcgggaagtccctgatattcccccttggtgataacatctttagtagcaatattctggtaatcccaacgagtccaattgaaaggaagtgctttctcattagttttgacagaatcgcctacattcttcagttcatcaaaataggcataaacattggagcggtaacccttctgatcggactgaaggttcatcatcagattgttatacggagtaattggtgtctttgcccaaagaaactctgcgttgctcttaccagccttgttcatccaaattcctttattgcctttagcaagctctaacgcaccaagcagtaaggcggcatgtaagaagatctttgaagtataaccgctgtctttttcctctcttctattctcttcttctctacgtttctgttcttcaacttcacgtcgacgctcatcttctcgagctttggcagcagtttgcttggcttgttcaatcttctgcttcttttcttctacggcagattgctgggcttcggcaatgacagcagctttcttttcggctacttctttagaaacgtgtcctccttccatgattttctctgcaatacctgctacattcgttgcagggttactgtcttctgaaagggaaacgttctcctgaacttcctcgggctgtgaagtttcaggccaccattttgcagacaaattattatattttacataatctaaaaaggcaacggcactttcttctttttgactgtcaattttatgctgattgcaataactgttatacctctcttttatcccttcaagaggaatcatttgtatatactctaatttgcttattgtaccataagccaccgcattttctatttcaaaaacagaatatggttcttcttgtggagatttatcaagttcttctggtttagacaaagatacagtttgggcttcctcgtgtttatccgtgacagtgtaggctgccgtaatcttgcctgactctaaaatgtctatagcttcttttactccctctttaagatcgtagccaaagtattctgaatttcgtactctattttttaatgtggatatagcatttggtattatgccttcttcaggtattcctttggaagactccaaagctgaaagggcttcaaactctccaactgagagaagtccttcctgcttggccttgttaacttcatctatggttttccagctttgcttgtcatcggagaaggataaggtaatttgctgaccttccttttgtgataaaactgcagaaaatatataggctgctgcaatatcaacgcttttacttgtgtaggagctttgcatattgacatgtgtttcttcttttggcattgcatcaacccatgcagagagtgtatcgggaatatatcttgatacaaggacttctacgagaccgtcaattttagctgttaggcttttctcaccccattgatccatatagatagtgccttttacacgtggaagaatgtcttcaacaccattcaatagtgttttgccatattcttctgcagtttcctgataggtaaaatctccatctttacctttttctttttcgtaagtctcccacgttggaatctcacgagtaaatggggcggtagatacctgagctttcatatcttcatttttttgaggtttttctttggaggaaacattttctttcgtttgggcaagctctccatcaattccttccaaattgccagctttcagaggcttttgattcaatgctatacgctgttcgtcaatcttgtcaataatcatatcagaagccttgcctacgtctgtcataatggtagaaatggtttcaggtttgccctttagcctatttaaccacccacttagatagttggcgttgttctccagaatctttctatcaaagcccatcgtactgccaacaagggcagaggtcatttctgcgatcaattcctcatgagcgtaattgtccgtgccatgctgaccgaaacttctgtcaagacgatcctcgtgtcccgttgaatgagccatttcgtgcagggcggtggaataatattccatgccgtcacgatagacttcctcgggtgtctgcccaagtttgaactgtgatttcatcggaagaacgatggtgtccgttgacgggcgataaaaggcttgctcggagggtttgtcatattgtattttggcataccacgccttcgtctcaaacatacggtcaagagcttcgtttacatacattccatctgtgtccttcacttcttgttcgggaactttgaagcgtgccacaatggcatcgtactttttcttgttgacttcttcaaggttggtctggtctatattgaaaacgctgaaaactcttggaaaaggacgcacgaccagcttggaacgttcttcctttgacatcgtattatagacttcttcagagattttattcccatcctcgtctttgatggatagtccccacttgaagactggaacggacttttcaccaggtttgacttggagattctgatccttggcttgaaggaatgtcatatagacaggtgtcttatacccttgctctgcggtgttgaacatgagaaagaatgaatttccaccagaatacgtccgtccgctgatgttttgcggcaaaccttgcacagaaccattgatacccatccagcctttcttccaattgttggctttggctgtctcgataattttaaccatcatgtccgcaaatttcttcagaatttcatcggacttattttttctctttccagaataattggtttttttgaaatctctttcggtcattttcgtaaattttgatagttacaaaataaatgacttaacagcaaataagcatcctcaaaaaaataaaagtcttatattaacgttttcagaaccttttttcagacttggagagttttttttgttaaaaaacaacctccatttttttgataatccaataaattcatgataatgaccgcatcctgcattttacttcccttttattatctcatatatatggcaaacgtctatataccataacttgttaatacgaatagaaagctaatgcgtatatacatatatacgtatagacagctataaaactatacgactatatattgatgaaggcaaatccattgaatgatctgtcttcacttttttacttgaacatttatctaatttttatttccgtttctgccttcgacctcactttccatcacctttgtagtcatcatcgacttttatagtgcaaaggtatcatcggcagggaacacggcaagtaccagctgaaagcctattggcggaaaacttttcatgaccctccgaaatcaaagattgcggtttcctgaaaactttgccaccaattccttgcctttcattccctttcatgccgacgatcttaccatgcacataaaaggttcgagatgacggttacaccggaataataaaaaaaagttcgggtcgaagaaacgaaaaatcctttaaggttgagaatcgggttgcccagaataatattttgaattataaacagcaggaaaaatggaaaggaaacttatttacttagcatatcaaacagatgcttggcactctgtcgagacaaggaaacttgtttacattggtgagaatttggaagaaaccatccgtaagatggtagatttcctttcattaaccgaagaagatgcgaagcagcttagacagtggagacagacctcatgtaacaatagggactttgaagttatgattgaacgccagttcgtaaatgactttaccgtttaattcaaaacaacaaaagattatgaaaaaagaaaaacaaaggaagaagatgagctacaaagcaaaagcaagagtaaaggttattaccgaagcgggcaaatggtatttgaccgagattaagggactcaaagagggaactattgttgagggtatatacaaccctctgaacagggcgttcgacttctactggaacggtgagggggcaatgctttggattggcgagaatggagaattgatagacgaataatcagataattaaaaataagacacaatgaacatttttacaaataatgcagatttctacccaactcctgacgaggtgataaacacaatgatgatgggagagaattttatcgggaagacaatccttgagccttcggcagggaaaggaaatattgttgactggctcaaaaagaatggagcaggaaaggttattgcttgtgaaaaggacgctaacctcaaaaaacttctgaacggaaaatgcgaaatgattgcggatgacttcctgaccgtttcttcagaacagatcagccatgtagactatattgtaatgaatcctcctttttcagaaggagcaaaacatattcttcatgcgtttgagattgctccagcaggatgtaccatcattgccttatgtaacagcgaaagcataaatcaaggatgggaacgaaatacaaccaaggagaaattgaaagaaacaattgatctttatgggtgcgaggaattcttaggtagagtttttgataatgcagaacgaaagacgaatgtccatgtgagtatgataaagttgtataaagaaggtgagggacaggatgaatttgaggattaccttttttccgatgaagacgacacactgaatgctaatgagacggaaggtctggtgcaatacaatgtggtacgggatatggtaaaccgctacgttgcagctgtaaaacttttcgacgagacgatggctgcagcagagaaaattaattctgtggcatgttttggcggcaacaaggatggatatctccctgtaaggtttgctgtggttaatgcttccaataatgttgtccatatcagccgacaacaatacaaaaaggagttgcagaaatattattggagacgaatattcggaaagctgaacatggaaaagtatgccacacagaaattacgggaacagataaacaagttcgtggagctgcagacaaatgttccttttaccatgcacaatatttatcaggttctaaacatggtcatccaaacgacgggacagcgtatgaatactgcaatactcgaagcattcgacctgatttgctctttctctgacgaaaactctacggcaggggaaaaatggaagacaaacgcaaactatatggtcaaccgtaagtttatcgttccatacatgacttcctatgaccccaaatggccgagagactatctttatcttgaatatggaggtatggcaaacaggatggaggatgtttgtaaagctctttgtttcattaccggtaagaactacgattgcgttggaagtcttgactattttgtacgagataacaaattggtatggggaaagactttcgagtggggtttctttaggtgcaagggctttaagaaaggaacaatgcactttgagtttaaggatgaagaggtgtggatgaagttcaaccgtgaagtggcaaagcagcgaggatgggtactgcctaaaaagaaatgtgtataaagcaaatgtcagggaggttgtaaggacgacctgcaatcttcctgaatataaaaaatattctgtctttcggaattttgttgcttgtttgttttgtgttttgggaatatcttcatatctttgttgcgaaaaaagacaatcactgatatgagagttatctcacaaaagaagatcaaagacttctacgagcagccacaatacgaacaggctaagatacctttacagcagtggtactacactgtaagaaacagagaatacaagagctttggccaaatactggcggacttcacagacgctgtgagagaaaaaggcttgtatattttcagtattgatgaaggcaactataaaattgctacttcgatatatttcgacacaggatgtatatatgtgaggtttgtggcatctttagctgactataagactctcatcgatgagtggaatgtgacagtatgaaaatatcaaaaaggcaatataagtatgccgaaagacgggtcgaagaattgttggagatcgtgacggatgcgacactgccgacatcgccagagtacatggaactctctatcatgagctgtatcgtggaagaatacgagaagaaacatcatccaatagagaaacttacgctcgccgaagttataaaacaaggcctgaaagataagggaatgacacagaaagaactatccgaggctgtagggcttagcaccagcaggataagtgattttacaaaagggaggagcgaaccaacattagctaaagcgggagaaatatgcaagatacttgatattctgcctgaagctatgctaaacttataaataagagggaggaatggttatggcatttgaaattgaggtcgacagagaacatatcgagaacactttatccgtcacctatacgatgggacagataaactcatatatggagatcattcgtgaacttaaggaaattccagaaaacgatgtggttaacatcaaagagacaatcggaagactgcaagacagaatacaaatgctgcttgcattaaacccaaaagcggagttggaattgaaaacttcaacacctgaagaacttaaaatataacaaggaataaataaaatgtaactaaaaaaagaaaggaaacgtactatgttagatttgatagcatcagccctaataatgggagtaggtttgaaagcaatagtcggtggtgatactggccgaaagagaggaagaaaaaatagcaactataaggatgctatggggtggtcgcacgataaccacaaaaaattgttttaataaaattattttagagagtacgctttaaccagtgtactcataactttattacatataaatacgatgaataaactgaaattatttattgctggcatcatgatgtgtttagcaacaacaggcagtgcacagacgaaagcgagtacccaacagaactactatctttatgcttctattgaagtgcgatgggcagataaggttacaggagagcagtgcttcgttattcttatgtcaccaggagaaaacggacaacaacgaccaagtatcatgaaaaataaagaagggaaagcagttgtagttagaaatatgatggaaggtctcgcatatttggaagtacagggatgggagatgcttgaaccaagaaccaatgtgggtaagtggattgttagacgaaaggtttcatttgaggaactgaataaattagttaaggagaatacaacctatgaggaagttacgccaaaagttcaactatccttaaatgaacaaacattaaaaattgattacaaataaacaaatccccgctatctgattttcatattttcttatagttttaattgatgcaagaattgaatatttacgtggttattaaagatttctacaattataaaagaacaaagtcaacaatgaaaaaagtattacttcttacgtatctgatgctaatgtccattggtctacatgcacagaatgaaaccgttaccaatcagaccgtacttgatttgttaaaagaaggtttttcctctgaagagattatcggtgctattgacaatagttcaactcgcactattaccttcgatatcaattttatgcgtcagctgaaagctgcaggtgctgatgctactctgacgacatatcttcaaaagatagccaagaaagatatggggtacgagggagtgtatctctggaatgctactaatggcaagcccgaaaaactctatcgtacaaattttgaaaaagaatcgaaaggagttaattttggtgcgataggcgctgcagcacttggcacctatgttgctggatctgtttttggaggacacattccaagcggaggagaggctgctgctgtagctgcagggacaagtcttcttatgacatctgctaaggatatcaagaagttgatgttgcctggcactaaagccaagacaacgacatccacacaacctgtatttagattctattttaatcataattctgatgatagttttaagcagaatggcggcaatttttatgagcttgtgatgaacgatattatgagtcccaacgagtttcaatgtgtaaagatgacggtgaaagccaaaaagaaaggtggcagaaggatattccctgataatatgagttacactgtaatgggctttgagggaagtaacgcaagttccagagtaatggtagatttcaccattaagacaattaacaacacaacctttgaagtgtcttttcctcaaccattggaaccgggagaatacgttttcttctataagaacggactcaaaaatcagtattttaagacagctccttttggcttcgatttttctgttgaatgatttgtgataaacttatagatagttatgtttaatataggagcggtatttaagccgctcttttttatgtatgacatgtgcgtcataccaaaaatccccaccgacgcaactatctacgccagcagggatcgctaacaagtatttaatgtaaataaatactattttattccataagctctttgttgttcttgactttctaaagaagccaattcacggtcataagtgttggatgctttctcactgttttcatcatactttcttaaaaccgcatttgctaacgtgttcaaaggtatggcttttttctcatatgcgtcaacaacagtgtcggaaatattaatgacaacaggtcgattgtctatgtccgcaatcaaggaacgtcctctcatatagacattgttcagccttggattgagaggttcatcagcatattgcttgtaatttcttgaaatagctttaggtgcgtttgcttctaatgcctcgtgaccagcattattcagaagattagctcctccaaatcccatcagcataagccttaacagcggatttcttgtaaacattcctgcggcaatggcagccaaaggtaatatattgtttcctacggtaaacgatgatgtcctgccagtaaacataccgataagcatatcaggaagcatcgcaaaaacataccctaagttcttggttatatcactaaatccattcaatcctgcatgatctaaatatttaccccatcctgccgtttgggacgtattgaaagaaggagaagcctgtgacatagtatctaatgtttgctgcgatggcatggagaaaccttgggatgtactggcgtttaattgagcggaaggagtacttgtgcttgaaataacgggctgtgagacggagcgaccagaagcatgtgctgtgatttcatcattatttgttctcgactgctttggctcggggtgattcctactggatgccattactcttgcagcttttttatccgcattggccttgtcgatctgaacggcagctctggcataatcattggcacgctgggctacttgtgcaagtgtcatgattttgccgttcacattccacacatgtaatccttgtacagacatctgcttagcaatggaaaagaacgaggtagcaaaagcacggcattgcttggctgtcttattcagcatccatgctggtatgggcgcatgactgttataaggcatagcctgacgatttaataccgcagtaatcgttttcaggagttttcctgaactcccgtttgccgaggataagagttgtcctgcttctttttttgttactgcgttgctcacatggggacgaatcgtagcaaccttgattttcttgaccaaaccgtcattaacattggaaatatattcagtacctgttttcctatatgccaaggctcctttttgatgctttcctaatgtggtctcattgccgaaaaccgcttggctgtattgtttcttggcagtgtcaagattaactttggaagaaaaccaataattgaagccggcatctgccatcgtgcttgaaatcaatccttttgcataagaagccctcgttgccactttgtaagcggatttttctcccatccaagtcccgaattttaccgcaccatttttcatggcatatccagctactcctttcgctgcacttttcaagggaacggcagctacggtaccaatgccgtccaacgctggagcatccattgcggctcccaggacaatagatccagctttctccatttttgacggtttataaattctattacccagctcgtgaatttcttcctctgaaggagagaggtctcgaccacgcataaacctgctacctaaactcataaagatagaattgtttattccttccttcagaatgtattctatggaggacttgggcatgtctgtccgagccaaatgttctttgagcaactccatgaagcgtaactggccatagtgaatagctggatctataaatttctgaccttcggttttccccaattgttcagcaacgtgaagatagccttttgttcccaacttggcaatcagggattccctgtatctatcaattaagtttccccaatcattctggaaattcttgccggaaacaatcttcttaacgacatcgtttataaaagcatcgagattctttttactccacttcccttccgatgcagctctcacatttgcagtttgtacacgtatcatgccctgaaaaacggagcctgcaccaatgatggctggtgtcttattgtaagccttatagaactcttcgttctgcttacgatgataatatctgtaatccttggtgatgacgggggcgcaatatttactgaagtactgattgaagcaatactccagctctccgaaatgttgatttttatttgccatacgatggagttttagattcccaataactgtttacgtgcctgctcgatggctttgtgacaaacgttcatctgctttggatagaaacgtgcaagccaatcatccaataaaatttcatcattgatgaatttcacagctaactgacgagtgatctctattgctctctctcctctttccctgccattgaaccacgcttttgtccaacagcgtgtcccagttgtgtcgaaatagacggatgcttctcgactgatgtcataactgtgaatatcaatttcaagattttccaaaggatcgagtgtcaagccgttttcggcagcttcttcagaaagttttttttttgagattcatcccaagattggggatatattccttgacggactgccagaaatccaagaaaatcctcgattaggatttcctgaattttctctatcaatggagcactgcgctcggacagacctaagggattacctaaattgggcattgtttcataaaaataatttttatctgctgcttttgaaagaatattcctcaatgacgcttccatctttttaggaggtgtataggttttcgttcgaagctcattcatgtaggtaggaagccagcggagcatcagtgtcatgatctcattctgactatcgtcatacttggtggaaattttcctgtcacccaaagcctcggtagtaggctggcgggtgatacccatggcagccagctgctgtatgtttgcccaaatcatggcaatgaaattttcaggatcaagtacttttccgttaaatcgcacttccatgtgtagaaaatcaccagcacgggcgatttcctgccctgcctttacatcagtgccgtaaggagtgtaggcttcggaaacgtttccatatgtaacttcgtattttccgtacctcgaaacaatatagttctcgtgaacggaatcatgtccagctccaataatcataccgcttgcaatggcatataacggtttgtccttgacggcataatcaacaccttggtgctgaaatctttctcccgtcttgggatgggtttgctctccataaggaaggataaccttcagttcttctttctcgcccaaggaaaaaggcatcatgaagccgcttgccgactccaagagcatgtccttataatcttttgcatccatatactatacttgttagatttaatatatcatattccacgggagcggcgtaccactggttcttccgacacaggcaaatcaacttgtccccgatgttgttccgccatcaagtctggagcgacagcatatctcggtagctgctgcacggactgaccttccgattgacgatgattaatgttgcgcagagtcatgccgcccaacatcatactggccattttaccaagccaaccaaaaggaccaaacatcatgtaggaagaaagtgcgagggacgctaaattcatctttgatacgtttccacccgtaagttcactggcaacagaatgcacaccattcatcattgtgccagcaacgcctccttgctgttgttgtaatgctggtgtcataccttgtcccatcatttggcttgttgacggatattgaggagttgtgggatcataataccccccgttattgttggaaaccattccgttacccgagaaataatgcccaatctgctccttgcctgtctcatagaggtcagccccttctccaaagacggaagcaacgccaccttttatgccttgatacagccctgctgcttcacctgcagcagaaccaatgccagaatttaatttaccataagtcccattgccgaaaagaacatccgtgagattggcgaccatgctgacttcattgccttgatcgtctactttctttcctaatgtcgtttcaccgagaacaccaacgagacctttttgtgcggcatcatcgccacctatggatttcattacgtctggcaacagcgttcgtccagttacctgacgataggcaactgaagatagaataagacttgcaataggatgattagcagagtatctggcgtactgaccagcccaacctgcagtcttattgatgactttaccgccctctctccagcctgtcttggctactgtcttgagcgattccttattgataagagctgctcttttggctgtttcttctgcaacttgttcagccgcttttgcggaatgagcaatgccatggccagaggccttggttccgtcaatgatgacacgccctgcctttggggcggtcttggctcccaaatgctcggcagtcttaaaacctgacttggacttagacagacttttctcccaatttttgaagccggactctaccttagtgacctttccccccatggattctatccatttggtatagctggccttgctggcataacgcccttccttcatgacagaattagccaatgctttgccgactgttttctctgcactttcagcggatttcgctgctaatttgacacctaccttttcaagcggcttttccgctgcctttactgctgctttgccaagctcttttatccatcccatggtcgtttgttttttagttagaataattgatttgaatgattgctcgtgccttatgtttttccatcttaggcgtttcaatgatacccccgtttacagaggaacaaagccaagcctgaaagttcttgttttcgcttacttccgtggaagtccaataccaacagtcttcattcaaggctatgggtgtgccacccagcttttctatgatgggattgatttttctggcagagacattcaacaaacgctgctctgctacactgggcaggaaatcactctggccaccttcatgaaaagtaaagagcttcatggcaagtggactacccttctttgtttcggcattgtaactgttttgcattgctcgtgtgttggcggaaccgtcaaaagcggtaaggcttccactcgtgccattggaaaggccaagcgagtcacagaacactccgtccagttccttcaacataacggccataagcggatgagcatccgtctgctccgcaaaaacaacgcccacggctttttgcgatttttgggcaaaataaacgtctggtgacacacaactatgatcctcgcacaagatataccccacatgaatttcataatctgtgggttgatagacatcacatgagttcaggcctataagtacagccaataaagaaatggcatatactattttattggtgttacgtgatcttctatgtgaagattgacgatgaactttataggaaattcgcacaattctgtgagaaagtcttatgatgcgattgattaccataagtattttatatatattcatgtcaattttaatttatagtggaaccttagcaccaatggctacgccagtacggaacaagtcctccccccgcatcgtgacatcctcttttacctgaaagaaaatgctccagccatgatagaggttgaaggtgtgttcgtagccgagtgaacctacgccaacaaacttatgtaagtcactgccgccacttacaccgaccctgatgttgccatgatggttgcgacctcgtgtcacgcaaggcttataggcaaaaccaaccgtccaaatgttataactgtgccaaaaagaacttcgggtgacataaccagcttctggttcagtcttgtacttgatatagtagtttgcgaagtactccattgcattgtgataattcatttcatgctcataagccagtgtggcatcaaatccttgcggataggtagcacccatgccaaccattacatgattgccgtgtccttggctcatagcagaaaggtgaaaaaggcagataagagaaacaacagaaactcttggaaaacgggaaaaacgtatattcttaaagatcttcatgataagccttgttttattgttctttcaagagtaacgtgtcgaacgagtcggcacttaatacatcctcatagtcgagatgaagtgagatggcacgaccactaatctgtttttctgaaagttccaccgacagaaccttgtcattggggaaagtcatctttttcaagacaaccacattgcggtagccttttctgaaccttacagaacggtcaagaataaatgctggtttcaactcaataatctgaacattggttgacttttcttgtttcttgtcctcgagctttatacgtaactcatctatgtcaaatgggaggttggtcttgttttctacggaaaaatcgatgaaaaaatattcgcctacaacatagatgttgttcaaacgcatgatcatcttgtcctttttagtaaaagtacttcgatatttggctggagaattccatactttcatgcaataagaggccatatctgtagtagacatgctgatttcaggattgtggaaagcattgcgctctataagttccacttccttatccgaaacggcctcttggagacgacgggtgtaaataagcgcatattgtactctataacgctctgtgataatagtgactatacccagtacatccccgtcattatgattgccggtcttgggttttatacgtatcacgttatccaaaggtttgtcacctgctacggaatctgtagatatgtccaccaagcgtattggctcggaggcggtgatgatagtggatatgttttcgttgacggtcaacacctccatatccgaataagtcttttgagcatgtacccccaacaaaaaagtggtacacataacaacgactatagcaattttctgtttaaaatttttcatatcttttttttcttcttgttagcattttaatatctgtttctcttttcctgccgactgccgtcaatcagataaacgagcgtaccatacttcaattttaccctattcttgcggacagcttttcctacagcattcatcatatgttgagaggcattctgaacggcattgttggcccaacctttgatgccagttgaagaggttgtgttgtctacaatgttcgttccaccctgtgtggctgaaccgagtatctctttagtggtttccctgaaggaagattgcggaacgtaaagaccctccaatccgtccgtgtcataaatggaaaggcttacgttgataatctcatccctacagaagacgctctttacatttcctttgactcgctgttgactgaaaccagacatctgtgcatagaggtaggtacctttcttaacggttatgtcaccaatttccacatcatccagcaaacgaaggcggacacgacttccttcttgtgccttcacattctcgtcgataatagccttgatgagcttagactcttccgatgaagacgatagagtgttgaagtagtcggaggaagcctttactttcttgacaactttttcgggattgccttctgcttgtcctcctacatcacggttgttgtccgatgttctggaagaataagaggatccgttgtcatcgtaagatgtatttctttcgttccgagaaccatttgcaagcagaccataatcatcttcgatactgtcattattgtctacgttatcacgtcttcctcggcctgaagaagaaccgaaagcaacgcccgaaagatcctcgttcatcttgtctatctcacgttgtcttctcctacggtcgagacgtgcaatctctgaatcacttactggagcgacaaagttgtcgctcgaggaagagctgcgggaagcgtttgccccctttcgtacacgatcctgcatttccctgattctgcgctgctcatcaatcttggcacgttgttgcgcttgctgcctttgtaccatttcagcctctcgattactgtattgggaattataatcttcctttttattgatcgagtcaatgtcattctcaacattctcaactccagaaacatcattgatttttccatactcacgctcggcattgtccaacttgcctcccaacacgctgtcagtattggctgacggcagatcagagttcaagtaatccgttgtggccaagcgtgggtcgttgtcggacacgtctgtttctacggcatcaatgacgaaatatcctacaaacaaaaccagtggatatagtataaccggaaagacatacttcctatccttaaaatttattttctttacatccattttactttttgtttattgtacgtctttgatgtaatactgaatctacctgttcaacagctgttgtgcgccgttccttagaggcgttatagctgcgtaccatattgaaaatgttaatggcaaaacagccaattacaatgccgaagacagtaacgaggaaggctacacggtgacggttggccagaatttgtatcttcatgaccagccaactcaaaccactcttgtcggcaaactgtttgcctgcttccacttctttttcataacgctctctatattttgggtcgttcttgtctggcatagggtcgcccataataattctcttgaatcccataatattcaatctttaatgttagtaattggttttctgattttcggagagatctttgttgacaagagttctccagccgtagatgataaagccgtgtgggttgttttccgttcgaggtactcgccttagacttcctgcggtaatgagctgacgcatcaggatgctggtgcgacgctcaatacgttgacggccataataggtaaaggtcagcttcttctcgtctaacttaatagagtcacagaagatactgcatatcgtactcgttccaataatgttattataaaagcctttttccttcaaagcgttatattgcgcaagacctgactcatcaataaggtacatggctttcttgatggtataatcaatatacttatcatcaggagccaatgtaaagaacaggttatggaacatctccacgtgacttttggcttccacgccaaaagtctcatccattgtagtctgcttgactaaaacaggtacagtgccatcaaggacataaatcttcttatgagcatcggcaaccattcctctggctataaaaagacttccaaggctgataactatacaacctatcaaaaaaagacttgtgacaatcaatactaattttatcttgttttctaatttttttaatacagccatagctttatttttttagtggattctgggcatgacagacatggcacttgatttgacggaggatgccactccttctccaaagttacgagtggagaaagcggtgtctccttcaggtatcatccatgctgcaagatcgggaaccaagttgagacaccttaatgctactacggaagcggcaagaagataaccacaggacatgaaggcattttgtacataaccgttcattgtgttcacattcgatgtaatggcggttaggttttcaacctgaacgctaatcacaatatcaaacaacagcaggacataaaaacctacaaaatagagcatggctccatagaagtggacggtcaggtagcggataatccattttgcccacgccccttcccatttcggaaggacggagaaagcccattggatgggaccaaagatggtcaacatacccaataagatttgctgacagaatatggttgcccaccaaccgacacgatacagaacaagcgaaaagaacataacaatcttatctaagccgatgattagacctgcaaaaacagatgtctttttagctctggcggcatcttttaaaccatctacagtatctttaccagaagtgttttgacctaaaacatcaagacttgaagcattctgtagtccttcggaagccacttccacctctgctgccttttgatacatcgtgtcacgtttttgcaaaagtggcatcaactcgttgtatttctcactgacttgcacagcttccgcttcatataggtcgtgggtatagctgcctatacagttgggaatatatgccaaagcatccaagatgctaccactgccgccacccatgccagtcatgcttggagggtaccaaaaaatcatgaccatggcgatacctaatactttaagtattttgaatacatcaatgggttctcccttgaccatcatcttataggcaatgctggcacctacaatgatggaaaacaaggctcccaatgccatgctcatttgaaggatccaccaaaaaggaccctgtgtaccaataaaatcgggattgcacaaaaactcattcgtttgaaaaacaacattgtcaatgtcttcctcaaacaggtcaactcctattgtctgggataggtcggagattgtgttcgacaacccctgaagacctccttgtgcagctaataataaggaactgaatgtcataatttacatttttacttgttagcgtatattttatattttactttttgatttcacttttttgaaaaaccatcaacgcccaccgccgttctccaacggttcaaggcatcaaaagctactgtagagacggaggataaccgctggggtggcttgctgttttcccgcatttcctttgcggacttcatgcctttccatgcaagaagctgtttggtgagctggtaattgcgcctgacaatatctttatagatggctatgtactctttcttcttgcgtcccaaatcttgataggactcacgagtaaccttgatagcggtctgaagacagttataaatggtcttccacctgcgatagtcttcagatgtaccaccgtaaggcatgataagattgatattcttctgaaagatggatagtctgttctctatcttgcttttttcaactgtccatgctaagtcggtcattggactgcggtcaactatattctttgcctctatcttggcacggcggaaggtcacagaatctatgctgtcggcataaagtttttcatctgcgacacgagttttcatgtgaagacggaaaaattgcttgttcagcaaattggctgtcgattgatatcccttgtgaaatgcgttatagtagtaacggggagttaatgatccagcacctgtctccatcgtcataaactgctgcatgatgtaattctcatgatgttttgtgacttgcacatacccttgactgaatacggaaaggacaatcaactgcagcccgagtaaaaggatgattctatttctttgcatgataggtattcttttatgtttaatgccagcttctgcctccgatgattccgccaccgcctaaaggggcatgttggaatgagcgatgttgctccagacattcaaatgcttggatggagttaccaagccaacgccccaaagcatcgttggcaatatccttgatgcttcttgccatgaatatttcttttttccaaaaacccatccggacagtcatatatgcccataactccgtgtaggaacgtctgatgctgccgtctatctcatcaatggaattgttgatatcacccaaaatggtcattaaatccgaagtggtacaatttcttacaccagtcacaatttcggctaattcagagtaggacttccatagctgtgaagctccatgataaacaccctcgacggctcgttgactggctttgatgattatggtgtcgcttgtccagatggctccatgttggaggatttccttgttgtatgtattcaagagtgtataatacgctttgagattactcttgcaactattaaaactgttataagcatgaaagcctgtggcggttgagttcaaaatgaggttgataatattgaaacactttctatatttgtccaacttcttgttgaccgtggcgtaatcttccatagagtgcatactcttttcatgataagtaatcacgccttcctcggcaagggtacgcaattccaacatagccctgacggtcttgtggttatggatcattgcttccaacgagacggggtcggtcgggaaatccaatgccttgacttcactcggaataaatagaagacaaaggctcatcactaatatgtataccaatttattcatgttctctatatttatgctatgtcttaattttcgcttgttgtggtgttgttttgtaaagaggtacttgcggaagtcttcttggctttgtcacttgcatcgttccaccgttgcagcgcatactcggcaatagttcctcgtgactttcttgtaatggggttgaagatgtgattggtcaagaaatccttgatggtctgacgatcattcatgactttttccaaaagaaccagctgggaatagattaaactaagttggtattccacgtttctggccacatctaaacgatcgctggcccaaagcaagtgaatggcatctgggtcttcttcgtttgccaagttcttggcatagttgtatcttaccgaaatagaacagtctggcatgtcttccatcaattgcttctgacgctcgttgacctttgctgcacgctctttctccgataggttcacgtcaagtttcatagtctctatgatattctctgatgaaaaagaagcagagagtttgtagtcgacgctcaatatggcacggtgaatccttataagattccatccaaaccaaggtataagataacttggaggttgagataacgtgagagtggcggtgtaagttacctcactctttacctgtgcacaataagcatgacgtacgaaaatatatttattgtcaccattggtccactctccgtcatcctgccaggatagcttgtaaagcccttccaactctctcatgtttgcaggaatacgataaggatctccattgtcctcagtaagatctttataatattctgatatggcagtgtttatcttaccaagataagactgtatctgcgaaagctgacgttttgaagctgcctgatttttactaatggtttcataacgtgaacgtagctcggaaaccttgttctcatcatttgccattttggcttgttttatctgctctatcaaggctctcatctccctatccatggaacgaatttgctcattaatattcttaatatcggcttgatattctaacttctttttttgcagcatcttgatatcatcgttgccagacttaggagaggctaccatggcaaaattttttgacttgggatcttccagatgctttccctgattaccgttctccttccagttgaaggacccttctgcaagggtagagccgtcggcacagctggcggagaacacagcggaattgcaacctttcatcttgttctcatctgccattgtgtagtatttaggagcatcgtagcctaacttgtaaacaacttgctgagagggttctttgtcactctctaagctgttgtagtatttgagctgattatccattcttttcttgaaagtattctcatccatagactcggagtcaaacacttctgaatagacttcctgcttggaactccaagactccctgactgtcatgttcacagtccagtgcatgccacgccaatgcgctgaagatttccacatgttgccatctttgtctctaatgtaggaataggagtccatggcataatcaatagtgatggtatgaccaggatgttgatgctcatattgactttttcgagctgcattccaacctgtcgacatttcagcttgtcttttgagttcattatattcttgtggggaaagggtggggaaagacggtgtggtctttctttcaaaattctctttatacttccaacctgtccatgcggagttgtcattagtattcctcggatgcgaaggcttgtattcagcgagaattttattaccactatcttcggaatagatgtaccatctttgtctatagtgttgcccctttaactcttttacataattgctgatatagcctgatatgttataatcgtctatctgaaaaagacgtgacacagcatctgcgtccgtcgattgaataacgctcatcagaatttccttcacattccctgcgttgcgtatactttcatacttgcttcggaaggtcttgtatagctggtaaatttcggagggttttgatttgaagatcttacctattgccgaaaaatccttgagattcccattaacagcatcttttccagcggtggcaagtacttctccgatattgcttatatctttcttaatattttccttggcggctttgatgtcaaagtcgccgatcttttccaagaggtctttccagttgacattccccaattgagacacgtcgaagattttccgcaacttctcgttgataaccaagaaaactacgtccttgaaagatagcttaccatttgtaacaacaagttcgaactgtttgcatagctgttcgacattttgagtagtcttgaataggtaaggtccccaataaagggcattgtcgggctgcttgaccattttgacagcaacaacaatgagctttggcatgatgccgtctttcactaaataaaggatgcgctgataataataattctcatcactactgaacagccctgcatcacgcatggcgtttcggtctttcaactttgacaggtagatgcctgcggtggaaaggcttgccttggtgtaatggcctaagatggaatctacatcggaaacggttagatgctcggtttccgactctattgcgtatgcggcagtcatggcagcaactgtaccctcgtcaatgttgacggcatgatacgactgggctgacatagctgtcaccgagaggatcaaaaggatgatggcaatgatacgacgcatataactttgggactaattgtttaatacttttctttcctttaatatttttctggcaaattccaaggaactcttgatccctgaatgcttccagtcacgcacgaaggcttcgatggcatgttggtgatcacactggagaagtttcttatagagcttcaaggccagcttctctatcttctccgttgtataactcatataacattctggtggttcctctataccaaatacatcaccttcctgccctcgtttgatgaagacttccttgaatggcgaacggccttccttattttccaagcggttgatggtgaaaattttcttacagtcaatgtcggttagggcaagcgttttcttgatgttgtcaaacttgtccttgaacttactctgatcaagcagcatgaagacaccggaattgttgatgatggcttccttgactatcttagactcggtaacatcctgtatctcctgtgtgacgacaccgaccattgcccagtgcttgcgggcggtcttgtaaaggtactgtatataggtggccatgacaggagtggcaatcgctttccacgcttcttctatgacaaggcattttcttccttcctttaggagcatcttctgtgtgaacacatccataatgattagtacgacaatggggaaaagaactggattttcttttattttgtcaatctcgaatacgatgaacttttcattgaaaagcgaggaatccatgtcattgttgagcgtatattccaactcgccacccttatagaaaggtttgagaattgtagcaaattcattgataggaaaggttacgtcatcctgcttcataatctgcggaatgcgctctatggcaaactcatagtaagtgttgaagttcaactccgtcacacgcatcttcttacgctgacgctcaatcttatcgattttcttattgatgcgctgaagatatttgctctcaatgagttctggagtgagacgcaatagttgacggctggcattactcttctccccatcagtggctgcactgtcatcaatgacggcttgcagcttatcacggagacggaggctacgggctttgtgcttctgaatggcttcttcctcttcatcgatcctatcatctatgtcgtctatgtcatccatgtcatcagaaacgccataacgctcttccaactgctgctcgtattcttcatacttcccagtacgcttatcttcaagctccatgacatgacgcatattgtctctctgctcctcggtaaaaccctcaaacggggtgaaatactcctcaaagtattctatcagtgtttggttgatgatggtctcttcaagtttcgtcggttcaccattgcctttgaatataaggaagataatatttctaagaaagtctttctttgcctgaaagttctgctcgtactcggttttctcaatcttaaacggattcatcgaaataggatgctcctttgaataggtgatgtatatgccttcaaaatagctgcacaagccctcgtagctatcgccggtatcaacaatgactatatcggtgtcttgctcgtaatactggcgcataacggtattcatgaaaaaggacttgccgctacctgaaggaccaagtacaaagaaattagagttgtcggtataccttattttcccctccttacctgacacgtccacagccataggaacaccctgtctgtcggtataatagcatttcaggttggtatcgtcacctttctgttgatgttccttatataaaaggcatagtgctggctcggaaagggtcagaaaacgatcataatcggcattgagttcaaagcagttgccaggaaaactggcaacaaataactctaattgattataggcacgcttggacaggtgcatactgtatcttgccaaaagattttccaaactgttggtaaccttttgcaagttcttgtcggcactggtctttactataaggttgtaatgggcataaacaaattgcttgccgttacgggcaatctcattaagaacgtcgttgatgtcttcaacagcaatctgattattcggattggggatagaggcatgacggttcttctttttctccaacttcgctatctctcgcttttgattgggaaggaaaataatttgattatatatgatggtgtccacatctgggagagtactaaaatctgaaagaaggtcttgtggcataacagtgttgttgacattgatgtcagcgtaaggatgaagtgtgccaggaagaccagggtcatccacatccaaaaggctgtacactttcagctgttcatcacccatacagattttctcggactccacattgaagtcggtcatcgaaataacttcgtttttgaaatcaacggcgaagaaacgctcggtatattcctgacattccttgccactaagaaaacgacagtttacattctcgctcttcagacggtcgtggactttctgtatctttacttgaaaatcacgccatttatcggcatcgtatgtcttcaatccgccgttcctacctctctgggtgatggtgagatatgtctgtgactccacatagggacgaccattgaaaaacttgaaataggcatcggaaagaaaacgctttttagcatcactattctttcctgctatgtttgatatgttaaacttcttgcggacgaagacatcttgcttgtgtatggcatagccctcgcctaaaacctgaaggacagaagccatcaaggacgtaaactcgtaatagccgtcagtgtcggctgaatacttcctgacgggattatccatcttcaagatagttgaataatcgcctttcttagtgtagataacacctatatcgtttacatcctcaaaactgaaatagatattctcaaacactttagcacgtttgctacctgtgccgaaagccttgatggaaataaacattcccaataacacagaggcaaagaccaatatgacgattacggtaatcataaatttactttacttacaatcaaataaatgttctaatattgtcttgaatggctgaatatgtaaatcccttttggtgatttctttgtatgcaatcctttgtgctgcttgacaaaaatggttactcctccaacggaaagaataatggttaacagcgacaaggatatgacgaagccgaagatcatatagccaatcaagaatgataacagaccacttccaacagtaatggcggcccatacaatgtatcttcctcgaaggcccagaaattcaagaggcttttgaagccccttgaatactgggtagtcgggatagtcgttcttgactgtttccatgtttctctgttacagtccgaagaacagtggcagtgcttgagctgctgctacgaggaagatgcaggctccgacaatcatcatgatagatttcttgacatcctgttcctcgttgttcatcttgatgtaaacggagatggcacccacaacggcaacaatacctgctaaggcatagcacaacttcgttacaacggggatgtacttcttcaaggcatccgttgacttggtgatagcttgaataccggaatcgatgttctgtgcatcggcggcaaccgttaccacaaccaacatcagcatcaccaatacaaaacgagggtctgtggctacggatttgattttcttcactgcggaaatgccaaaactcttggcaccgcttaccattactgacaaattctgattcattgtcttggattttttgttagttaataattatatgaaaatatgtaataaatgaattaccaaagcctgtcggtcactccaaattggaaaccgaagaacgctggaaggactatggtggcgataagtaggaaaatacagctgccaaccaaaacgatgatacttttggtaaagccctcttctcctgcttgcatcttaatatagatactggtagcactgtatatggacaggagggctgcaattgcataaagcaaatacaatacggctgtacaacaagttaatacgaagacaaccatattatacaggcgaccggaattgccactatagtcggttgtcccacaattggctataacgggctgtgcaagcgacagtaatgctaataacagtaaataggtttttccattaaacttcttcatgacttatacactgaattgttctgcctgttcgtcttcttgcttggccttcaataatgcggcttgacaatcttcaacgaactcatccacatatacagctccttgaatatctggagacacgctgtttaagtctccgttgattgaatcaaccttggcttgagcctgtctggccaattcttctgtatctgaatctgtaatgtctttcgctgttattttatcttcgttgatatgagtagctgatgcttcatctgctttattgggtgctgttggctctgcagtcattgcaccgccgtacgtttcaggtgcttcgtcaccacgacgttctatctgatacttgccatcgctgtcctcactaactctaactgccgaaactgctggcgcaccttccgtattgttgacagacgtactcgtgtgaatgacttcaacactttcctttttttctcctttcttgccgaacaaatcaaggctgatcatagcaacataatagataacaaagatgaatgtcactacaattgcgaatataccgaatgatcccatattattttatttgttgtatgcaaaataaatgacttaacagcaaataagcatcctcaaaaaaataaaagtcttatattaacattttcaaaaagttttaggctgtttttggggctttttatgttaaaattaggtgggcaaaaattaaagacctatgaagatccgtgtcaaaaacaaaagaaaaggacaggacataaataaaaaaaattccccattttcgacactcatacttgttgacgtatatacaggaatactacatacaactatttatctcctttggtgtttaccatacttaaccaatatctatacttttatttccgtttctgccttcgacctcactttccgtcacctttgtagtcatcatcgacttttatagtgcaaaggtatcgtaggcagggaacacggcaagtaccagctgaaagcctattggaggaaaacttttcatgaccctccgtaatcaaagattgcggtttcctgaaaactttgccaccaattccttgcctttcattccctttcatgccgacgatcttaccatgcacataaaaggttcgagatgacggttacaccggaataataaaaaaaagttcgggtcgaagaaacgaaaaatccttaaaggttgagaatcgggttgcccagaataatattttgaattaaaaacagcaggcaaaatggaaaagagttatatttttgtcctttatgtaaatggtaaaatttgcaaggcatatcattggttctgtgagaatgaaagagtagcacatctccaagctataggtttatgcgctggggcaaagaccttcaagaaaacggcaggcgtacttatttatgaattacgtgaggacttaaactaccatgtgtgcaatagtgttgatttcaggtcgggttggtatatacagcataataagtttccttcacatttgttggaaaagaaatgcaacctgacggatgtattaaaaaaaataatcattgaacattctatataataaatattaagaataaatataatgatatgaaaagaataaagacagcaatggtgacgaatggagaattgaaaaataaggtactgcagggggttgtgaattatgagccgcagggcaatcaattttttccgataactttcatcacgagagaagacttggaaagttatggttttgatacaacaaaccttgacaaggaaactatgaaacagcttgcgcataatatggaaaatgacttcctcgataattctttctttgaaatgatggagcgtaatgcgttagaaatggaaataaagaagaaaaatccaacgaagaacgattgaagataagaaaattgttgttgtgtatatactaaatgaacagaacggagaaccttactcggttattcgctctgttcattgtaagtggtagtaagaacattaacgaaaaatgttgttaatgttccctctattttctttcttgggacgcacctgtccatgggtttcttcatatttgcttataagcatgtcaagtcccaaacttataagctcatttatttgaacaccttctttttctgatatgacacgtatcttgttcatgacagtcttatcaatggtggtgcatatcctttcttttccgctatttttctgaactgttgttgtctttggagttgactcctcctttgaaaaaatagacgttgctgggcttggatatggggtatttccgattgaaggccttcctgaagtaagaccatctaagagattactcattgcatcgggatcgattgtctttttcattgtattctggcttattttatttccgttttgcttaatagttcctctgcgaacgctctgtaatcaactgctccattgctctttggatcatagtctacgatattgatggcttccaatggagcttcggcgaccttgatgttctttcttatctttgtcataaatactttatctcccaacttggctctaagtccagtttctatctttttactcaaattggacttttcccaacgagtaagcaaaatacctgcaatctcgatctttggatttagtttctgctttaccattctgataaagtcgctaatcattgttaatccttggaagggcagcacctccgcaaggagaggtataacgactaaatctgatgcggtaacagcgttaagtgtgagcaatcctaaagacggtggacaatcaattaaaatgtagtcatactccgctttcttctcttgtagaatatctgtaagaatatgctctctggccatgaccgaggcaagctcaaggtcagcggaagcaagacgcagggaagatgggacgatgtcaagattctctgcaataggaaaaatggctaatcgataggaatctcctctgcaagaggcggtaagggcatcgtagatggttctgtcagcttgctctccctttaatagggaggaagtaagattgctttgtgcatccatgtctactaataatacttttttacctaaggaggcaaggatagagcctacactggctgttgtagtagtcttgccaacccctcctttatggttggcaaatgagataattgttgcttgtttgttcatatcggttgatttatattctttatatatacgtattctcgtatttctttattggcttatatacatatagtcatatatacagctatacgcttgcaaagatacacaaataatcccgtttagcaaaatattaacagcatattattttgtaattagttatttatgactgatattacttgcacagtttttcaaaataaacataattgttattgattgtttatccttttcttattattacttcgtgtttctttccgatgttctgcatcataacgattgtgacaccgttggcataaagcacggagattttcagggctgcaatgctctggagtatggtcaaggtgagctatcgtcaagacaatccttgccatatgtttcgtgcgctcgttgtagcgataggtatggttttccacgccacagaactcacagcaattgtgcgcacgctcaagaatggaagttctaatctctttccagttactcgggtagcgtaatttattttcggatttgatgggcatattatttctcctatttatcgttatttactatttttatttattgctgtccggtaaaaatttgttttcttttatgttaaacatttctttacagacatcctctgctattttccgggcttctttcttggaaatgtattggtcatcgctttcatcttcttcattccatgaatctacttcttcctcttctatattccatccaccatactctttctcaatttgcaggaaaaaccacagaataataaaaatggcacctatccatcctaagaaaccagtatgtaatatccacaagaaatctgccattagcagtgaacctatcaaatatacaatgagtacagcgagtatgaaataaagcaaatgtttcataccttgccctccaatatttttagaacatcactataacgatataactcacggtggggagtaatccttgtggggacaagaaatcctttccttgcccattttctaagggtagaataatcaacaagtaacaaggacgctgtttctctttttgtcaagagcataggctgtcctttatgttgcttgaccttacgttccaggtcgagaagtttttgacgtcgttccagcacgttgtaaatatcagttgaaagggtagcaactttgcgagcttgctcttcattcaccgctctaagactgtctctaatctctgccattgacatatcaaccaatccttggcacatatttggaagttgctcttgcaacttttctatcagcttgttggctttggctaccgcgagagtctgctgcattgcgcgatcttccctaaatcccatttcttcatgaaagcacatgaatacgaggaaatataagaatagaaagagtggtattaccgctatccatatccaaggagtgtcgtgcacacaccacatcaaatccaatgttgccagcgatattaagaggtaggtaataatggcagcacctataaaaagatatatatgtttcattttctattggccacatttaagattattccatatcaacttcataattccaatcacaagcgtcactttcgtgaatatgatcagaaagccactcgaaaccagtacatacttgctcgtccaaattcataagatcacagtttacacgccctttatccgccaaggcgtttagatcatcataaactttttcgctgacttctacgtcatacaaaccaacagtataggttactgttacggttaaatcctttatctttttcattctgtttttacttttaatattaaatgttctattgaagttccaattgtacatggaaatgatactcgttgcataaacagacaatttgcctgacttcatagggatcctctccatagggaaagaaaatcatacgctccttggtcaagcatctgactcctttctttcttaaattatacaagaggttagtgcgtctcttgatcactctgtccatttgcatccaaatttcctttaagtaacatattatcctcatgaaatgtggtttcaatatgctctatcaaatcaataggtcttgtaacatacgcatcaaacatctggtacatcagctcgggcgttggtctctctgacatatcaaggacaaatactttcttgtctttccctttcatccaaccagcttcagaatgagcagaacggccacatggcagaagaagaacacagaagtctgctgcttgcatggcattgaagtctttttcaaaagccttaatggcctcgggatgatggagtctttctttgaaatcattgcaagtccagttttcaaattccttatcgaccttatcccagctaaagccgcttatttcattgttttcagggtgcttgaaatcataagttttatagccttgcatgcgcaaaacgttcaaaacattgtcataaaatctgtttcgccaactactggctaaatatatctttaaaaatctcataatataactatttttattttaccaatcctttacacaccatctctacgtatttaagactgtctcttaacacaggatagcttagattttcaaactctgatctttcaagatactctatctgtttgctgaagatggacgtatcattgtcgtatttattcaaaagaaagtatcttaaccacatgtcggcacatctggggcgtggcaaatccaaaaaatctaaaatgagaacagatagcctcttttgttccgtacgattcaatacgatgcagtcgcctgtttccttatctatccaaccacagagaaggtgagcggtattgttagccctatcaatggaaatctgaaagcaagaagggccgaacataatctctattctattagcaaggctttgtaattgccaaagggtgatggaacgtttgataaaaaaactgatgcttcttatgagcttcatactggcaaaaggctttatttttttcttttgaaaaatcaatgccagcaattcttcttttttttgctcaaaggaggtaacttgatagaactcccgagcatggacaagatccgtaatacctgtctcaatggttaaaacatagttgatcatattttacttgttagcgtttatacttggaaaagatgcacctacatcaatcccgttatttttttatttcttgaacttgtcatcattgtagctgtgagtgatttcataataaacagcagctcctaaagctaaaagcaagatagagataatgataatatattccataattacttatttattgttggtggtaatttcaatggcctttacaaactgcaacaaattaatatagcctttatacagaggattgcacacaacggcatgcccaccatatcgatcttttagagttaaggtaatagtcatacctatgacatcgtttgggaagtagagataaaccgtctcatagtcgtcaccctcgatagatatatggatgaagtacttaacatccgacataatgatgaaatcacagtctgatggaagcctgacaaagccgttcttctgtaatatctgataggctaaatagtccttcatatcatagaacacacataatcttttgcttcggcactcctttttcaaacgtataaaggttatgccagaactgcttaaagtgacagtctcctgcaaatcatgattgacaaactctattccgttgttctgattgattattcccatgccataaaaggtcttggaaagaatacggcaggaaaccgaatgaatctctggtaattcttttagatcaactcccattatgctggatgactctgtatctgtcaatgcactaatcgttatgttttccgagcatcctgttgcgtacttgaatataggtttattcattgttcttagttttggttttcaaattcctcaagtttcaatcatagcctgtaattcttctgtagtatgacctaaacgaaaaaaatcactgatgtctttttctgattttataccagacagaggcagatcaagtttctgtactctataccgtttgccatactgccgtacccgtaaagccgactccctttttcctgtttcatctgtatcgtagagaaagatgatacatggaaatcgcttggaaagttcatccaatatgtcttctggaatgttggcggtctcgctgttgaatgccaatgcagggaagccatgtgcagataatgacatgacatctttctcgcctcccgtgataaatacgaactcactgtttcttggtagttgattgattccgaagatataaggcttgggcaggtgaccagcatacataaagcggttttttgccttgggacggtatattttcagcccttgaccttcatcgaaaaaatatccgtatgtaggaatagcttttgaaccgtaaatggcaaatgaattgccagacgattttgtgaatgtgcagctcttgatacttttcacattgaacctttcaaggatggaagaaccaatgccatattgattccaatatgcttcttcccatgactgaaagggttgtgtctcaacctcgaaactggtaatggaagaactatcttccttatgctggaaagaggttgctcttttcatcaatacctgatggctggttttctctccttcaaacaccccaagtccaagatctctgtctattatctgaagaacttcacggaagttggttttcagattgacgttgcacagcctgcctactatggtgaaacagttgccacaaaagctgctgtcaccgaaatcttgcaggtaatattgtccgttgccgtatcttcctttgtttgcgtacaaatgacatgaggggctactatcatccctgaaaggatttcggaaagtcttggaaagacacttttccccaaggtagtgtgtgaacacagtcaaaccaccgttggtcatctgtagtattttttgtgcttcattcataaacgtataactaaacctttgaaaattgattaagaatttacaatacggtattgaagacttaaccccacaccaaagaatttgtgcaatacaatgcaaagagtgtctatgtaattttcctccaaagtgtgatatattcgactgtttggaacgcaaagggtcagtcgcttggcagcattgtcaaaggaatcaaaagagagttgttggaaaacagaaacaaaagctcgttcgcctactatcttggcaaaggctgacatacatttaccccaaagaactttagcatagtctttaggaggaatctgcgccttcaacttgctttgtagtctcttttcgtttctcttgtaccagttgcagaagtagtcgaggaaattattcaagtctcccgggacttcttccttgcgacacttcaaatttgccaaaaacaaagttaaggcattatagagcgttcctttatcggcaaagccataaagctgttgcatcgaacacacccattcgtcatcaaagaccaattcttcgatggatgaaaaattctgcgacggcgaatagttattataatgaatactctctattctcttatctctattctctttagggatatgttcgcgcgcgtagctgccttgctgaacgtttggtgacgtttttgcagcttcgacatttggacttctttgttccttcttttggccctctttttgaccgttagtatcgtaactaactgtatttgcgttatttacgaaagtattggtagacacttcgtgacggttttgtgaagttggtttttgcatatcttttggcccttcttttaaccccttttgttctgtttttgtgtccccctcttcagagtctttcattggagctacatcagagaaagatttgtcaaaacctgcagtgtcttcaaccgacgctgcacatccaacagaagagcctacagatgctactggataggtgtccttaatgtaatcggagaactctatcaaacgcacggaagataatcttttctggttgttatagccaacattcaagatcccgagcttgcgcaacttcagaagacaatcttttatattgacggcagagatgccagtcgaagtactgattttcttaaggtcaaaccaaaacggatcctcataattctcattttctgagtaggtatgaagaagtatatgaagataaacatgaagaacctgtgcattcacaaagaaatcttggtagtcaaggtcataatacagctttacccatccacctcttatattttccaaagccagaaactttgaaaaatcacgaacggtgatgataacaccattgcgtcgtaaggaagctacgtggataacgcccgctgctttcagcttatccaaggaacggcgagctgactttcggcttatctccaagaattgcatgatgtctttaatagaggttcgaaactgtcctctcatcgtaatttggtcaaagtaaggtttatcctctctttgagcattcaaaaatatgtgcaaaaacatttgcacagcattgctgtcgttatagaaagaacagttatagaactttctgataagaccgatccatttgtaatctcccatggttataagtcattttgaggttcaatggctattgcccttacttctgtattctcactgatattctccaaatcattgaagattttgccgcttgggtctacgaggacaaatgttgtaatagtcttaatattgttattgattttcatatgtttctcgtttttagggatgaattatctgactctatgcggaaagagaggaaatttactcctcggtttcccttgaccgaaatacaggtttcatcataagtgacagcttgaatggtagatagcagggatttaccgtgatgccatctgactttggcattcaaaatgagagaaagtatgatgttaaatttggtctcaatcatttcttttgaacctttctctctatacaaggatggatttatctgaaagagcaggtcaactaaccaaaggggtttcttgctcacataaatttcttttacgatatagtacatgatgagtagattaaaaggttattctttataaatggatgaagacaaacagacaggatgagctgcgtcccgatagatattctcccttttcaagagatagtatatcgcactgctgctcatataaaactcgtttgcaagagcacacatggctgctcttggagaaatgagtttctgctctattactggaccatactcttttatgtacttatcgacaatcaactgccttcgtttgacagctggagtttcaaaagcccaaaccttttcaacttccgcccgtacgttgggaggaagtctggcgacagctccaggagaaaccgcttggagttttttacgccttctcgttttagactcggctaattgtggattgtacacgccgttatccccagcattgcggttaatttcacgcaatatcgtggtacggtctactttcagaatttcagcaatttctctgaaattctttccctcttgcagaagttcggcaattttctgccgatgctttgaatttaattgtttacccatagtcaatgcaaaaagtgttaaacgggtcagaatctcttcttccccattattttttgtgcattgacagttgtgtttttcttgaagttttagtacttcaatacctactgattatcaataacatgaagtatattatgcgaaaatgaaattaacacttttaacaaattgtacttctaacttgaacatccgatgttagagaagttgctccaaaagatagtaatgtcattactgcattagcaatagacgaacgtagccataagatagatattattgcaggagaaaatttaccattaggttatgaaatgatatttttgcttatgtctgaatcttttcaagggagtgtagatggagctcgtataaacttatctatacctgattcagacttaagtattattaaattcatctttcgtaatgctattgcagaggttgtaaaagaacagtttcctcagattgaaagaaataataaaagcaaggagaaatacctaaatgatacataccctcatttaagtggatattttgaaaataatgacattggatactcttcgcagtcagatgtattaaaaaaagcgcaagataaattttttagagaccaaaaagaaatcttgggtgcaaaagagttaaataacgagcagtttgagaaatcacttgatttatctgcacgagctttagcggaatatattctgtttagacaaaatgtcataaaaagaatgcaaacattaaatgccaaaaataaagaagcagatattcataaccttattgcaccaaaattttccgagttcaaggatgaaaatatcatcactgatttgtataacaataatgtatggatttttgatgataagtttatgagctattatatggtattaagtgaggttgaaatgtccaaagtaattaatgtaattacgcaaggtgaggttaaagataacgatgatgacagacctgatataacattatttttctcggaaaatccacaaatagaaaatgtcaaagttgatattgttgtagttgagcttaaacgattgggtattagtgcagaacaaaattcgatagtagaatttcagttagatacaagaactcaacgtttagccgaatattatggtaaccgagttcaaagaatgtggttctatgggattgttgattttgacgataggtatagaaaacatctgataaataatgggtttaaaccactattctctaatggtgaaatgtatttccgttcgaaatctgtatatttagatttggatatgaaacaaagtgttatacaaaatgcgtatattcttgattataaagcaatggtagaagatgcagattcaagaaattccatgttcttaaaaatcttacgggaacgatttaaaacaaatcatacaaaatagacttgaaatcaagtctattttgtatctttgcatttagaaagagttatttgacagcatagcaccgtaaaacactgaaaattgcacggtttctaactcgttactactgtttcccaaatactccgttaaatgtttttatttctcaaatggttgtatcaaaccgctgaaaatctaaaataaaaagacgggcatgcaaattcttagtctttcatgtgtcattgtcaaaaaaaagttgttattttgcaaacagaatcttttagagctaactctcaaaaacaaatagaatgaagaacattttagtaataggttcaactggacaaatcggttcggagttgacccgagaattacgtaaaaattatggtaacgaaaatgtagtagctggatatattccgggtgctgagcctactggcgaattgaaagaaagcggtccttgtgccattgctgacgtaaccaatccccagcaaattgcagaagtagtgaaatcttatcacatcgacaccatttataacttggcggcattgctgtcggtcgttgccgagtcaaagccacggttggcatggaagataggaattgatggtttgtggaacatcttagaggtggctcgtgagaaccattgcgctgtgtttacgcccagctctattggttcattcggtcctaccacgccacacgacatgacgccacaggacaccattcagcgtcccaagacgatctacggcgtgtctaaggtaaccaccgaattactcagcgattactattatcataaatatggtgtagacactcgtgccgtaaggttcccaggtgttatctcgtacgtcactcctcccggaggtggcacgaccgattatgctgtagacatttattataatgcggtgcgtggcgaccagtttgtttgtcctattcaggctggcacaaagatggatatgatttacatgcccgatgcgctaaaggctgcaatgatgattatggaggctaatcccgacaaactcattcatcgcaatgctttcaatatcgcatccatgagtttcgatccagaagagatttatgccgctattaagaaatacaaacccgaatttgaaatggtgtatcaggtagaccccttgaaacaaagtattgcagagagctggcctaacatgatggacgatacttgtgctcgcaacgaatggcagtggaagccaacctacgatttggacagtatgacaaaggacatgttagaaaagcttaccatcaagttaggatgttaggcgcatcgactcgatgacaacgaatgatattgatagggagaaaagatttaattttttctccctttttgttttttcatgattgatgagattttcgagacaaatactacaaatctcctttcctaattgcctccatcacatttgcaggagggcgatgggcttcaagttcgcctttcatgaaatccatgtatggagccacatgttcgaagaattgataatatcccttacacaaataattcaacccaggttccccttgctccgtggtagaaaacctgttcttcggacattccccataacacgcaaagagataggtgcactgcttacactgctgtggcaacgacaaatatttattttgtccgaatgcacgttggcgctcactgtacatcatttcggttaaagttttatttttgatatttcccagtagataagctgggaatacaaagtggtcgcacgaatacacgtctccattgtattccattactcctgcatgaccgcactgcttagccatagtgcaaagcgaaccatccactcccatccaattggcaagggttacatcaaagagttgtacgaaagtttttcccacatcgttgcgcacccactcatcaaaaatggtacaaagaaaatgcccccactgctctggagacacagagaagtcagccaactgccctccgccaccgtcagccattgacgctaagtgtcgcccatcaccatgaggcaggatacgctcaacaatgggagtgaactggatataatgacagcctaagtccttaaaaaactgatagaactccaaaggataatctgcattaaaatcgttcaccacagccatggcattccaatctaccgcatatttctcaagacatcgaatgcctctcatcacctcatgccacgaaggcttccctgtacgactgcgtcgatattcatcatgaaactcttgcggtccgtctattgagacacctaccaaccacccatgattgtgaaaaaagcgtgcccatcggtcatctatcagtgttccattcgtctgaatggtattatcaatgtgttttccttgtccatattgccactggagcttcaccaccttttcataaaacgaaagcggacgcatcagcgtttctcctccatgccaacaaaacatgatgtgctgcatcgtctgactttcgatatattgcttgacaaacctttccaacagttcatcgctcataacatgccgcacgtcaccctgataaagtttcgatttttccaaataataacaatattcacaagccaagttacacgaagcaccaacgggcttggtcatcacataaaggggatgcgaaaagggtgaagctatttccattctgaatgacattgattttggatgaactgttaagctgacggtaaaacagcttagacacataccaaacgtccagcacagggactgattgattgcttatgcattagtttatggttgggattctccttctatatattgctccataaagatatgttcgccgtcatagacaacataggtaaactgtgttatccagtcgccaatgatgaacattcgcacctgacgacttagcatcaaatcaagttcaatatgtcgatgcccgtagatgtaataatccacattgtcatgagcctgcatgtactgtttggtaaactgtactaaaaactcatgatcctcgcccatgtacggcagttctttgccttcttttctttttaagcggctgtgctttgcccaagtctgtcctaaccacattccccagcgaggatgaatggcattgaaaagatgttggcagatagaattatgaaacacctttcgcaacaattgaaacttatggtcggggtctcccaatccgtcgccatgtgctaaataaaataccttgccgtaaatttctgtcgtcaaaggtttacgatgcagaattaccccacactcttgttccagatagccataggtccatatgtcatgattgccgataaagtaatgaacctcaacacccaaatcggtcagctcgctgactttccctaagaaccgtgtataaccttttggcacaacatagcgatactcgttccagaagtcgaacatgtcacccaagaggtaaacagcagaagcccgatgcttaatactatctaaaaatcgcaccaatcgtctctcatgtgtgcgccgatgatctatcgcccatgagccaaggtgagcatccgaaagaaaatatacatttttcatactctgattttattgatccatacaagtgacagcgcaaggcgctaatggtcttaatcgaatcccaactctactctcgcctcttcactcatcatgctttgatcccaagcgggttcaaagacaagatttacattgcatgccttaattttatccaaactctctatcttgctgcgcacatcttctaaaataaaatctgcagcaggacaattaggggctgtaaaggtcatgtccacatcaacagtataatcatccttcacgtctatcttataaatcattcccaaatcaaaaatattgactggtatttctgggtcatatactgttttgagtacatctacgattttttcttcaatatttgttttttcttgtaaagtcatcatatctgataagtttttttgcttgcaacacgaacaccaatcactctaactgtcaaggggaaaagaagatacaaagtcttatacgattaacgctaatcattggatactaagtaaaaatctttttagcctaacacaacatcaagcgtcatcatcagcaagaatccaatcgcaaaaccaatggtactccaatcgctgtgctcgccttgggacgcttcaggtatcaattcctctatcacaacgtaaaacatggcgccagcggcaaacgacagcataaacgggagcgtaggggtaagcaaggctgccaataagataaccaaagcagaacctactggttctactactccactcaaactgcccattacaaacgagtaccgtttactttttccttctgcttttagcggcattgagatgatagctccttcgggaatattctgtatggcaatacccaatgaaagtgtcatcgctgctgcaatagatatacccatatccccttgtaacacacctgctacgactacaccgacagccattccttcaggaaaattgtgtatagtcactgctaatatgagcatggctgtacgacttaatcgagagcgaggtccttctggtttaacactccccaaatgcaagtgaggcgtaatatgatccaatagcaacaaaaaagcgataccaatagcaaagccgatggcagcagggaacacttgccatttgcccatgtctgcccactgctccatactcggtataatgagcgaccatatagatgctgccaccatcacgcccgaagcaaagcctaacaaagctttttgcaataactgtgacatttgttctttcataaaaaagacaaatgcagaacctaatacagttccagcgagtggcattgataaaattaaaagtatatcactattcatgatttcttatattgatatgagaagaacagcagcatgttccgtttttgatgaatacttgctgaagctggttacaaatttacataaaaactatgatttataagccagtgggataaagaaagtgctttttctttcagaggaatggttacaacaattatcgaaaaaaaaggagagcgtgcaccacaacggtctatcttttcacaaaaagaagtgttgtcatcacagcaaaacaatcgtgggctactccccttttaggtcgactattcaaacgactaatagcctcatgtataacaagatttcagacaatcggacgattcccgtgaagttgtcccaaatcatcttgtgatacacgaggaagtttgttaacattcgtgggtgcgttatctcaaatgattgcgatcaataatcagaatttcgttttgttcatttcgaataacactactaaaccgctcatattcgcgcaacacatctgctatgatttcttcttttgtaagatactgtatatcatttccacgtctaccgtcattgtaataggttacaggaacatacatattaatcgtttctatcgtgggcgtgttatcatcgtcaatgaaataatctgagatattctgcttttcaggcatcacaccatagacgaagttgctaatcttgttgtgtggaatcatgagttctattttcatttttccttccatcaattctcgaatctctgcatggattccttttggttgtaaagcagcctgaatatcttcaaacgcagggcgcaccttatttgtcataaactgcttgacatcttttttttgcgagtaggttaaaatctgatctaagcgttgtctccagtgttcgccatcccagttacgacttccataagggagtttagtagaacgataccgactgtctaaacggatggctttgaccaagcagaagcataagatagcaatgacaataccaaaagggaaagccgagattaaggtcatggtttgtaaagctttcaaaccacctgtacgcaatagcaacaatgacaagatgcacagcaaagcaccccaaaatacattctgccaacgtggagtattaggtctgttctttgtcgaaatgctattcatcaccaaaattccagagtcgcacgaggtaacaaaaaatacggcaatcatcgcaatacccaatccacaaagtaattctgacaaagggaactgctctaagaacttaaacagtagcacgtcaggattattcgctattgctgacaaagcaccgttcactaagttttgatcaaaccaaatggcaccattgccaaacaccgtcatccagaaaaatataaatagcgaaggcaccaacagcactcccaagatgtactctcggatggtgcgccccttagagatgcgagctataaacaagcctacgaatggcgaccatgaaatccaccaagcccaaaacatcacggtccaattggtgaaccattcctgctgcttgggttcaaaggcaaaagtattaaatgtcaggttggcaaactgactaaagtaatgtcctatcccctcactaaaggcgcttaataaaaagatagtgggccccagcgccaatacaaaaatcaagagcaatactgccaacaccagattgagttcacacagtcgcttcacacctttgttcattcctaataaggtagagcctaccgcaatactgctcaccacaatgaccaatacgacctgccaactaaaactctgctcctgtaccaaccctaaataactaagacctgcattgagctgcatagctcctaagcctaaagaggtagcaatgccaaagaaagtactcaccaaggcaaagatatctacaatatcaccaatgggaccattaatcttgtctttcaaaataggataaagtccactacggatggccaacggtaatttataccgataggagaaatacgctaacactaatcccaccacagcatagactgcccaagcgtgtaaaccccaatggaaaaaggtgtgtagctgtgcctccttttctggtaccagcgaatcagccaaagcaggatccacatagtgcgccattggttcagcgacaccgtagtacatcaagccaatacccattcctgcagcaaaaagcatcgatatccatgaaaagaatccatattgtggttctgaattatcagctcctaaacggatgttacccgctttgctacaagccaacaaaaacagaaagaccataaaagaggttatcaacagcacatatacccaacttagattctggtacatatagttctgcaccacgttaagagtggactctgcttgcgttggaaaaaggccactgtaaatagataggacgattaaaataacaagaccaggtaagcctacatgccgtgtaaatgttgttcttagtttttttgttttctgttgttccatcatgttgttttgtatattcacaagcctattataaggcaaaggaaatctcgataataaataaatatattcttaactattttcgagattcaaaaataagagtgtctaagtttctccatgacaaatgtccattagcataatagtaaaaaaaaccttcttaccacctcagacgaaacttacgatttgcaaaagtacaaaaaaaatgtcaaagaaacaacaaaaagctgctcgttcgcttaaaatacataaaactgtcacaaactcaacgaacgctattttttacctccattgacgaaataaatagctcccgttgcgagtagcgcaaagacgagactttcccaggtcatgatatgagcaagggtgagctcatctgactggaagaagaaataatacaccaaattacacagccagcaaatagctaccaagagcacaaataaaaaaagatatttcttcatacttctattcatttactattaaaaattatgttcactggcgtgcctttctccgcattacattcctctttctataacactctgccttcctctcgataactgtaataacgaccgtcggtgacaatgatatggtcaagaaagtagatgcgcatcaactgcgaggcttcttgaacacgcttcgtgagtcggtcgtcttcggtactgggaaaggcttgattgctggggtgattgtggcaaagtgccaacaccgtggcattgctcaacaccgcctcgcgcataattactcgcacatccacagcggtctcacttattccgccatgactgatgcgcattgctttgataagcttgtaacgctgattcatcagtaatatccaagcctcttccacatccaagtcttgcatgcgtgggtgcatgtactcgtaaatcgccaatgccgaacttaagtctgcacgctcttcggctttctccatggcacgtcgcttacccaactcacaagcggcaagaatggtaatggctttcgcaggtcctattcctttataatttgtaagttcttgaatggtttgttttcctaatgtattgagattattgttgcagtcgttcaacaaacgtttcatcaaatccacagcactttcatctaccgaaccagagcctatcaagatagccaacagctcggcaggcgatagggcactcgcccctaactgctccatcttttcacgtgggcggtcggcttctgcccaatgaacgatggagagatgttcagagataggcggcgtgacttcctcctcccgcttgtcttgcgaggacgaagcgcctacgttctctgtggcgttatgtttccgttgcactgtcatggcatgaaatgattgatgctatttggcatcctcccctcgcctgaaacggcaaagctttatttataaaaggttttatcaaaagcatgaaactcgtcgcgcccacgcatacaccgttggtaccaagcactcataaagcccaaaccataaccaaacagttgtataaaagctgcacggacactaagcaaaccgattttaagactctcattctttgtccacgaatctatcacaatggctccgcaatataagaccagcggtaagagacctgtcaaaaacaatataagtcccacgtttggttcttcggcaacactgcttggttctgaccacaaaatcaaaccaaatatcatcaaaaagcacaggaaaattactcctaaggtaaacacagttggaagcaaatgtaccaactttaagctcttcggatgacgcttatacagattgacgcgcgcaataccactgttatacacttggcggaagaacttcttaaagtcggtacgacgcttatgccacacccaagcatgggggaacaacctacacgtgtagcctgccttgaagatacgaatagagaaatcaatatcctctccaaaccgcatcttactaaatccacccaattgctggaatgcctcgcgcctaatccccatattatacgaccttggatagaatttgtccaaacgtttcttacctccgcggataccacctgtcgtaaagaaagaggtcatggcataagaaatggctttctgggtgtccgtaaacgaggcatgcgcacgatcaggaccaccaaaggcatctgcgggcgaggtcgccaattctttttctatctcaacgaaataatcgtgaggcaccaccacatcactgtccaagatgatgagatagtcacccgaagctcgttctgcaccgtagttgcgagtctgtcctggaccactgtttgacttcagtaaatacttgatgtccaaaaatggctcgtattttttacatacttcttcgcaggggcaagtagagccgtcttcaataatcaagacttcaaaatccgtaaacgcttgcttacaaagactctccagcaattcatctacttcgtctggacgattataaacaggaacgataacactgtatttcataaatttagatagttgacgagttttttagttgacaagttgacgaattttttagttcacaagttcacaagttcacgagttcacgagttgatacccgggcaactcggaggttttgatgaacactctaataattcgatgaacactcgaatgaattgatgagcagtcaaacgaaagggaaatgtctaaaacgagctaactgtgagcaccgtactttttctaaataaacactccgcaggttgatgcttgacacattcaaagggagcaaattaaaagcaagtggaggtcacagcacgtatgcagtgacctctttctctccttctcctctccttgagtgagaggtatgctttaacaatacagttaataattactcgctaatacggctcagataactgccgtcgcgcgtatctacttgtatcagctcgccttcgttgacaaacaaaggtacgcgcacctcaacaccagtttccaatgtagcaggcttggtggcattggtagcggtgtttcctttgataccgggttcagaatgagtgatgcgaagcactgtctttactggcatttctgccaacaacacactgccatcgctggtatcggttaccacctctacgatgtcgccttctttcataaagtctccgcctgttaccgcctctttaggcaaaggaatttgctcaaaagtttcttggttcatgaaaatacaaccagttgcatcctcataaagatattggtaaggacggcgctccacacgaacatcttccaatttaaagttaatctggaaagtacgctccaatacacgaccatcagaaacattctttaacttcgtaatcatgacagtgttacccttaccgggctttctgtgttggaaatctatacaagtccaaattttaccgtcaagacgaatacaagttccaatcttaatttcctgtgaattaatcattgtttgttatcttagttcttaaaaataattttttcttctatgccttataaaagcgatgcaaagttacaaataaattgtaaaaaagcagtcttttttcggtgaaaattagtcaatttctttgttattccgaaaataatgagtacttttgcaccccaaagcgtacgaaacaataacgataaatataaaaaacaatgaaaagaacatttcagccccacaatagaagaagggtgaacaagcatggattccgtgagagaatgtcaaccaagaacggtcgtcgcgtattggcaaaccgtcgcgcacatggacgtaaaaagctaaccgtttctgacgaaaatcacggtaagtaattggcgtgaagccatacgccttacgtcaaaaagcagcaagaaattcctatcttcttgctgctttttgtatccagaacgccaaacgtggaaaaatggagcgcaagtgtggcaagccattctactttaaggctggttctataaattagctttgttagattttgagcttatttttgaggtcaaaatgcaagagagtgaaggagtgtagcgagctacacgactgaacaatcttacattttgacctcaaaaagaagccaaaagataacaaaacgtatttcataaaattttaatgactatatgcggtggtaatttatagaaccagccttaagcagttacagtgctcccgctgaagcatggagataaggtgcttattacattgttttaaggctgttatcaccatggagtaaggttgttataacattgttataagaacgccacctgaaagggccgctcgaaagggcataaaacaacacacagaaaaaaccaaaggttttattttgtactatctttggtttacattatctttgcaactaataacctgcacctattatagaaaataagcaaacaggcgtgggctgcggtctctatggagacagtattgtcaacaggttttaagacaaagcgaatgaagtcgtcggaattcttgggtaaattgaaaagtttttatctgtggggaaatctcctcgccatgctattggtggtgctcgttatgggcatcggcgtacgctatgggctgaactggtacacccaccatggagaagccatcatgattccgaatgtgaagaaaaaatcgtttactgaagccgaaagcatcttaaaacaaatgggactcaaagcggttgtcagtgatacgggatacgtgaaaacattgcctcccgattgtgtcttagagcaaagtcctgctgctggtgaaaaggtgaaagcaggtcgtattatctatctcactatcaatgcctccaaatcacccaccattaccttgcccgatgttattgacaacagctctctgcgagaggcaatggcaaaactttctgcaatgggattcaaggtgggaatgccacagtttatcccaggggagaaggattgggtatatggcatcttggtgcgaggaaagcacgtagctgctggtgacaggatttcgattgaagactcgttgattatccaagcaggaaatggcatgagagatgaagccgattcggtgaattacatcgaccccgtttatcctgagtacaatgacgcttcagatgaggatgtggaccagtttgtagaagtgagcgcacctgtggaagaatcagcaaagcccaaccagacgccaaccaaaggggagacgactcaagatgcacagaaagaaacgccagctcccaagaagagctaccccaagaaccctcaacctgcggagccagcaacaccaaggaaggtgaaaccttctccacagaagacacccgtacacacgcccaaaaaaagattagatgttagaagagactaacaacatatcgctgatagaagacgaggatgaccagcagctgtatgagcattttcgtgttgtggtagacaagaatcaggagccattgcgtattgacaaatatatgtttgagcgtctgaaacactccagtcgtaaccgcatacagaaagctgcagatgcaggatttgtacacgtaaacgaccagcccgtaaagagcaattacaaggttcgtccgttagatgtgattacgctcatgttggatgcgcctcaacacgacagtaccattgaggcggaagagattcctctcaacattgtgtacgaagacaccgaagtcatggtagtgaacaaaccagctggcatggtggtgcatcccggggcaggaaactttcatggcacgctcattaacgctgtggcatggcacctcaaagacctaccaacctttgatgcgaacgaccccgctgtgggactggttcatcgcattgacaaagacaccagtgggctgttagtcattgccaaaacaccagatgccaagacaaagttgggactacagttcttcaacaagaccacccaccgcagctaccacgctttggtgtggggcaatttcaatgaagaagaagggcgcatcgagggaaatattgcacgcgatcccaaagaccgattgcgtatgagcgtattccctccagacagtgatgtgggcaaaacagcaatcactcattatcgagttttagagcgatttggctatgtcacgctgatagagtgcatcctcgaaacggggcgaacacatcaaatccgtgcccacatgaaacacattgggcaccctctatttggcgatgagcgatatggcggaatggaaattcttcgtggacagcgtagttcaacgtataaagcatttatacaaaactgcctcaacctctgtcatcgccaagccttacacgccaagaccttgggcttcgtacatccgaaaaccaatcgagaaatgaacttcacgtccgatttacccgaggacatgcagcaactcatacaaaaatggcgtgtgtacatacatggcacaaccatagacacttttgattattaaacaagatattgttcttatatgaaaaatttgaaaagaaacattgccatcgtttgtggtggcgactcatcagaatacgacgtgtctttacgctctgcgcaagggctctattcgttctttgacaaagaacgttaccaggtatttattgtcacgatacgagggctggactggaatgtgtgcttggaagatggcagcactgtcaaagtggatagaaatgacttttcctttgtacacaacggcaagtcgatcatcttcgactatgcttacatcaccattcatggcacaccaggcgagaatggtatcatacagggctactttgaattggtggacattccctactccaccagtggggtcttggtggaagccctgaccttcaacaagtttgttctaaaccgctatctggcttcgtttggcgtcaaggtggcaaaaagcattttgctaaggcgtggtgaggaatcgatgctctctgaacaagaaatagaggaacagttgggcatgccatgctttgtcaaacccgttgccgatgggtccagctttggagttacaaaagtaaaaaactcagaccagttagcacctgcgttgcgggttgctttcatgcagaacgaggctgccatgattgagagttatatgaagggagtggagctatcgattggctgttacaagacgagcgagaaggctgttgtctttcccgcaacagaagtcgtaacgagcaatgaattctttgattacgatgccaaatacaacgggcaggtgcaggaaatcacaccagcacgcatcgctgacgacactgccaagaaggttgccgaagagaccagcaagatttatgacattctacactgcaatggcattatccgcattgactacattatcacaaaagacaagcaagggaacgacgtagtgaacatgctcgaagtcaacaccactccaggcatgactgccaccagtttcatccctcaacaggtacgggctgcaggactggacatcacagaagtgttgaccgaaatcgtagaaaaccaattttagacttaccatgcataccccaaaagaatttgatgacattcggcctttcgagccagaggagcttccagaagtttacaaccggctgctcgacaatcagcaatttcagcgtgtactttcctatttctatcccgatgtcccattggagaagataggtgcacgcatgcgggcttgcacaacaaacttagactttcagaaagttttcgggtacgaatttgtgacgtttgtgctcaaccgagctgcaaagagctgggatatgaaccacagtgccatcagccctgaacagaactacacgttcatgagtaaccacagagacattgtactcgactctgccattctgtctaagttgctcatcgatgcggggtttaagaccacctgtgagattgccattggcgacaatctgctatcacttccttgggtgaaagacttggtgcgagtgaacaaatcttttatcgtcaagcgcagtgcctctttccgtgaaatgctgacttccagcaaaacactgtctaagtacatgcactttgccattcaggaaaagaaagaaaatatttggattgcacaacgggaagggcgtgcgaaagactcggatgacagaacctctgaaagtattctaaagatgatgtctatgggtggcgaaggaagtatcgtggagcgactcacgcagctgcatatcgttcccatgaccatctcgtatgaatatgacccatgcgactatttgaaggctgccgaatttcaactgaaacgcgacaatcctgattggaagaaaggaccacaagatgatattatcagtatgcagacaggtattatgggctacaaaggacacgttcattatcactgctcctcttgcatagacgagtatttgcaaaccttagattcggagatgcccaagaacgaattgtatgccactattgtgcgtcacatcgaccgagagatacatcgacactatcgcctgttcccgaacaactacattgcgcatgaccttttgacaggaaaggacgagcagactgcccattatcagcccgcagataaggtcaactttgaacgttatctctctgaacagctggagaagattaccgtgccacagccagacatcgcctttttgcgtgagcggatattgaccatgtatgccaaccctttaagaaactattgggcagcatgcaaataaaacattgggtactcttcgctctactcgggttgttcacagcctgcaccatcaattcctatgacaagggagatgggcgctactcgtatctacgtgccgagatgacagaaatccatacctcggcaaagaataaggtcgactatgcatggacggatgagggaaagaagttatctttcacggtaccgttcacttgttcgtgggctcatgtaccagacagcgtgtatcgcgcgatgctatattacacccaagacgaagaatcgaccgtaggaatgacagccctccatgtatgggtgttgcgccctctaaaggcaccgaagaggattccgtccgaccctgtgcagttagaaggttgctggatgagtaaatcgcaacagtacctaaatataagaattggtgtgatgacgggcactccagaagacacgacgttacaacagaaagttggaattgtcactctaaagaacacgcatcatgccaatggcaaggagacccatgacttgcgcttattccaccatcaaaacaacgttcccagctattacgcacgcacattttatatcagcatccccacagacgtttataaaaaaggagataccctcagtttttctgtaaacacctatcgcggttgggtgaagaaaagctttgctttgaaataagagcagaaagagctttgaagcgataagaaactttgaaatttgcgtttataaagcgacgttccacccacccataggtacagtagcaaaaaggggatacaccgtttggcatatcccctttgctcattattatatcgagagaattattttccgttcaccaatcgcatggtgtcgcgtgcgatgacaatctcctcatcggtaggaatcacacaaaccgttaccttggaatcgggcgcagagataatggcttccttgccacgaaccttgttggcttcggcatccatcttcacacccaggaactctaatccactacaagcctcgaggcgagtaccaatctgattttcgcctacgccagctgtccacacgatgatgtcaacacctcccatgacagcagcgtatgcaccgatgtatttcttgatgcggtagttgtacatcttcagtgccaactgagcttgttcgttgccttcatcggctgccgattctatctcacgcatgtccgatgagatgccagtaataccgagcacaccactctccttatttaggaagtctgccatttcttgaggcttcttgcctaacttctccatgagataggtaacagctgaagggtcgatgtcgcccgaacgcgaacccatcatcacaccagccaatggggtcaatcccatagaggtatcgatgcacttaccgcctttgatggctgttacactggcaccattgccgatgtggcaggtgatgatgcgcatgtccttgatgtccttgcctaagaattcgcacacacgttgtgacacatatttgtgactggtgccatggaatccgtagcgacgcacgtggtattttttgtacagttcgtagggaatggcatagaggtaagcataatcgggcatggtgctatggaacgcattgtcgaacacacacacctgcggtgtggtgggcatgagtgcatccacggcacgcaagccacgcagatgaccagcattgtgtacgggagccaaatcgcacaggctctcgataccgtcttctacgtgctgatctacaatcacgctatcctcgaacaggtcgccgccttgcacaatacgatgccccacggcatcaatctcgtttaatgacttgatagccccaatttcggggtcggtgagcagagagaacacaaagttcacgccctctttgtggtcgggcatgtcgtgcatgatcttctttttctcgccattgggcaatgttacttttacaaaggcctcatcgagaccaatacgttctacacctccttgagccaacactgactcatcggtcatgttgtagagtttatacttgatagagctgcttccgcagtttaatactaagatgttcatttttaagtttatgagtttgttagtttgttagttgataagtttttttagttcacgagttgaccagttgacgagttcacgagttaaaagagcctctccccctgccctctcccaaagggaggggagtaggtggcttggcatgtttgtaattatgttagttcacgagtttacaagttgacgagtttaccagttaatagtttttttactaaatttacaagtttaccagttgatagttctcaagcaaaaagtctatttactcgttcacttgttacttgtcaactcgtcaactaaaaagtctatcgacttgtcaactcgtcaactaagaaatctatttactcgttcacttgtcaacttgtcaactcgtcaactataacgaagtctcctctttcttggcatcttgtgcctggcaagcggtgatggcaaccatataatagatatcgtctaccgagcaaccacggctaagatcgttcactggacgtgcaattccctgcaagataggtcctatggcaatggcattgcccaaacgttgtaccagcttatagccaatgtttcctacttccaaattgggaaccaccaatacgttggcattgccagcgatagcacttcccggtgctttcttttgtcctaccgacatcactaaagcggcatcggcttgtaactcgccatcgattttgagttgtggtgcacgctgctttgctaattttgtagcttcagcaaccttggacaccacttcatgagaggcactgcccttagtagagaagctcaacatcgctacgcgtggttccttgaaacctgccacactctttgccgtttcagcggtagtcacggcaatttgagccaactgatccacatcaggaacaggggtaactgccacgtcacccataaccactacaccattttcgccatactcctttgcctgcgtaatcaacagcatggcaccactcacgcaagtgacaccgggcgcacacttgatgatttgcaatgctgggcgcaaagtatctcctgtcgtactcaaggctccgctaatctgtccatcggcaccttcggtcttgataatcatgcaacctaagtataaaggattcttcaccaactcgcgtgcttgctcaatggtcataccctttttctttctaagttcggctaacagcgaggcatattcttcactcttgggattgttttcagggtcaatgatagtagccttgtcaatattcttcagcgctcgcgcttctgccattttgtgaatctccgttgggttaccaatcaagataatgtctgcaatgtcgtcggccaatacacggtcagcggcacgtagcgttcgctcctccaatgcttcggggagcacaatacgttgtttgtcggcttttgctcgctcaacaatttgctgtaataaatccatgatgttgttatttatattttgatttgtgtcataatagcggcatccacatgccttcaacctctgctggacaccgatgttaaaagaagtgggaacccattggcatctatcaagattgcagttgcaaaaataacaaatattatcgacatgcggaatgaaacgcccataaaaataccaaacatcgcaaaaaggactgtattccacgaaagaatacagtcctcagtttgtattttgaatctacttgatgagggcgtccatctctttatagcaacagcgctatagaaggacgttaccctattaaggattctgtttcaagttaggattagcattgatttcctttacaggaagctgatgcaagaattccttggcgtctgttgccatcttcttttgtgcagaagccttgtggttagaaggaactacaacctccttgccatctttatctatcgctttatagcccttggtgcggtcaatggtttccttccagcgcttcatatcaaaccagttggtaccttcgccccaaagttctatacgacgttggaaacgaacttccttgcgaagtgcgtcttgtgtagcaggagcctcgaaagcagggttgcgttttttagcaaaagcgttaagctctgcctgtgcttcgcttaatttgttttgttcaaccaatgcttctatttcgagcaagatagggtcttgaacgcgaataaaacaataatcttgttccataccagcatcaccagcgataaacttcacctgttcaaaatcatcgagtttatccagtgatttcatttctggattgtgggtttgagcaagcattgaagatgctacatcaggatattcttccttattaatccaaagttttctacgtgagtcggtcttcggaatttgattgtacagatagttgtaaatcagttttgtctttccacctgcagcatatccacgagccaagaagtggtcgatatggctccagtaagatgcccacagtgtagagttttgtgagttgatgtcatatccccacaagatatcagcctgaccaatatcccatccacgagcaggttcggacaccttatcagatccaccttcggcagcaatctttgcatatttttccacattagcccaatcttccatttgtgcataagccttagccaaataagcagcagccacggcacgatcggcatctgtgcgaacacctgtgttcttacagttcttaacagcaaaggtcaaatcctcaataatctgtttgtacacctcttgtacggtagcacgagacaggttctggtcagtcgatttcaaagccaaaggcacgcccaaagcagtttcgtgtcctttgtacgtatgctgatagaagttaatcaagtggaaataagcaatgccacgaagtgccaaagcctcaccttttgcagccaacactccagggtcggttgattcttgtgcaaagtaagtctccaagtgcagatttacctttgcaatgatttcatagaactgtccccatgtagaacgggtacggcggtaattctccatacggttatcgatttgataatcaaactggaaccagttccaattttgataagccacatcctcacacatcatgtcagtagctatctggaatgctttcaaaccgaaatcatcgtgggagtcataaaaatcttggaaaatcgtatagatcttcgcaatggcagcctttgcaactcctgtctgtgtctcgggattagcaatcaattcatcgtgtcgctgctgagtttcatattcagaaacctcgggatcgagattgcaccctacgataccgaacgtgaaagcgagtgcagctgcaacttttatataattcttcatatttcttatgttttatagtcgtttataaagctgtttcttataaattcaggttgataccaaacgagagtgcgcgaacagcgctgtttacactatattgctgattgccgctgagcacgattctcgggtcaaggccctttctctttgaccacagtcccaagttgtcggctgcgaagtaaagacgaagtccctggattttagccttattcaacacactctttggcaatgagtagcccaaagtaaggttattcaagctgagataagagccatcaataaggaaacggtcagaaccctgagtgagactttgattttggttatgcaaacgtggaacgtcggtgttggtgttctcgggtgtccagtggttcaggatatccttgtgccagtttgtacctggtgtacctgacgacattaattgacgataactgccatcgtaaacctttccgcccactctataagagaattgaaccgagaagtcgaacccgtaggctgctgcgttcgcatagaaacctcctgctatttttggcaacgccgagcccacaaactgtctgtcctttaacgaactacggtagtctttgctggctactttctcaaattgattttctttctcattccagcgccagtacatttgatcaccattctctggattgacacctgccgatttaaccatgtagtagtcgaagataccaccttgctccttcaagatacggttacctttggagataccgtcttttctgaactgttcgggcaattcggtaatcttgtttgtgtaagtagttccattcacacctacattaacattgacattgcggtcgttgtacacgttagatgaaaggttgaattcaaaacctgtatttaccattttaccgaagttcactggttcagaatcgaatcctgtcgttgaagagataggaaggttaaagagcatatcggatgtacgacggctgaagaagtcgagttcaccagctatcaaacctttccataatgagaattccaaaccaacgtcaaagttgttattcttttcccaagtaatgctttcgttacctttataagcaggtccgtaaacactttcggtacccgtagaggcaatacgataaaggttggtatacggcgtataagcacgcaaaggaggatccgtatttggcaagtacagatagtcattaccctgtacaccgtagctaacacgcagcttcaggttttggatagcatcaacgtctttcaagaagttttcctgattgatgcgccacgatgcgcccaagctccagaatgtaccccagcgatgatcgggatggaatacggaagaaccatcacggcgcaaagaagcagaagcgtaatatttatccatgtagtcggttgttacctgtccgaagtagccttctaccttatattcgcgaccataagagtctaagtcggaaatgttggcacccgaacggaattctggcaatgtaggatcgagcaaccctttcttctcgccttttaagaagttggatttctcattatagttttcatgtcccagcatcacatgcacaccaaagtcattgaaagtcttgtcccatttcagtatttggttccagttgagcgacgtagtttggttcacctctttattaaggataccaccataagcctgtccatcaccaacgagtgggttcatcatgttggtccaacgccaccagttaccattaaatgtagccgtagagctaaacttaaagttgtaaggcagtttcacatctacacgcgcgttttgcgtgaggtagtagttgatatttttcgtaatattgagttcggtttgccgaatcaggttcatacctccagcatacattcgagactgagaatcgtcgtaaaccatctctccatgagcatcacgcaaaatcttaccatctttatcatgcttgaaaataggatagataggcgcaatcatacggctccacataaacaagttactatagttgccttcctcatattgcgcaggattttgtgcagtagtcctggcaaattgcgaagaagcaccgatacgtaaccagtcggtaatatctgaatcgtatgacatacgagtcgtcaagcgctcaaatttagtcttcatactgaagccacgatcattcaagtaacctacagagaaatacactttcgacttagccgaacccttggtgatactcaggttatattcttcgcgtgtcttgggttcatacaatgtacccatccaatcgttgaagttggcagcatcttcgtagcgaataggtgctgtggtcagattacctttttcgtcaactactttgtcatcgggtgtactatacacattatatcccaactcatctatcaaattagccgaagcccattgtccagggtttttctcaggttcatcagcataagtaaccgagtttttgagtccctcccaagtaagtttataatacataccggggtcggtaatgatgtcatattcgggaacagcacgctgattggtaccaatgcgggcatcgaaagacacctgaacttttcccttgttaccgctcttggtggtaatcatgatgacaccattggcaccacgtgcaccatacaaagcagcagaagcagcatctttcagtacgttgatgctctcgatatccttggtgttaatagcgttaatctcgccactgtaaggagcaccatcgagaataatcaatggtgaactggaagcgttcaacgaaccgataccgcgaatacgcatcgttgttgacgatcctgcacgtcctgagggagatgtaactgacaaaccagcaaccataccctccaaagccttagaagcatcggcagcctgcactttctccaatttcttagagtctacattcgttgcagaacctgtataggtagatttctttactgtaccataagctacaacgattacttcatcgagcttactatcatcgcttaccaatctaatggtcatgttgttggtagcaacaactgttttggtcaccattccaatgtaagaaaccataagttttgcaccagtaggtacactcaaggtaaacttaccctcaatgttagtagcggtaccatttttggttccctgaactacgacggaggcgccaacaatgggctgaccatcgtccgcagaaatcacagtaccgttaatctgtgtttgtgccattgccatacctatgcttaggaagaggcaagcgagaaacaatgttagtcttttttccataagttctctttttagttaattaatgttttaaggttaaagataattctttacattttaagcaaaattggcttcaaaacaatgacctcgttgtctcggcaagcttgcttttccttttagatttattactaccttttctcaaaagttgtaaacaataacttgcacctgtattttacttgatattcgcaaaaataaatcaaatttttagaataagcaagcaaaacacaaaaaaatgtttaatcttttctcaaaaaactaacaaatacaaaatcaatcatgctatggaataagagtcttaaaattcaataaagacaacgaaaaagaaaatataatgacaaaatgataccaataatgctgataagaatagcaaagtggttgtttgaaatattttttcctaacggcttgcaaaaacgagtaatgaagagaaaaaagcacccatgttgctaaaaaacaggaaagatggcaggaaaaaataaatataacactcttcaagcgtcattgctcacacgcacggagataagaataaggtgtcaagatggaccctgcacggcaagcccgattttatggtactttcaggtggcgttcttataacaatgtaataacgcccttactccatggagataacagccttatagtaatgtaataagcaccttatctccatgcttcagcgggagcactttggtgaaacgtgtaacttattgaagatgttgatgttaagcatttcattaaaaatcatgatttcatcttttcttgcatttgctcgatacactgcgcaatgtattgcttgaactttgcatcgtgcaaaatctcaatgtcatgaaaaagtcctaacacaaatctgccaatgcccaaataactcaccatgtcggctttgaaaatccagtgtttgccgtccttatcgggtgcaacataaggttgagccataggatattcttcaatcaatatattgtatgctaactgtccgagccgcaacttgatgggtagtttctggtcgccactgaacataaaaatatcggtgaaaacttcgcggtgcttgtcttcgttcatccaaaagacatccatcgtatctatgcgctgtatacgagacaacttgaaagttttgcagactcccgactggatttcataacagcgcacatccatatcgtcgttcatcagcaagaaaggctctaccatgcggtcggagacggtacgactgtgcggagaagaataacctttcagcaccacaacattcttactggcaattgcctctttcaacgcccggatatgttggtggatgcgcttcagggcggtgggagagaacgacccttccaacccataatagcgatcaagtttggtcttgagcagggtggtcatcatatccttttgatgactgttttctaacaagcggcgcagatagcgggcttcatctaccgtcagtgcaatattggagtgcaggcgtttgaaaaatcgactggagggatcgatgcgataataggcgcctgtcttcactacttggaaaccgctcctacggaaatattccaaataataatacaaattgcgtcgagagacatgcagctgatccgccaactgctgtgctgtataattattgttatcggtgagcaacagcagtaaatcgagttcgtttccaaatttatccaatcgcatgagagaagagttggtgagtttttgagttggtaagtttttgagtttttgagtttttaagttggtgggtttttaagtttttgagtacttaaggttgtgagttgatgcgttaatgaggacgtccttgcaggtttctttctatccacatcaaaataacactcaagcattagaaatccaataacagttcggtgctacccaaaagattgtacgaacgccgatgatagggagtaaccccatattgctgaatagcggctcgatgctcacgggtgggataacccatgttcgactcccaatgatattgaggatattcttctgccaatcgatccatatagtcgtcgcgaaatgtttttgccaaaatgctggctgccgcaatgctttgatatttcgcatcgcccttgacaatcgtcgtataaggcatgtcgtgatagggtgtgaacctgttgccgtcgacaataatggcttgcggtcgaacctttaactgatccaaggcacggtgcatcgccaagaaactggcacgcagaatattgatttcgtcaatttcttggggtgaaacctcacccactgcccacgccacagccgcttgcatgatgacttcacgcaactcgttgcgcttcttccgagtgagctgtttagaatcgttcagcacatgattgtcgtaatcggaaggcaaaattacggcagcggcaaagacacttccggctaagcatccacgcccagcttcatcgcaacccgcttcgataagatttgggtaataatgagatttcaacacgtgcttcattgtttatttgtcaaattatgttaacctacaacatcaattaactaaaacgatatatggtggaaaaaccggttccatatctctccgtatttttgcagtcatcaagaacatcaacctttatatatatagaacaatggaaaagaatatcatgattcaagcagagaaaacgacccagaacgagtttaccaagaaaattgtacatcagctgctctcacctttggcgtggcttcgccaatactacgagcaagtgacggagcgcaagcttagccttcaagagacgggatggctactgaatgcccaattggcatttgtgatgaccgtgtttcccattgaggcgccatttgccactcgacttctctgttgcttgtggctgctccatgcggtgctgaagtgcaaacagtttttgtaatcagaacattttgctcacacgctcgatacctgccaccaagacgtcgatttcttctttggtggtgtacaaaccaaacgaagcacgcaccgtacccaaaatactcaatcgctccatgagaggttgggcgcaatgatgccccgtacgaacagcgatgccaagacggtcgagcaaggtgccgaggtccatgggatgaatgtctccgacgtgaaaactaatgacggcatctttggcagaagaagtgccataaatccccagctggtcaatttgctgcaattggtgggtggcataggcagtgagttcttgttcgtgttgcgcaatgttctccatgcctaaacgagacaaatagtcgagtgccactgccagtccgtgagtagcgatgtaatcgggcgttccagcctcaaacttgagtggaggacgttcgaacgtcactttgtcaaaagagacatgactaatcatctcgcctcctccctgatagggtggcaaacggtcgagccattcttccttaccatacagcaccccaactccagtgggtccgtaagctttatggccgctgaacacgaagaagtcgcaatccaaaagttgcatatccacggcaaagtgaggtgtgctttgcgctccatccaccataacaggtaccccatgcgcatgcgcgatggcaatcatttgctgaacagggttgattgttcccaatacattgctgacatgggtgatactgacaaactttgttttctctgtgaaaagctcctcgtacgcatccatgatgagttctccctcatccgtcataggaatcactttgagtacaatgccacgcttcttggcttgcagttgccaaggcacgatattggaatgatgctccatgactgacaaaatcacctcatcacctgcctgcataaaagtttctgcaaatgtagaagcgacgaggttgagtccctctgtagtcccccgtgtgaagacaatttcggcaggcgacttagcgtgaataaactgctgtacggtttgacgagcttgctcgtgtagttcggtagcctgctgcgacaaccaatgtacacctcgatgcacattggcattgacgttgagatattcgtctcgcatggcatccaagacacaaagcggcttctgcgttgtcgctgcattatccaagtagaccaatggctgcccatacacttttcgtgataagatagggaagtcttttcgaatggaagttatatcatacataattacagatacaaatcattgatacaaggctggttctataaattagctttgttagattttgagcttatttttgaggtcaaaatgcaagagagtgaaggagtgtagcgagctacacgactgaacgaacttacattttgaaccaaaaaagaagccaaaagataacaaaacgtatttcataaacatttgatgactatgtgcggtggtaatttatagaatcagccataacaaagcgttactgacaatttctacaccctgcacatttattaagctcacccctgaatcgtttttctactaaataatggagacggtctttcaaaggtgccaactgaatgttatccaccacttcattgatgaaagcaaactccaacaagagctttgcttccttttggctgatgccacgttgttgcatatagaacatcgcttcatcgttgagctgtccaactgttgacccgtgtccgcacttcacatcatcggcataaatctccaattcgggttgcgaatacatccgtgcatgcttggtggtacaaagattctggttgcgcatctctgagtttgtcttttgtgcgtccttctctaccaagacacgtcctgcaaaggctcctgttgcctgatcgtccaacacatacttgtaaagctcacgactcacacaatgcggaacggcatggtcgataaacgtattgttatcaatatgttgctgcttatcggcaatcacacaaccattgcacacacattcggctccctcgccacgaaagacaagctgcaactgattgcgcgtaatgccattgtgtagggtcagcacgttgtgattgaaccgactgttggcttgctgctccacataaacattacttatcctggtgtttctttcgtgcgtttcttccatacagtacaagtcgagggaagcattttcacccacataggcctcaatgacctgtgttgccaagaagcgatggtcgtcaatcgtatgatcacagaaaaggaatttggcttctgctccttcttccatgacaatcaacacccgtcgattcaccatcaagtcgacatccgagcggagaaggttaatcacctgaaccgccttgtccatttggacacctttggagacataaataaacagtccatcttgagccaacatggcatttaaggctgtgagcgcatcctcatgggtcttggcaatctgtccataatatttcgccaccaagtctgacatctccaaagacgcctcacgaagagaaagcaccttgacgccttcgggcaaacctactttgggcagggctttggtgtagaaagcatcgttcaccacaaagtaaagcgatgtgctcaaattgggaacatcacatttgaaagccgcatatgggtcgacaggtatttgcaaccgattcaagttcaaaccataattcggttcaaacaatgcgttgatatctgtatatcggtaacgttctatcttgcgtgagggaaagccttgctgcttaaagtctttgaaagcttgctctcttacatgattcatgaccggcgaactatgttcgcaaatcatcgcatgcgcatctgtaaacaagtcgatatattgtttttcgcttttcattcttccacctccgccttgatccaatcgtagccacgagcctcgatttctttcgctaattcaggtccacctgttttaacaatacggcctttgtataagatgtggataacctctggcttaattaaatcgagcaaacggtcataatgcgtaatgacaatagtgcttgtttctggcgttttcagtttgttcactccctcggcaacaatgcgtagcgcatccacatccaaccccgaatcggtttcgtcaagaatggacaaagtaggctgcaacatcgccatttggaaaatctcgttgcgtttcttctctcctccactgaagccttcattcacgctacggtttgaaagtttgctatctagctccactatcttgcgacgctctttcatcagtttgataaaatcgcctgcactcatgggttccagtccctgatatttccgcttctcgttgatagctgctcgcataaagttggtcatagacactccgggaatctccacaggatattgaaacgaaaggaacaacccctcatgcgccctatcctctggtgccattgctaataaatctttcccattgaaagttacactaccctctgtcaccttgaacaagggatttcctactaacactgcacttaacgtactctttcccgaaccattgggtcccatgatagcatgtgtctcacccgtctttacacacaggtcaataccgtttaatatctttttgccgtcaacttcggcatgtaaattctttacctctaacatcttcaattggattgaataaaataaatattttatacgtgtaaaactccctatcccactgttccttccagagatacagataatagtttctgcgcctctaccgcaaattccatgggcagtttgtttaacacttgtttagcgtaaccgttgacaatcagacctacagcttgttcggtcggtatgcctcgctggttacaataaaaaagttggtcttcactaatcttgctggtcgttgcctcgtgttctacaatggcgctgtcgttgtgaatatccatatatgggaaggtatgcgctccacaatgacttcccaacagtagactgtcgcaagagctatagttgcgagcattgtctgcattggcggtggctcgcaccagtcctcggtaggagttctgactatgacctgcactgataccttttgaaataatcgtactcttggtgtttttacccatgtgaatcattttcgttcctgtgtcagcctcctggtagttattggttactgccaccgaatagaactccgcctgcgacccgtcgcctctgagaatacacgaaggatatttccacgtgatagcacttcccgtctccacctgtgtccaagacaatttggagttgacgcctcggcattcacctcttttcgtcactaaattgagtacaccgccttgcccatgcttgtcgccaggataccaattttgtaccgtggaatatttcacttcggcattattcattacaataatctccacaatggcggcatgaagttgattctcatcacgcattggtgccgtgcatccttcaagataactcacataagcatcgtcttcggcgacaatgagtgtacgctcaaactgtcctgtattacgagcgttgatgcggaaatacgagctgagttccatcggacatcgcacgcctttagggatatacacaaacgagccgtcactaaaaacagcactattcaatgccgcaaagaaattatcacgataaggcactacgctacctatgtattgcttcaccaagtcgggatgctctttgaccgcttcacccatcgagcaaaagatgatgcctttctcgcgcagcttttctttgaaggttgttttcaccgacaccgaatccataatggcatctactgctgtgccactaagtatcaagcgttcttccaaagggattcccaacttatcaaaggtcttttccagttctggatcaatctctttgttctgcggtttcttcgccattgggtctgcataataagagattccttgatagtctatctctggtaaagtgacatgtccccacgagggttgcttcatcgtcaaccaatagcggtaagctttcaagcgaaagtcgagcagccaatcgggttctcctttcttgcttgaaatcaaccgaatcacatcttcgttgagtcctttttctataatttcagtatgtacatctgttgtaaatccgaactcatatttttgttcggcaacttgtctcacatactcgttgttacgattatttacttcttccataatgtcaagacaggggcatccctgtgtgtcatggatccccctgcatcattttgtatatattgggtcacaccactgtgaccgcttcaattatctctccatatccctcctgacaatgtgttatatcattgatgcaacacgatgagcaggccacttcgcagagacgagtctacgaagttaaggaatatacctctttataatgtttgcttcacctctacctctgtgaaggtttcgatgatgtcgccttcaagaatgtcgttgaagttcactaagctgataccgcattcgaatccagtagccacctctttcacatcatccttaaagcgtttcaaagcattgataggtgcggtatgaactacaatgccatcgcgtaccacacgcgctttgtctgaacggtgtacctttccttcggtgacgagggctccagcaacggtacccaccttggaaattttgtacacctgtttcacttctacctgaccggtcactacttccttcttgaccttgtccaacataccctccatggctgccctgacgtcatcaatggcatcgtagataaccgaataggtgttaatttctactccattctgctctgctaacttacgagctgcagcggaaggacgcacttggaagccaacaataatagcatcggatgcatcggctaaggtgacatcgttttcactaatctgccctacggacttaaagatgacattgacattaatcttttctgtcgacatcttgataaaggaatcgctcaatgcctcaatacttccgtcggtatcacctttgacgataatattcagttccttaaatgaacccaatgcgatacgatgggagacatcactcaaggtcaagcgtttctgtgtgcgcaagccttgttcacgctgcaactgcatacgtttgttggcaatgtctcgaacctcttgttcggtctctaacacatggaactgatcacctgctgttggcgcaccattcaatcctaagatgatagctggctctgctggctttgcctcttcaatgcgctgattacgcacattaaacattgccttaatacgtccccaactggttcctgcaatgatatcgtcaccaactcgtaaagtaccattacttaccaacacggtagacacatatccacgtcccttgtccaaactcgactcgatgacactacccgttgctcgtcggttgggattggctttcaaatcaagcatgtctgcctctaagagtaccttctccaacaattcattgacaccagtacctttcttcgcactaatttcttgacattgatattttcctccccattcttctaccaagaggttcatttgtgccaagtcttcacgaatcttatcaggatttgcaccgggtttatcaattttgttgatggcaaataccattggaacattggcagcctgtgcatgcgctatcgcctctttagttgtcggcatcacactgtcgtcggctgcaataatgataatggcaatatcggttacctgcgtaccgcgggcacgcatggcagtaaaggcttcgtgaccaggcgtatctaagaaggtgatattacgcccattctctaattttacgttataagcaccaatatgctgggtaattcctcccgcctcaccagcaatcacattggtgttgcggatatggtccagaagtgacgtcttaccatggtctacgtgtcccatgacggtgacaatcggtgctcgcgacaccaaatcgttttcatcatccatctcttctgccacagcttcttgcacttcagcactcacatattcggtcttgaagccaaattcgtctgctaccaagttaatggtttctgcgtccaaacgctggttgatagacaccatcaatcccacactcatcagggttccaatgagcttgttcacatccacatccatcatggacgccaattcgcttacagtaacaaactcggtaagcttcagtattttgctctctttacgctctgctctttcctccgcactcatgcgctcttgtatggcatcgcgtttctccttacgataacgtgcacccttcttggtctgattgcccttactggtcaagcgagccaaggtttcttttacctgacgtgctacttcctcctcattaacctctaaaggtttctgattgtagtttttgttgcgagttttgcgattattctttttgttggcattacgaccgccctcttgactgttcggacgattattacctgcgttgcctccgatttgctttgaggcagcattgatgtctacacgttcttggttaatgcgtacgcgcttcttacgtccgccgcgcttctcctcacgctctttacgtcgttcttctttggtctttttcttgggtcgtgtgctctggttgattgcactcaaatcaatcttacccagcacattcacctttggtgcattctgcattttcagctcacttttggtctgaaaaagctcatcgccatcattcttagcatcgtcgtccacctctgtttctttttgaggtgcttcctcctctttgggttgaacttgcttctcaacagttttttctaccttcaccttttctttctttgatgcaggttttgcttcctttggtgcaggtgtttcttccttttgaggtgtttcagactgtacaggagtttcaggtacagacgctggttgcgctacctttacttctacaggcttcacagtttctttcttttcaggctccgagctgacggcagcagctggttttggagcaggctcttgagcgacttgtggctcctgaggcgttgtatcttgagcaacaggttctttggctgcggaggtcttccctatcgaatccaaatcaatcttgcctattggattgtattgttgccgcgaagaagttttgagtaactcctctgcacggttatctttaggagcggaagaggcttctttaggagtagaaggacgcttcttctccttaggttttttctgaaaaatcttttcagcttggttgcgcacttctgcgtcttgcttaaaagcttccacgagcgcaccgtattggtcgtcgttcagtttgaagctcaactcgggtttcacttctcccagctcacttttcttttcaaggaattcaactgccgtttgaagtcctatgttcaattcacgtaatgctttgtttaatctgatgctcattgatatttatttaactcttatttcttattgatgttcacacgcttattctcacaatacaattggagcgtacactctaccagtgcattgccgccaagggttgattttggaatagaatgctactgctcaaattctgcttttaatactttaatcagattgtcaacggtctcctcttcgagatcggctttttctatcaacatctcgcgaggtgcattcagcacttgcttcgcagtatctaagccgatgctcttaatggcatcgatgacccactgatcaatttcatcgtcgaactcatccaagtagatatcttcgtctgcatcggcatccgaaacctctctgaacacgtcaatggtatattcggtcagcatagaagccaacttgatgttcagaccgccacgaccaatcgctaaacttacttcttctggtttcaaataaacctctgccttatggttttcttcatcaatattgatgctactgatatgtgcaggactgagggcacgctgtaccaacaacttgatattcgatgtgtaattaacaacatcgatattctcattgcacagctcacgcacgatgccatgtacacggcttcccttcacaccaacgcaagcacctacggggtcgattcgctcatcatagctttcaacggctatctttgcacgttcaccaggcatacgagctattcgcttaatggaaatcaaaccgtcgtttatctcgggcacctctgcctctaacagacgttccaagaaaacaggactggtacgagagaggataatctttgggttgttattctcattgtctacccgcaagataaccgcacgaatcgtctcgcctttgcgatattgatcggagggtatttgctctgattttgggagaatcaactcattattctcgtcgtctatcaacagtacttcgcgtttccatatctgataaacctcgccagagataatctgccccactcggtctttgtacttattgtacagcgcatcgtgctccaactccaataccttcgacgccagcgtctgtcgaagattcagaatggcacggcgaccgaattttgaaaagttaatgggttctgatacttcctccccaatttcataatcgggttctatttccaacgcctccttcaaggcaatctctttgttttcatcttccacctcgccgtctgcaacgacaatgcggttgcggtatatctcaaaatcacctttatcgggattgacaatcacatcaaaattctcatcgctcccataaatcttggccaaaacgttgcgaaagctctcctccaatacgctaaccaaagtagcacggtcgatatttttcgtgtccttaaactcacgaaaagtgtcaatcatactaatggtttcttcttcactttttcttgctgccatagcggtatattgttataatttataattcaagttgttacaataggttcagttatttgaaactaatcaaatacttggtatatttcacttggtccatttggaacgcatggtcgacggattgtatttcagggcgtttctttccctctatttttactttttcatctaccgccacaacaaagtcatttccattcacagacttcaatgtgccttgtacttttttcccatcacgatccagtacctctacttccttacctataaaattgatatactgctggggcaccttaaagggttgacctaatccagccgaacccacttccagctcgtaatcttcttcgtcacgactcagcctactttctatatatcggctcagttctacgcaatcttcaatccatacgccgtcaacatggtcgatttcgacaactattttgtcatcggggctcacctcaatatcaactaagaaatactctttatcctgaagccactcttcaaccaccgcttttacgacacttttatcaatcatatatatttaattagaacgatatattcgttgtccttacaacggcaaactccttgtgataaaggagctacgccctacatccaaaataaaatgaggagctttcaacgaagcccctcattccactgaacagtgcaaaggtacgtatttctgatgaaacacccaaataaaataccaattattcaattctaaactgatacattttctgtatttttctatctcaatgagttaaggagcttatctctcctttttttattgtttgttctaacttgcttgacaacattcaaggacagattgcatctcactctaacaagcttgatgcgattctattccgacattgatatgtacaaaagttacacctcgattagtgtcccatgcgtgaggtatcaacctgctttactttcttttccttgtaaccgccgaacttatagacaacagcaaaagtaactgtcgaccaattgttgttaagtttcatacgaaagtcttggttgccttgcacggaacgggtgtcgtattcgccgttgaagatgttgttgccattgaggcgcagcccccattttccatcgtgtgacgaccattgcagtttggcattcatttggaagatgggactgatgtcgtaaactccttgtattgcctttgactgaaagaaaggattcagaataagacgcaagtcctgtgttttgcaaagttttaccgatgcagtacctccaaatatggcagaaagtttctcacgatcgaatggcaagtcgaagaaacgactgctcttatcgtgcctataagttcctacggcaaacacgtttcctttgagccatttgcctgcactgaagatggcagaggcctgcaatccgaagctatttgaataatcgaagttggtttctttcatgatgacagccactcggtctgctgtctgataaggcaactgcacggaataatctggcttcagacttgcgaaagccatcagcgtataacgtctttttatctgccacatcaggttgacattataataggagtatggtttcaaatcgggattgccatgtacctctgtgtaggtggatgagtaaaacacattgctcatggttgaccaatagctcggaaacactgaattggaattgaaggagaggttgagcaaatggttgtcgttgatgctccacaaagcattgagggtaggatagatacgccatttattccacatcggggagtggtattgctcggcagcaacggatgcttcaagactgattgccttgttgacctgcttgctgaaacctgcatacatgttccatatccgctcattgatgtcaacactactggtcgcatcgggcaagatgtttcccttcttatcgagggtgttctgatagctcttgttgctcgcaaactgtccttgcacgccatacgacaatccccatccatgtgacaatgaatgggtttggtccgccgtaaacatccatttgttgatggtctgctcactgccacttgtcaggttgcgctctgtttctgtcgtatttccatccacctgcatcatgccttcaaggacttgttgctgcggcgtgcgatagtaggtgtacgatccgctaagggtaagtccgaaaggaagtgagtagttgacatccacattgtgcagatacacatgactgtcatggtgcgttctgcttacactcaaacctgtcgtttggttgttggaactggcatttttccaatttccggtataggcaatgtcgagacgatgattcttgctgaacgcataattcatacctaatcggtagtcgtgtgtgatgccaaacgacttctgtccaatttcgtcataatagtttatacgcttgttgcccaagggatgattggctatgtgcgaagcctcacggtatgaattgccgtcaacgaattgatagtttgcatccagtccaaacttgcctctttgcatggaaagagcaagattgccaaagccagttgaatatctgctttgctgcaatccaccaaccatctgtccagacaactgattggtgccggcattatctttcgtgacgatgttgatagccatgccacgaacatgatagcgagccggcgcagacaacatcacctcagccttggccaactgtgcggcaggcatcgctttcagtctgtctgccagctgttcttgtgtcaacgtagtggcttgcccattgacaatcaacgtcacctcattgcccaagagggagatactaccagtggcatcgctgacaccgggaatgcgtgtaagagcctcataagcgttgtcggcaggcaacttttctaaaagattgtgcatattgtacaccatctttccctgttctaattttacgataggtttttctgccttcacaataacctctggtaaatccttataccatttattaatatctatagaatcgttgtcattggctacctgtgcagataaattttgaactgatagaaataatatgactgttattaaatatttcatgttttattttttggtgaagtggacgttattatagagatatgattttgactgtcacttttaattattttttaagcgttcctcaatgtatttttttactttctcccatgaaaagctgacagcgacacaagagtaccattgtcgcaggcttgtttggaattagcaaaataaacatcgtttttgatgatttctgttgcaaatatacataaatccgttggcatctaaaagatatggtgagattttttatggtcaccacggctctgtcatttgaagaatcatttttttacatcgaaaaacgctatgtgtaaaatcggtggcacgttgcacggaaggacaataaatgctgaattttctttacaaagtgcctcttataactcgcgtcaaaacatccaagggcaaagttggtcgcaaatacgcgaaatatgagcagagtttgtaactcgctgttattgagaatgttgcgatcgtgtcgtctcttttctttcctgtttttaccacttttgagcgattgaagcattgagataagcctgctatctgcatgctttaatgccgttgaagcatgtgaataacagctctaatgagtgcttccaagaccgttaagtcaatattttagcttgaagaaacgcctcatttgttaaaatcagcccatttttgttgagcatttgcctattaaatttttctattttgaagattttagatggtcgttttttggtaaaataataggacaaaagcaaccgaatgtctttaccaaaaatggcaaaaaaaatcattgaatgagtaattgttgtaacaacaaatgagagcgagcgaggaaaacaatgtcattagatttattggcgaatcaaaagaacaaagattgttttttcacaagaagtcatctttcttctataaaagagtcttacgaaaaggtgaaaaactttgtgaaaaatagagactatcttcccagttttttatacctttgtgaaagcaagttccactgacaaacggcttgctttcatgccgctggcaacataaaaataattgactaattcgcaccatctatgatgaaaaagaagaagatattcttaacaggagctactggacacatggggtctgaaggattgaaacaactgctccaacgacgtgatgaatttgacatttgcttgttggtgcttcctaccgaaaaggaccgaaaagccattgcgccttacgaaaaactatcaggcgtagaggttatttatggcgacctaacccgctacgaagatgtgcttcagggagtaaacaatgccgactatgttcttcacgtgggtggtatggtatctcccattgcggattattatcctcaaaagacattgcaggtcaacgtaggtgcggtaaagaacatcatcagagccatcaaggcacagagcaaccccgaccgtgtgcatttggtgtatatcggtactgtggcacaaacgggcgaccgtaacgaccctatccattggggacgcgttggtgatcctatcaaaattagcatctacgacatctatgcgctgtctaaagccatggcagaaagagaggtcatcgagtcgggactcaagcattgggtgtcgctgagacagacgggcatcctatatccgtccatcctcaacaagctcgaccctatcatgtttcatcaaccactcaacggtgttttagaatgggtaaccgcaaaagattcgggagtattactttcccacgtgtgcaatcatgatttaccagaagatttctggtgtcgcatttataacattggaggcggtgccgaatatcgaactgtcaactgggaattcatgcaattcactttcacagccttaaagatagggaacctcaaagatgtcgtagaacccgattggtttgtacttcgtaactttcacggtcagtggtacaccgactctgatatattagagtcgtatcttcattttagaagtggtaagattgacgagtttattcaggaaatggcagaaaaagctcctctcaagatgaaaatggcgcgctttgtagcctccaaactgataaaacacctcgtatttaagcccacagccaacaaacctttaggaccactttattggaagaaaaagaatatcgaaccccgtattacagccttttatggaagtatgaaggcatggaatgaaattgctgggtggaaacacttcaaattgtattatccttcttccaagcccatcttgttgaaccatggatatgacgaatcaaaacaactgacagagctggatatcaaagatatgcagcaagctgccgcttatagagggggaaaatgcctgtctacccaaatgactaaaggcgatttaacgacaaaattggaatggcaatgtgcctttggtcacagattcaaagcttcgccaaggcttatactgttaggtggacactggtgtccagagtgcttccccatgccatggaattacgacgaagaggcgaaacgaaatcctttctttgcccaggtatggaagcccctccacagcactgacgaacacaacgtgtacgatgagacgattgtcaaagggttgcaagggtgaaaaaggaagaaagggaaagaacttttttgaaggaataactatctttttagttgtgcctgccacctatatataacagtggcaagattcttattgtggtttatggtttgaggcaaagaacatttaatctgattttcataattagtgctgataatctgatgttgatttgcaatttgaactaaagaacattctgtacagttttcaaaattagtttcgagattcttattgttatttatggtttgaggcaaagccgctgcctattcttgaagcaaacgattaacgaccgaaaaagttctttagtcttctcttcatatcttccttacactcccgccacaccttaaggttttgtgcatactcctcttccaaacgttttctcttatcttcccgctgccactcatttttaggtgtgtactttctgcctttcgttgccaatccaacaattatccaagtaattatcaataagacaaatcccagtgtcgtcatatctttcctatttataatagtactcttgcaaatttacataaaaaccgtgattttcacacaaaaagaacaaagaattaaagagagaatgagagaaaattagcacagcgtctttactttgttaccttgttatctcaatagaaagtttatctttattctttaagggactttgagcaattttccaagaaaattgtttgatgatatactacaagaataaaatttcataaaaaaaatagagacaatctttcctcttttgtatatctttgtaaaagcaagcttcatctattaacgacttgcattccgttttgtaatataaaaaatatttgcagctaattaatacttgtagaagtaggaaatgaaaaagcggaaagataaagaacatctaaaaataagcagtataagaacatggcagttaaatcaaatgacacgaatctttctgaattacttcagacagtagctaatggaaaaagtcaattgcccgattttcaacgtagttgggtttgggatgatacaagaatttgcaaactattagaaagtctgacttctggatttccaatgggagcagcaatgtttttggattatagtttggatgcagacataaaattcaaatatcgtctatttgagggagtggacaagaaataccaaagtgtagtgccagactctttggtgttggatgggcaacaacgtctcacaacgctctaccaggtatttatgagcaaagcaccagttattacaaggacagatactgacaaagaaagtgtcatcaagagatactattatatggatataaaaaaggcaattgatctggaagcagaccgattagatgccataatatctatatctgaggataaaaccaaaacagaaaacataggcagagatatcattcttgacttgcggacgagggaagacgagtataagaacctgatgtttccattgaacctaactttttccgacacaatgaattggatttgggggttaatcaaatacaaccaagaagcaatgcctatcatccaaaagtttcaacaagagattttagagcctttaaagaaatatacccttcctgttattactcttgccaaggacaccacacctgaagcagtatgccaaatatttgagaatgttaatactggtggtgttacactcacagttttcgaactcgttactgcaaagtttgccgcatcgggtagcaaaaatcttcgagaagagtgggatatgctaaaaatagaacttaacaaacgaaaagacgatttactaaaagacctttcgggaccaaactttcttacttctatgacgctccttctatcttatctaaaaatgaagagaggtgaacgacaaactgttacttgcaagaaaaaggatgtgctgaaattagagtatgacgatttcttttctcatcttgaagacttaaagcagggctttacatgtgctgctaactttatggttaaacaaggtatttataaatcaattgatattccttataacactcaacttatacctcttgctgccatattcgcttatgataatacgaatggaaaaagattgagtttaatgcaaaatctgaatttactggaacgatggtactggtctggagtattcggtgaactttatggaagtgccaacgagactcggtttgcacaagatattgttggaatattcgattggatggaagacgaaaatcatgtcccagaaaccgttacaagggcgaactttgatgctactcgattgttgtggcttcagacacgaaatagtgccgcttataaaggagtaatggctttgataaataggcaacacccgaaagattttatgagtgggcaagacatgagcatcgccaattatttgtctgagcttacagatatccaccatatttttccacaagcatattgtacaaaagaagtattaccatcaagaaaatggaattccgtagtaaacaagacccctatttacgcagcaactaaccggtctattggggggaaagcgccaagtctgtacattcaaaccatacgtaataaaggagttgcagaagaaaagatagatgttgctttagaatctcataacataaatccaactttactcaaaaacaataattttgacgcttttattgttgatagagcaaaacggctgcttgatttaattgaaaatgctattggtaaaaaagtatcgggacgtgaaagtgattcaactgttcaatatttcggggcatatctcacagcaaatagcaaagaactttcacagcatattataaatggggctgcacgtttagcgaaacaactccacaaaggacaagttgataaagcaggagtagactactataatggacatttatctaccgttgcatcaatgggtactacatggcaagaacaagtagttggatacttacatgataccagtgaagacactccttattctgttgatgaggttttagatttgctaaatgaagaattgagagaaccgttacctatagaagatagaaaagaaattgcaacagctcttcgactccttaatcatcataatgcgccagacagagaaacatatattcgtgatataggtaaaaattctcttgcaacggcagtaaaattatctgatctgtctcacaacatggacttatctcgtctgcctaatcctacaaaaaaagactttgctcgagtggcgagatataaaaaagagtatgattatttgagcagtttatcaaagcaacttctttaagggtaaactgacaataaagaacaacattattaaactcgaacgattttaagggtataggtgaattccttccctaaagcgacagccatggcacaacattttggctgtcaaacagatatggataaaaaacaaaaaatcgctgtaaaatcttgattttacagcgattctccttgttctgaaggctaaaatggcgtgttgcttgacgtccttttgaaacctatttgtggaccagcctgggcttgaaccagggacctccagattatgagtctgttgctctaaccaactgagctacaagtccgacttattgctatgagcatgataagtttgcggatgcaaagatagaaaataaaattgatattcgatagcttggtgcctaaaattctatcattttacacatttttttgtaaaaaacgacggtatttagcgaaataaatggaataaagattgccttgtaaacgaagaaaatcccttaaccgacaaggcgcaatccaacaagcaccattaaaattccaaggaagacactgcctgcaatatacaaagttccgtataaaatatgtccgttctgtaaaagtgacagactttcgtttgaaaaagttgaaaacgtggtaaaacctccacagacgcctgtaatccataacagcttcatgtcaccttgaatagctacatttcgttctgccaatccacaaaagatgccaatgaggaagcaaccaagaagatttatgacaaaggttgcgaagggaaataccggcaaaatactcgatgacacgaatttagaaagtagatatcgggctacagaccccatggctccaccaacggcaacgtataacaaactgcgaaatatattcatgtggcaaaggtataaagaattatgataaaagagatttcttcttttaataaaaactttcgtttggtgatttttcttaaaaaaaatagtatctttaccaaatcatatttattggctttcaaatgatttagatatgtggaaaatttattaccgagcttatacacaggcacttgtatggctttccttagccttgacaacatggggtttgacttcgtgtaaggatacttttgaagagccagattctgtaccaccaactctttcggtagcccctgagctaaccactgatcaactttcaattgcgtttgatgtcattagttacaaaggaacatttaaggttgaagatgccaaccgtgacgcactcacatcgcccaagatagtgattcatgacaatcatgtcaaggtagaactgaatcaggagttcacgacactgaaaattacagatgcaagccaactaccaatatacctacaagttcattgtactcatccagatttaattcctgtctctcatagtatttaccaagattatggcgttatctcttatcatgctatcaagtatggagttggaaaaaataagattattgaaaagaccatccgaggagatgctgctcaagtttctatcaacgaaaaaggtttactcatgattaagagtctcaagccaggtaggatgtcttttttcttgacagatagtaggggagttgttaattttgttgctgtctctatccacaagggttgggacctcaccagcaaccatcttgaagtagaaggaagtcctggagaacacctttgcttctcaattctgtttggagcacgacaatggactcttacagaagaggataaggaaagtccgtttaatctcgtcattaatgatgaaaaattagaccatcttatttatccacatccgtggttacaactcgaagttccaaagacggataaagacaaagtggtgtatcaacttgagaacaaagatggtaatcgggcaaccatcaccatccatataaaagcgtcttagtattcttcaatattccgaatcgtcatgataaaatttcgtgaggcaacgctatccgacttcattggtgcgtggaaagttctccgtatggctcgagatatgatgttgaaagcaggtagacaccagtggacagcggaatatccttgtgcaaaaaatgtgatggaggatatcacgtctcatcaagcttatgtactcgaagcagaaggagaaatcgtgggatatgttgtggtagcaaagaatggagagccgaaatacaatgatattcagggacgttggctgagcgaacaagattatttcgtgttgcacagattggctatcagtccaactgttcgtggtaaaggtttagccaaacaaatttttcatgaagtggaaaatttatgcatcagtcaagcaattcatagcataaaaatagataccaatgatgacaatgtcgagatgcttagtatgttacagcaactggggtttacttattgtggtattatcaattatgataaaaataaacaacgccttgcttttgaaaagttagtatagcctttgccctttctttattggctgttgtaaaacaataaagacgctcctgttcttttgcaccaacaccatcgttgtgaagctgatgaaatatcttttcgcactttctattaaagactttcgaaaagcaaagcaccgcattgagctcaaagctccatcattttcgtccgaaatctgcaggcacttcaccccattttgctgtttcccatttgatgacaggattttggtaaacatgggtgcgtagccactgttcggctcttgtaataatctgataaagcggttcggtttgtggggtgcgtttcaatttcgttttacattgtttctttttcacccacaaaatggcattgtagctgtccgagtaaatcgttttttgtgtatcaccttgcttttctaacaatgccaaggcgtgtacgatagccaaaaactcacctatattattagtgccatgtaggggaccgaaatgaaacacttcagcccccgtagccaagtctatcccccgatattccattggtccgggattgcccgaacatgcggcatccactgcccaagcgtttgcctttacctctaagggcaagggcaataccgtgtcgtgtcgataatcaggaggatttacacaattatctttcatccgccagttcttctctacattctctctggaacctcgatacctaacaattgcatggcattcttaatggtttttgccacattcgctgcaagcactaaacgagctgtcttttcctcttctgaattggcgttaagaatgctgtaatcatggtagaactgattaaaatctttggtcagttcgtaacagtagtttgcaataccacttggactgtagtcagtgccagcctgttctaccacggctttatagtcattcagcttctgaattaaggcaatctctttatcattcagaggaacatttgtagataattgctggggcagttttatgccctctgcatcggctttccgcatgatagaacggatacgcgcatacgtatattgaataaacggtcctgtgttgccgttgaagtcgatagactcttctgggttgaacagcatgtttttgcgtgcatctactttcagaataaagtatttgagcgctcccaatcctacaatgcgagcaatgtcctgtttttcttgttcgctcatgtcatcaaacttgcccaactcgtcactggtcttgcgagcattggcaatcatctctgctatcaactcatcggcatcgacaacagttccctcgcggcttttcatcttaccgtttggtagttcaaccatgccgtatgagaagtgtaccaactccttgccccacttaaatcctaaacggtcaagtaagattgacagtacttggaaatgataattctgctcgtttccaaccacatatatcattttgtcgataggaaaatccttaaagcgcatctcagctgtgccaatatcctgcgtcatatacacgctggtgccgtcagaacgaagcaacagcttttggtccagtccttcttttgtaaggtctgcccatacactgttgtcatcctttcggaagaacagtcctctattgagtccgtcttctactttagcctttccctcgaggtaagtatctgattcgtaatatatcttgtcaaagcctacgcccaatgccttgtacgtctcgtcaaagccagcataaacccaactattcatttttttccatagcgtgcgtacctccttgtcgccttgttcccatttcacaagcatggcacgcgcctctttcatcagtgctgagtcttcttttgctttgttctctgccgtctcttcgtccagcccttcttcagccatatacttgcttttcagtgctgccaattcggctctgtaatgcttgtcaaatgccacatagtagtcgccaatgaggtgatctcctttctttccgctcgattcgggtgtctctccgttgccccatttctgccatgcaagcattgatttgcaaatatggatgcccctatcgttcacgatgttcgtcttcaccaccttgttgccgttggcttccatgatttgtgccaatgaccatcccaacaagttgttccgcacatgtcctaagtgtaacggcttattcgtgttaggtgatgagtattctatcatcacgagtggtgagtcttcggttactggtttttcgccaaacttctcatccgcatgaatgtcgttcagtaggtctacccatgcttctttggcaatgttgaggttcaaaaaacctttcactacattgaaacttgccaccgcgggacagtctctaaccaatagttcaccgatagcctttgctgtatcttcgggcttttgtttggatattttcaaaaaggggaaaaccactaaggtgaggtttccttcaaagttactctttgttttttgtagttgtaccatcgacgttggtacctcttgaccatagagttctttcactgaagcaatgaccgaacttgcaatttggttctcaattttcatgctaataaaaaataaaatttactgacactgaaacaatcttcatgcttaaaaagcatacatatcaaactttttgatgctttatcaatagaagagttatgtgctgcaaaggtacaacatttaattcaaaacaactgggtaaccgctgttttttatcccacttcccaccctcatctcttaaaatacagtcagttgatggtcgtacaccatgcgctatacgccatgcattcgtgtgctgacgtgctgaacctgcaccgtaactcgattcaaaaagaatcatgctgttggttccgaacagctcatttgatcacacgattcaaaaggtttcaactcgccctgttccaaaagattacaccattatgtaatgttcgcatacagcaaatggctcgctgtatggcgactatatcaggtctacctcaaagttggctgcttgtatttgcatgtccaatttgcgcagtttctttgcgtataggtctatttctttattcaaatcctttacgttaatggtcgttacgtattttatttccgaccgtgaatagcgatccatgccttgagatgcctgctcaaacatatcgcgcaatatggtgatgcgctttgtgagtacatctcgttcggctatcatatcggttaatgttcgcccattatgctgggtttgaatgtttgtgatatttatttgcaacatcaatttttggagttgaatgagacagtcgtccaactcttttagcaactcgtcaggatgttcagcgggttcatctccctcttgaattttaacgttctgtaccagtcgagttttgagttggtctatcttcttttgcaaatctttccgaatacttagagcttctgctaatttcatgtggatgcgtttagatggttttcataaaaggattttcggacaacatttcactgtccttcgttttgccatgcgttgagcgtctattgatgttgtacgtattcaatatcttctacccaacgtttggtatggcgaagatacaaaaaataatcgaaacagtcctccttttgagcgaacattttatctgatgcgataagatttctttcttgttttcagccgtaactacagctcaaggaatttctactaccactgcttttcctgtaaacttgtaaggctcggttgtgagaacagaattgtatttctccacctttctgccattgatatcaatatcatcgagggcaaaaataaaggtggtggtgtgcctttcgctttctcctttgtggacgacagtaacctttgttttgtagtctttacggcaaatgacattgaaatcgatagctccactgctgtttaccgaacgaacatttttgctcccgtcgaacgcgaaaggaaggtcattgctcagttggtgtgcacgcccatctatatataaggtgatgtttccctcaacaggtaacaaaaagcgctgatagtgtgaaaagtcagaaaaagtactttccgtgagatgtatcaccgctgatgatatccgcaggttgaagtttctctctgcaagactactgtcgtgagggaggatgaacagctctcttgtgatgccaccgctccatttgtttaccttataatctgactgttgaataattttgaacatcttttgttggttttggtgatagaaagatggctttgtcccaaagttagagtgaaagccaccttcctaatgaacgatagggcgaagatacaaataaaatgaataggtatgcactcttttcaaagatttttatgcgatgacgatgatgtgttggaaactctgtgccatcacacttgcaaaaccaatcatcgaaaaggaaaaaaatattgcacactgctccgtatctcaattatttgatttatctttgcagcaatcattacacgttatcaaacaaggtatatatgaaaaagacattgcgaaatattttctgcttagctacttttgcgttagtggcattatgctctgtttcttgtacgcagaagaagttcaacatcaatggcaacatcgcacaagcgaaagattctactttatattttgaaaacatggggctgaatggtcccaaggttcttgactcggtgaaattaggcgaagacggcgcatttagttttagtgagaaagcacctgaggctcccgagttttatcgtttgcgcattgctggacaaattattaacctgtccatcgactctaccgagaccgttcaggtaaaggcttcgtatccaacgatggcgtcacaatatgaagtaagtggttctgacaactgctcgaagataaaagaacttactttgaagcaaatgggcttgcaggctttggtgaacaacattgcccaaaatatcaaccttacttccgaggtcatggacgacagtttgcacaaggtcatggcagcttataaaaacgatgttaagctgaactacattttcaaagagcccatgaaagcttatgcgtactttgcccttttccaaactattcactggggtgacgccaatgtattggtgttcaatccacgaaccagtgaggacgatataaaggtttatgcagctgttgccaccagttgggatacctattatccacacgcagagcgaggagagaaccttcataacattgcgattgaggggatgaaagatgtgcgtattatccgcaacaaccaacagaaagtaattgatgccagtaagatggctaccaccggtctcattgacatcgccttgcccgataaccgtggaaacattcgcaagcttagtgatttgaaggggaaagtagtgttattagattttcatatttttgcttcaaaggagtctacccagcgtattatgatgcttcgcgaactgtataataagtaccatgagcgtggttttgagatttatcaagtttcggttgaccccaacgaacacttctggaagacccaaacagcggcattgccgtggataaatgtatatgcagccgaagatgagcaacagcaaatactgactaattataacatacaatccatacctacgttctttatcattgataaaaacaatacgttgcaaaagcgtgatgtacaaatcaagaacatcaacgcaaagatagagtcgctgttatagaatacaaaaacgaaggtggggtgtgctcacgtatggggcaactaacgcatcaacggcaggatgctgatgcgcacctacaacacttataaaaggctatcagagattcctttgaggaattgatgacggccttttttcgttacgaaagttatgggcgataatttctttggtcagtgtgaatcccttaacctcatggcatcccgagacgtctaccccggcataatccatcatgatgatgcccaatgcccctgtatgtgaaagattttttagataatgaatgacatactgattggtgacggaggcgtttttcctatagccttctgatgtcgctatccgctcgccttgtaccacgacactctctgcataacccgaagtatggttaataacaagggggcagtgcgcattttcttgctgcctcgaccttgtagagaagtccaacaaacgctttatactttggcatttcaaggctaccgcttgtttcccctcgctggtatcatagaagtcttgcacatacagcgcaccctgactgtcttcatgatataattcgcctttagattgcagtgcaaagtcgggttcgtgcgtccagccacgtacatatgcgccaatcggtttgtccgcatatacatctctactcaacagtaaaatttttccacgcatctcgcccaaggtcaaatgagggtgatatgcaacaaacaagttttcaaaagcaggggcatgtaacaactcttccatgagtcctgcccaccgctcatcgttcatgtcagcactgttttcgtggcgcatcaggacgatagcaaactccgatgggttctttctcaacgagtcgcgtagcgtgacaagtgcctctttcatggaaaggcgtgtttgccatgttccatgaaaaatagctaacgacggattgccaacggaatctatatgcacggcagggcgcaagtcaaacgccctaattcccgacttccattggttacccaaacttacatcttgagtgagcgcatattgtttgcctgtcctctcgtctttttcaacaaatccattccccgtacaagcatcgtgtgttccaggaatagacagctcgtaaagaaacacatgatcgttgatagcggctaaccaattctcggcaaacgctgtcgtagcagtacttagcaagagccatagacagctgataaaatatttgttcatggggcgaaacgtatgatgacatgaagatctattagaaactacgtaaccatgcttgcagatccaaacgcatttctacgtgatatctatacctactatcaaatccatatccatgccctccagagggataaacgtgcaaagaggcaggtacatcgtggcgatacagttcaaaataatagttcacaccatttgctggttgcaccacactgtcatcgtctgacaaagcaataaaggctctgggtgtgacacgtgttacctgtatgtcgttgctatattcacgctcatcacgcttgcttggcttacgtcccaacaaattgtcgtgcgactctttgtgggtaaaatcaggcatcatcgtaatgacaggataaaacaaaatctggaagttgggcttggcatctcctctgctatgtgttgcaatagtagaagccaaatgacctcctgccgacgaccccataatgcccacatcgtttctgttgatgtgccacgactgcgcatgctgtcttaccagtctcatggcttgctcggcatcgctgataggtgcttgtgctaccccattgggtagtcgatatttcagtacaattgccgcaatccccatgtcattgaagaatggtgcccatgcagtaccttcgttttccatggaaagtttggcataggctccgccagggcaaatcacgatggcacgccccgtagcacgcttggcatctggtagatatacgcgtatcttcgccgtatcggtatccacgccagtgggatgggggacacgtccgttccagatgttcatttctacaacacgctgcgcagatgtgctaatggtgagcgacaagaagagaaaaatggataaaagtttatttagcttcatgagtgattttattttgagcgtatggaaggagtgcacacaacggcaggggtttgcaggtcttgttagcccgaggtctattttgttaaaatggcacatcgtcccttgctcctctccagagaaagttgtgcttatcttcgagagaagccttgtgtccaccttttgcaaagataatacgcattcagttgacctgcaaacaaaatttcatcttttcacatataaaaacaaattgaaacaaaaaagcaaacttgtgtgggtttacagcttgagtgaaatgtatgaggagttattaaactttaatgatgatttggtagaggcatccgttgctttttgtcttattattttaccaaaaatcgaccatctaaaatcttcaaaatagaaaaaatcaataggcaaacgaccagcaaaaatgcgctgatttgagcaaaataaacgtcttttttagctgaaacatgtacttagcggtcttggaaacactcaatagaggtgttattcacatgcttcaacggcattaaaacatgcaaattggacgcttatctcaatgcttcagtcgcaaaagagtggtaaaattgcaaaaagaaagagatgatttaagtataacaaattcaataacaacgggttacgaaactttcttatatttcgcgtatttgcgaccaactttgcccttggtggtttacacgcgagttttgagaggcactttgtaaagaaaattcagcatttattttcctttcatacagcataccacctctatattacaaacgctgttttgttggtgcctttcggtagaaaaatagctgtcgttcacgaaagagccgtgtgcaaaaaactgaaaaaacatctgattgcttgggtgtgccgtcatttttatttaattttgcagcctatggtattgaattatatttgggtagcatttttcatcatagcttttgttattgctttgttgaaaatgattttcatgggcgacatggaagtctttcccgctatgatgaactcaacctttgactcatcgaaaaccgctttcgagatttctttgggcttaactggagtgttgtcgttgtggcttggcatcatgaagataggcgagaaaggtggagtgattgctgtcttgtcacgcatactttcacccgtgtttactaaactctttcccgacatccctaagggacatcctgttacgggaagtatttttatgaatattgccgctaacatgttagggcttgataatgcagccacaccgttaggactcaaagccatggaacagttgcagacactcaatcccaagaaggacacagctaccaatcccatgattatgttcttggttctgaacacttcaggactgacattgatacctgtgagtatcatggtgtatcgggcgcaactgggagcagcacagcccacagatatctttatccctatcttgttagccaccttcttttctactttggcaggtattgtcatcacctctctttatcaaagaatcaatcttctcaataaagtgatggttggtgtcttaggaggtatgagcgtactcgtggctctcatcatttggagttttggacagatgagtaaggacaccatgaacgtggtgagtaccagtgtggccaacattctgctcatgacgattattgtgctgtttatccttgccggcttgcgaaagagagtgaatgtgtacgatgcttttatcgaaggagccaaggagggttttacaacagctgtacgaatcattccatatttggtagccattctcgtgggtgttggtgtgtttcgtgcatcgggtgctatgaacctcttggtagaaggcatagagtggtgtgtggcatctgttggcggcgataccgaatttgtgggagcgctaccaacagcactgatgaaaccgctttcaggtagtggggcacgtggaatgatggtggatgccatgacgacatacggtgcagactcgtttgtaggacgtttaagttgtatctttcaggggtctaccgatacgacgttttacatcttggcagtgtatttcggtagtgtaaatatccgttatagccgtcatgctgtggtgtgtggattgctggcagatttagcaggagtcattgcggcaatagccattgcgtatctgtttttttagtagacaagttgacgagtagacaagttacaagttgacgagtagacaagttgacgagttaatgagttatttagtttttatgtttttgagttaaaagtttatagagaaatgaattacataaattatcaacatctccccatcggcactgaagaaacagcggaaccatcaacttctgaacttgtcaactcgtgaacttgtcaattcgtcaacttgtaaactcataaaaatgtcaaatcttaagtcattagtaaaggatacagccatttatggactgagtagtattgtaggacgatttctcaactacttgctcacaccactctataccataaaactggcatctgcgagtggagaatacggcatcatgacaaatatgtatgccattacagccttaatcctcgtcatattgacgtttggattggagaccaccttttttaggtttgccaacaagtcgggagaaaatgcgaatcgtgtgtattcctctacgcttattaccgtgggggcaggagctttgggtttcttcttgttagtacttttgttcctttcgcccattgcctcgttcatgggttatgctcaacatccttcctacatttgggtgatggcactcacggtggctatcgactcgttcttgtgcattccgtttgattaccttcgttttaagagtcgtcctatcaagtttgcatctatcaaagtattcattattgttctgaatatttcgctcaacttggtgtactatctcttgtttccagccctgtatgcttctcatcctgaattgatgtctcatatttatcagccttcggtaggagtgggttatgctttttatatcaatttggcttgttcggcactcaccatacctttgctctggaaagagttgaccagtgtgccttatcattttgatgcagcgctcatgcgacgcatgctttcatacagttggccaatcttagtattgggcttagcaggtatattgaatcaaacagctgataaaattttattcccacatatttacaagggagacgacagtttgatgcaactgggtatttacggagcggccagtaagatagccatgattatggcgatgattacgcaggctttccgatttgcttacgaaccctttgtgtttggcaagtctgaagagcaggataatcgagctacctatgccaaggcaatgaagtattttatcatctttacacttcttgcttttttggtagttgtaggttatttggacgtgttgcgttatctgataggaaaagattattgggcaggattgcaagtggtacctattgtcatggcagccgaaatgatgatgggggtctactttaatttgtccttttggtataagctgattgacaaaacgatatggggggcttatttctctggcattggatgtgcggtattgatagcgataaatattatttttgttcctcgctatggctatattgcttgtgcatgggctggctttactggttatggtgtagccatgatcttgtcgtatgtggtgggacaacgcaaatatccaatcaactatccaatgaagagtatttttaagtatgtagcgttagcagtggtatgttttgccgccatgacggtcttcaaccaaatgctcctcagcgcagcagcattgggggtaaataccttattgatattgttgttcgtctcgtacattgtcaagatggacttcccattataccaattgcctgttattggaaaatattttaagaaatcaactaaataaaaagaatgaagaaatcaacattactccttgccggactgcttgctgccaacgtagcaagtgccgatgaaggcatgtggaccttgtacaacttgccgcaagcagtgtatgagcaaatgcaagcagaaggattccaaatgccttataatgacttgtattttagtgaccatgctatcaagaataccgttgtcaacttttctggttactgctctggcgtagttgtgtcgccaaatggtttggtatttactaatcatcattgtggatttgaaggtattcgcagtcactccactgtagaacacgattatatgaaaaatggattctatgccaagtcatacgaagaggagttgccaaataaggatatgtttgtaagttttatgattgagcagaaagacattaccgctcagctgcatcaactgcacttcgatgagatgacaactgcacgacaaggggtggttttggactcactacagaacgcaatgaccgactctatcaagcggatagataaaactctgcatgtggagatagatgctttttacgaaggaaaccaatattatgccaccacttaccagcagttcaacgacttgcgactggttttcgctgtgcccaagtcgatgggcaaattcggtggcgaaaccgataactggatgtggccacgacaaacttgtgacttctctgttttccgcatttatgctgataaaaagacgaatggtccagccgaatattctaaggataatgtgccttatcgtcctaaatattgggcacctgttagtttgcaaggatataaagacggggactattctatgacgattggctatcctgggtctaccaatcgttatctctcatcctatggaattcgtgagcgtagagatgcattgaacacacctcgagcacaggtgagaggtgtaaagcaagccattatgactcggcacatgagggcagatgagggcgtacgtatcaagtatgattcgaagtttgcgcagagtgctaattactggaagaactctattggtatgaacaagtgtatcgactccatcggcatcatcaaccaaaagcagcaatacgagcagaaaatacgccaatggcaacagcaaacggggtacctgaagggcaagctcaactttgacaccatggcccgactttacaaccaacgtctcgatgtcatgaaggcttttatgttcttccgcgagacattcggtcacaccaacgagttcaccaaccgtgccatgcagttgaacaataaggaaatacacggccccaaaaacaaccccaagaagcagtacatcctcttcaaggacaacagtgacgagtgggatgctgccttggataaggacgtatttgccgcactcttgaagaattatcaagacaaagtagaaccgaagtatctgccaaaattctatcaaactatcgctaaaaagtttggtggagactgcaaacgttatgtagagtatctgtatgaaaagtcgttcttaatgaagagtggcaagcgaatctacgccaacaagaaaagctatcagcgtgatccgggtgttgtgtacagtctttatttgctggaaatcatgggacagctttctgctgataagtctcagtacgaagacagtattgccctacaagagaagtatctgtgtgcagcgaagttgcgcatggaggaggatatgccgcattattcggacgccaactttaccatgcgattgagttatggacaggttggaggcttcttgttaggcggtaaaccttcgggctattacactacagctgaaagcatggtggagaaaatgaatcgtgccaatgaggtgtatgagtatcaggcagaacctgtgatgaaagaaatattgagtgctgacaattttgggaaatatcaagacaagcacacgggtaagatgcaattatgtttccttaccaacaatgacatcactggtggtaacagtggaagtcctatgtttgatggaaatggacggctcatcggtctggctttcgacggcaattgggacagtctttcgagtgacatcaatttcgattctcgcttagctcgctgtatcggagtggacattcgttatgtgcttttgatgatggatcgttggggacatgcggatcgtttgcttcaagaaatcaacgctcagtaaagcaatggttgcgcgatagcttgtatctctgtgctttgtcatgaacgatttgacagccgcttgtattcaaaaaatggcacatcattctaaaaaaaagttcccgatatttgtaacacaatcagtgttttctacgtctgatagattagaacacctcaatggtagcgtgtctttgaaatcgtatagcataaacagttaaaaattaaaacgtatgaaaaaagtgatgatgatggcagtgttggcattcatggccatgtctgttcaagctcaaatgtcggtagacggtttgatgaaaaagtacaaaaattcgcccaaggcagaatatgtacatgtgccgaaagtaatgataactcttgccaaggcgataaagactggtgatgccgatgattatacgaaatacctcaagcacatcgacagtatcaaagtcttggatatggaggattgctcaaatgctgtcaaacaacagtttcttaaggatgccgatcagctgaaaacagcagggtatgaggtgttgatgacgacaaaagaagcaaaagagcaaaccgtcatcttgacaaagagaaacaaagcgggaattaaagagcttgtcatcgtggattcggatgatgacgatgcgacattaattcaaatcttggggaatatcaagaattcagagatacaaaagatagtcgctaagaaaaagaaaaaatagttagcctccaacccactcaacctcacatgctgtatggacgcttcacaatttaagcagtgtttcttgccatgccatgagcaattgtttcgcatggcatggcgactcactggaaacatgcaagctgccgaagacttagtgcaagagacctttcttaaattgtgggtgaagcgtgatgagttagctaccatcgactcgtacgagggttttagcgtcaccatcttaaagcatttgttttatgatgagctgcggaaacggcgcttgcaaacaatccctcaagcattggagcaactgcaaataccatatcctgatgacacggcaggagtgtttgaggaagaagacagcgaacgtttcatcataaagctgatacgtcaattgcctaagaaacagcagcaagtaatgctacttagagatgtgggaggacttgactatcaggagatagaggagctgataggacagaaggcggtgcatattagagtgctattgagtagggcacgaaaacaaattagacaacaactaaaggagatgatgcaaaatggaaagtaatgaacttaaaaaacttgtggaacgtttctatgaaggacaaaccaccgagcaagaagaacaattgctgcaacattatttccttgacggtgatgtgccacccgaatgggcagttgaacaacagttgtttaagcagctgtatcaagcggatgttcctgttcctgaatatcttgaacggcaattgtcgcagcaaatagacggttggaacaagatagagaagctgtccgaacgaaaagcacgcacgttcactttacactggatagttggcgtagctgctggcttgttgctccttttctcggtgggcttgttggttcacttccaacaaaaagaggatgaaatagctgcacaacgagaaatagtgaacaatcctcaagatgcgtatgccgagacagaaaaggcacttctaaagttttctaatactatcaataaaggcttaaaacaattcgaaaatgaaacaagatagcaactttctgatgccattaaaacgcatcctgttcgttcttattctggcaatgagcagcatgtatagcgtagcacaagaccaattgtttaaacagtttgatgatgccaagggggtgagtaccgtttatatttcgcccacaatgttcaggttaatgcccaagttggagtttggggataaggatattacgaagattgcctctaaactaaccaaactacaagtgttagaatgtgaacgcccgtcgttgatacccaccatcaagaagcaagccaccaactactataagaccaataaatacgaagtggtgatgaagattaaggataaagatgaacgcaccactatttatcttaaatcgtatggaaagaacaacaatgagttcattttgatgaacgaagagccaaaagaaattacgattatacagctcgtgggacatatcactttaagcgaaattaaaaacattgccaagtaagctgtaatggtatcaatgaacattcgtctttccgttgatatgttttgatacatacagaaaatgaatggaatttgttgaaaaaacacaaataataggagttttgttcgtttgttccctattatttttttatctttgcgtggttttgtaactgtatgcgactaacctcattagttctgattgccgtcatgaggcaattgattctttatatcatttagcgcattaagttacaatagaagatgattttttagatgttagacaaaacaataaagttttttattttttttagatgaacgtaattacgaaaacagttcaattgcctgatggcagaaccatcagcattgaaaccgggaaagttgcaaaacaggccgatggctcagcggtagttcgcttgggtaacacggtgctcctcgcaactgtttgtgcagcaaaggatgcagttcccggaacagattttatgcctttgcaagttgattatcgcgagcagtatagtgccgcaggtcgttttcccggtggattcaccaaacgtgaaggcaagccaagtgacaatgagatattgacatctcgattagtggaccgtgcacttcgtccattattcccatccaattatcacgcagaagtgtatgtacaaatcatgctcctttctgccgatggtgtagatcagcccgatgctttggcaggtttggcagcgtcagcagccatggcatgttcagatattcctttcgatttctatatcagtgaagttcgtgtagcacgcatcaacggtgaatatgtggtgaacccaacatttgaacagatgaagagtgccgacatggatttgatggtaggtgccaccaaagacaatatcatgatggtggaaggtgaaatggatgaagtgtctgagcttgaccttattgaagctttgaaggcggcacatgaggctattaaaccgatgtgtaccgtgcaagaggagttgaataaggaattgggtaaagatgtgaagcgcgagtacgaccatgaggtgaacgacgaagatttgcgtcagcaaatgaatgacgagttgtatcagccagcctatgatgttactaagcaggctctgcccaagcaggaacgtcacgatgctttcgataagattatagccgacttccttgaaaaatatgatgcagcacatgcagatttgacggaagaagagttggaagagaagcatgcggaggctacacgctattatgatgacgtgttgaaaaatgcgatgcgtcgttgtattttggacgaaggtaagcgtttggatggccgcaagactgatgagattcgcccgatatggtgcgaagtgagtccgctgcccatgcctcacggaagtgctatcttcactcgtggagaaacacaatcattgtcaacttgtacgttaggaaccaagcttgatgagaaaatggtagacgatgtcttggacaagagttaccagcgtttcttattacactataacttcccaccattctctactggtgaggcgaaggctcaacgtggtgttggacgccgcgaaataggtcatggacacttggcatggcgaggattgaagggacaaattcctgaagacttcccttacacggtgcgcttggtgagccagattttagagagcaatggctcttcttctatggcgactgtttgtgcaggtacattggcgttgatggatgcaggtgttcctatgaagaagcccgtcagcggtattgcgatgggattgattaagaacccaggcgaagacaaatatgccatcttgagtgatattcttggagacgaggaccacttgggggacatggactttaagacaactggaacaagagatggcttgacagctacgcagatggatatcaagtgcgacggtctgagcttcgaaatcttagaaaaagcattgatgcaagcaaaggctggccgtgaacatatccttggcaagatgctcgaaaccatgccagaaccacgtccagaaatgaaacctcaggtgccacgtatcgaagcttttgagattcccaaggagtttattggtgctattattggtcctggtggtaagattatccagcagatgcaagaagataccggtgccacgattaccattgatgagttggatggtgtgggaaaaatccaagtaagcgcacctaataaagaagccattgattcggcgattgctaagattaaaagcattgttgccattccagagataggagaagtttacgaaggaaccgttcgctctatcatgccttatggttgctttgtggagatacttcccggcaaagacggtttgttgcacatctctgaaattgactggaagcgtcttgaaactgttgaagatgcaggcatccatgaaggtgacaagattaaggtgaaactgttggagattgatcctaagactggcaaatacaaactttctcgtaaggtattgttagaaaaacccgaaggatatgtagagcgcgaacgtcgcccacgtcctgaacgtcgaaacaatatgaacaacgagcgtcgcccacgacgtgatgatgacaatggctatcaccaccgtaataatggtggatatggcgatcgcccacagcgtcgatttgaacatcatgacgataatgtagattctgttgataatacatctaacgatttttaatagaagaacaatacttcatcaagcacatcatatatgaatattggtgtacttgacgaaatgataaaaactaaaaatagtaagtagcatcatgttacttactattttttttagtactatatttaattcatcaatagctatttttactgaagaccccccttatatggtcagtgtttttgttgtatgcttatcaacaaaatcgtatttgctagtttcttttcatcagcaaaattcgggagagtgaactaaatgttcttataacaagaagcatgagagaataaaacaagtaatctttgccttcgtgacaatactgttcttcactttttaggaaatgtgttaggcacacgactcattcgtggaagaacgttatttgagccacaacaaccatccatcaaatagtgtgtgtaaggctggagaaacgctgttttggaagatgataaatgctgaattttctttacaaagtgcctctcataactcgcgtataaaccaccaagggcaaagtaggtcgcaaatacgctaaatttgagaaagtttcgtaacacgttgttattgagcttgttacatttaaatcgtctcttttctctcgcaattttaccactcttttgcgactgaagcattgagataagctcgctatttgcatgctttaatgccgttaaagcatgtgaataacgcctctattgagtgtttccaagaccgctaagtcaatgtttcagcttaaaaaagcgattattttgtgaaaatcagcccatttttgcatgccgtttgcctattaaaattttctattttgaagattttagatggtcgttttttggtaaaataaaaggacaaaaatattattttgaaagtgcatttccaactgacttactaagcagggaaaccgaagtcatgttacggcaggaatgcacaagttatattcttgacacctttgtgttgttccttattcagttgcttgtcactgcatgtacgcatcaacgatagtgagattacttgatgcgttcgttccgcaagaattcttcaaagctgtcctgataaccgttgaaaatattgatatcaacatcgctcttgatgccttttactctcccgtcaggacttagctgccacatcaccaagtgaacgttaggtttgtattcgccatagcgagctatccaaacattgtagtttttcatgaggtctggtgcttcgggcaggtatttattgacaaaaatctggctgatatacaaaataggttttacgcctacatgcttttctactaattgtagccatgctctcacctcgttgaacatcacctttactccgcccatcttggcgatttgactgggataaggctccacatcaagaacaggaggaaagtctcccttttgaaagagggtgttgcgcaaaaagtacttggcttgcgccttgccactggtcagagtagagaagaagtgataagcaccacagtggattccgtttcttttggcagcccgataatcgcccttataatatttgtttcgtatcgttgtaccttctgttgacttgatgtagcaaaacgatatgggatagctcacagtgccacggatgtgcttcttgctaattgttcccaaatgagtaatgcggagttgattccaataaatggggtaatgttttttgcctattttgtgttgatggcgtgaaatgtcgatgccatagatgcgttgctccgtataaaccagtcgttctccaagatagcggtcagctttccattcgcctaaacgcaactttttaggcgatgaggcaaagccaaatccgctgcgtttgccttgtagccaatagccatggtaataagtttcatcggtagatgtgtagctgccagcgccatcgggttgccctttctgattgagttgccccgtatatacgccagtagaatcggtacgagtaccatggattaagatgtttgctttccataagccaacgattcgttgaccgcagctatcgtaactaacacctttgccttctcgtttgccgtcgacccactgccctgcatacacgacacgaccatgatagcgcatttcaccataaccctcatattttcctttgaccaacgtgccacggtaagtatagccacgctgctgtgaaacaacttgtacatcggggtgtattctgctgcatgacatgcagagagaaaggatgaaaagcgttacgaatgtgggaagcgatgaatgtaagtagaatttcatggctttccctccttgctgaataagtcgagtaattgtgttcggtcaatgacgtgttttccttgtgtgatgcctatcaaacgtccgccagaactaaaaactggcgaaccagcacctgccagcacagttggtaaatcgtgttggcggtcgtgaagaacggttgaaaggatgcagcaatgcgttttttctgttgctaattctggtatgccgagcccaccataacctactgccagtgcatctccgttgctttttgccttccacggcatgatagataacggaactacgtccgttggtgttgtttgcgttgttgtttgaagtagcactgtttgctgtttcgctgaagcgttgatttctaccatgtagacatgctggcgttcgccttttctgttgttgtagtgagcgatatagctcgttttgtggaagatgcgaatttgcttactcttctgaatcgaatcaagaatgctcaacagggcttttgcttgtgctgctctattttttatttcgtcggtgtatcctgccaccgtattatatccttcgtcatgcacattatgtatgcggagatagtaattgagttctttcagtcgagactgcaagcggcgtattctctgcaggtttctcgcttgttcttttcttatcaatgtacacgcatcaatgccgacagctttgttgacattggttttgatagtgaccaatctaccatgacacgatggaattacggcatatcggttgagccaaactcccgtagagtaggtagttagggtggaagaatcacgaagaacggaaaggcgactcaagctcgaatcggatgagatgtccgcaaaaaacaaaacttttttgccattgcatacaatttcgtaccatgacttactttcaatgacagccactgcacgtttcatttgttgtccagaggagggccaacaagtccatgtcacccacgtaatgacgaataatagtgcgatgaccaaagctatcagcttcaagcggctgatgttgcgaagtttctgtttcatgcactgcaaagttaccctaaaaagcagatagtgcaaaaagatacttcccttatttttatttctttcgtataaaaatagtggcacacaacaggactacacttgatggtaaagcgactgaatgtagacgatgctgtttttatgttcgccccagtagataaaatgacatggtggggtgaacatcaatctgttacacgaagcgcatctgcaattaggtaatgaaatggtgcattttactcttttttatcatttttcaacgatagatacttctattttttcaataatttatggtatatttgtaacaaagacttctgatataacattttaaggaagactttttcctaaagaaaaaaatcaaatatgaaaatgaaaacgagtagaacttttttggatgccattgcgcatcgtcgtagttattatgcgttaaaaaatgagtcgccaatctctgatgacgccattcgtgagatagttgagtgtactatcaagcatgttccttcaccctttaatagtcagagtactcggttggtagtgctacttggtgagcatcaccaaaaggtgtgggaacttacaaaagacgtattaagagagcgaatcgctcccgagaagtttgcgcaaacagagcaaaagattaacgcttcattccaaagcggatacggcacgattttgtattatgaagaccagtcggtagtacgtggcttgcaagaaaagttcccctcgtatgccgacaatttccccatttggtccgaacaaacgaacggtatgcatcaactaaccttgtggacagcgctcgaagatgctggttttggtgcctcaatacaacattataacccgttgatagacgaggtggtagcgaaagagtttcagatacatcccgattggaagttgcgcgctcaaatgccatttggtgtcccaacagcagagccgcaggagaaaacttttgaacctcttgacaagcgacttcgcttcttgaagtagtagtaataaattgattatcaatcaccaaaattgttctgaccatttcagtctcgaacaattttggtttcttcaagtggacttctttccgtctgttgctttttcgcttagtgcttattttgtgttcctttgttcgttacacttttagcacccgatagaatttggttatattcttctttatttttcagcagtcgtatggcttcctttgtttgtttgtcgtattttaagccgttttgaatagctctgccttgaaagtaataagccgttagaatatcagccgatatgatttgtttcagttcatttttgttcaattccaaatcttttgcaacatcatgagtcagtttctttttgagtgctgcaaattctggtttggcatcttcatagtatccttcaaacttagctatcttttccaattcctttaacatcttctcggttcctgggtcataagtaaacttatttttgagaacctgctgcttaaattcgttgaattcagcatctgttaattcgaattgatttgcgggtgcaatcgtcttgtgtttggcaatatagtcaatcacgtagttgaacatcgtttctgtactatcgccatgttgcaaatatgccgaaatattggcaatggtgtcgggcttgatttctacatctggcataatgcctccaccgtctctcacctcacgaccatttttggtataaaatacccttgtcagtgaatcgggaagttgagtattaagagttttccccttcttgtgtttgtagttaatggcttgaatacatcgaccacttggtatataataatgtgcggtggtcactttcatgttgccattgtaaggaacttgcaccgtcatctgtaccaaacctttgccgaatgtgcgagttcctacaatgacagctcgatctaaatcttgcaaactgccactggtaatctcactggaactcgctgtcatgttgtttaccaagacaaccaaaggcatgattgtatctacaggttccatgcgtgtcttaaaggcatggtttgcacgtttcagctttcctttgttggtaacgatggtgacatctttcggtacaaagatgttcaccaggtcaacagcttcttgttcagagccgccaccattgccacgcaagtcgagtatcatgccttttgcgccttgctttttcaggtcaatgaaggctttacgcacctctttggcgcaatcttcgtaatactggaaaagattgatatacccaatatccgaggttagcatgccataaaaaggaatgacaggcatttggatagagcggcgttttactttaaacgtcattatctttcctgtggaaggtcgctttatctttaataggaaagtagaaccgggctcgcctcgaagatgttcactcacatactttgtatctttaccaaccatggtagaatcgtcaatctgaaggatgatatcccccttttttagacccacttcggctgctggcatttgtgcataaggctcgtcgataacagcatttttgagttgcagatgatagcgtatcaaggctcctatgccgccatatttcccggagataaagcgtttaagctcctgtgtctcactcgctggataatactcggtatacggatctaaacgattcagtatccccttgatgccatcaccaatgacttcattggcatcaagcgtatcaacgtacatcaagtccaaattcttataaactgtattgaagatttctaaatttttcgcagtttcaaagaggtgatttttgtcttcctgcccataagtaagcgtgggcagtatgactaccaataagagagatgtcaataattttttcattctacatgattttatgatgagcaaagataatattttaacctcataatgaggcttggattcacaaaaatttgcccattttaaggtacaacgattattttttttcaaaaaagtttgcaagtttcaaaaaaacgttctacctttgcatccgcaatcgagaatacgaattgtacaaaatgcttcaatagctcagttggttagagcacctgactgttaatcagggggtcgttggttcaagcccatcttgaagcgcacagagcggaagtcctatcaaaagggtttccgctcttttcaataagaaaatatgttggctgtggctgctcatttgtatggcgtaatgaggctgatgcatgtgaataacacctctaaagagtgtttccaaggccgttaagtccatgtttcagcttgaaaagacgtttattttgctcaaatcagcccatttttacatgtcgtttgcctattgattttttctattttgaagattttcgatggtcgttttttggtaaaatgataggacaaaagctatgggcggcttcgtcaaaagatacaacgcaacaattgctcggtcttcatgatgcaaagataacaaatacttatgaaattatgtgtatgaggggaggggttgcaactgggttttacgactgacccgttttttggtaaaataacaggacaaaaataacgagtacctttaccaaaaatgagaagaagtaaaagcgctgtgaaatgttatctactttctattgattgctgtccgctaaaacttacttgagcataaaaaaagttttagcagacagcaatcatttttatttgttagtacgtaatgatgcccaaccagcgcaatacgtcgttaaggttggctacaatcattaacaacaacaagatggcgatgccaacatattctgcacgtaccatgaaagtttcactcggtttgcgacgagtgatcatctcatagagcaaaaaaagcacgtgaccaccgtccaaggctggtattggcaagatgttcatgaatgctaaaatgatgctaaggaaggccgtcatgagccaaaacatgtgccaatcccatacgggagggaacagacttccaatagctccgaagccacctaacgacttagcaccatcagcggtgaacacatacttcatatcaccaacatagcctgccaagacattccagccatattttgcacctgcaggaaagctctcgaagaaaccatattcctttttggtaggcgtgtaatacgaatacaaattggtcatacccacccctaacatcagactggagtccagcactacctgagccgtatctaccttagaagttgcaggattcataaaggcaatgcttgctgtacgaattttcaaactatccgcatgggtctttgctgccatgagttcatcactcaacacgcccacctcttcttggtaagcattccaagaatcaataggtttgccgttgatacccaccaaacggtcacctttccgaatgccagccttagctgctgcaccagaaggcataacactgtctacatctgccaatacaaacggtgttacaaagcgtggtgtgctcttcaacatttccaaaaggttcaggtcaccaggcaggttgatgctcatcggtttgccattgcgaatgatgtctactcgtttggcggtggacaagtcgcgatacacatctgcattaaaatccctgaatgcgccttggtctgtccccacaagaatgtcatggtcttgaaatccatacgacttggcttcttgattgaaacgcattcccatgctcatatctttgaccatgacatacgattcgccccaataaaacagcaccatggaatagataaaaagcgccaaaagaaagttgacggtcactccaccaatcatgatgagcagccgttgccatgctggtttggaacgaaactcccagtcttgagcaggttgcttcatttgctctgtgtcaaagctctcgtcaatcattcctgaaatcttgcaatagccgcccaacggaagccaccccataccataagtagtatcgctatttttgggtttgaaactaaagagatttcctttccatttaccaatgctgacatcaaagaatacgaagaacttttcgactcttaccccaaagagtttcgcaaaaaacatatgtcccccttcgtgcaagagaaccaataaagagatagccagtacaaactgaagcaatctgattaaaaatatttccattttatcttaagtttttttttagttttttggttgttaagtttttgagttgttctaccataaggcatattactcaaaaacaactaaatcatcaacagtcagctcatgaacttatcaactcatgaactcactaacgccttaactcgtgaaccatctcttccgctacgcgacgtgtctctgcatcggtatccacataaatttgatattgggaagatttgtcataagacacccgttgcatcgtcttctcaatgatattgcccatgtccaagaacgagcatttgccatggcggaaagcctcgttcaccacctcgttggcagcattgagtacacaaggcatattgcccccctgacgcatggcctcatatgccaatgccaaacacttgaattttcctatatcgggttcaaagaactccaagggttgcttaaaaatgtctaaacgctgcccatgaagaggcaaacgctctggaaaagaaaaagcatactgtatgggcaggcgcatatcaggaacgcctaactgcgcctttatgccgccatcggcaaactgcacggcactatggacaatgctttgaggatgcacgagtacttgtattttctcgactggaacaccaaagagccatttcgcctcaatcacctcaaagcccttgttcatcattgaagccgaatctatggttatcttcgcccccatttcccaagtaggatgtttcaaggcatctgcagctgttacatgatgcatctgttccaaagagtaggttcggaaaggaccgccactggctgtaaggagtatcttttctatttcgttatcgctttctccaacgagtgattggaagattgcactgtgctcagaatcgacaggtagaataggtacatgatgctgttgagccaacttgcaaatcagttcacctgcaacaacaagcgtctctttattggctaagcagattttttttcgagcttggatggcatgaatcgtgggcgaaagacctgcaaatcctaccatagctgttaataccatatcaataggagtggctgacacgatttcatcaagcgcagccttaccagcatacaccttaatgtctgggcaatcatttaacagttgacagagggattcataatgcgcttcgttagcaataacgacagcagctgggcgaaacttacgtgcctgttcagccaattccttataacgattattagccgtaaggcaataaacttcatataagtcggcatgctgttcaatcacatccaacgcctgtgttccgatgctccccgtagagcctaatatgcagatttgctttttcatgagttgtatttcctcctaccctttttgacttgttagcttataaatctaataaaccttctggcaatgtgatgaatatttgacgcttctctccgtcgatgtccgtaatgagttcttcattagctggtatcaatttaccaccttccagctcgaacaagacattaagcgtcgtattatcaattgattgaatcactcctatttgataccctgttgtagcatcaatgagagaaaaacccaagagctgtgcccacgacctgcatgcgccgtcttgatgtgcaacagaacgtgggaagaatacttcactccctgtcagttcacgagcttgcacttctgtatcgacatcgcaaaactttatgtaagccgttacatcgttacggaagcgatattcttcaaagaaaaaaggcaccaaaatgccatctacctctaatataaggtagtcagcatccgtacgatcaaacacgtcgtcctcaaaatgaaaagacaattcgccttttaccccatggggctttcctatttgtccaatacggtaaacatcctctttcttaatcatctactcgctttatatgtgcccctaaagcattcaggcgcatttcaatattctcatacccacggtctatctgggctatattttctattctacttgttccgttagcactcaatgcagcaatcagcaaggcaatacctgcccggatgtctggactactcatgcgtcctgcacgcagtcttatcttcctatcatgccctacgacaactgcacgatgtgggtcgcaaaggatgatttgcgccctcatatcgatgagtttatccacaaagaagagtctactttcaaacattttttgatgaaagagtacgctcccccgtgcttgggtggcaacaactaaaaggactgacagcaagtcaggagtaagtcccggccatggagcatcactcaatgtcatgatggtgccgtctataaacgaatctatttgataatggggttggtgcggaatcacgatgtcgtcaccttcaacttgtatttttatccccagtcggcggaaagagtccaagatgatgccaaggttttttacagaagcatctttgattcttactccattacctaccatggctgccatgccaataaacgagcctacctctatcatgtcgggcaatactgtgtgttctgctccgtgcagagatgaaacgccctcaatcgtcaaaaggtttgaggcaatgccactaatctttgctcccatgtcatttagcaaacgacacaactgttgaatgtaaggctcacaggctgcgttgtaaatagtcgtagtacccttagccaaaacagctgtcatgataatattggcagtacccgtgacggaagcctcgtccaaaagcatgtatgttccatgtagatgttcggcttcaatatgatagatgttacgagactcttcgtgcttaaagcttgcgcccaacttcttaaaacccaagaagtgtgtgtccaaacggcgacgtccaatcttgtctccccctggctttgcgatagttgccctacctaaacggcctaacagaggacctatcatcaacaccgaacctcgcaaggaagaacacttctgaacaaactcgtcgctatccaaataagccaaatcaatggcatcggcttgaaagatatattcatttttatgaacacgagttactttgacgcctacttgctgcaacagacgaatgagattgttcacatcaaggatgtcaggaatgttctttattctaacaggtgctgacgtaaggagcgttgcacaaatcacttgcaaagcttcatttttggcaccttgaggttgaatcgtaccactcagtctatgaccgccttcaatgacaaatgcctccatagacttatcgcttctttcgttttttatctatatctcgcatgtcgatgcgatcgaatttgaattgattaaggtcgagtacgattttcccatctgtaaacctttccaaatcaaaagccactttctcatcatccgaagagccatgtccccactgtaccaagtcacgcttcatctggttagcagtgatacgagtcagttcgtcacgttcctccccaggctccatgttcttcagtttttcaaacatttcaaacatcatgttgccataatgtcgcacagggattcggttcatgggatactgcacaggctctgctttcgtataaatcttagctgcttgagatacatcgaaaggataatcgatgtccaattcaaaattgctcataatagccaaatgatcccacagcttgcgtaggtattcctcgctctccttgttttgcggaaacatacgagccattgtagagacaatggtctcggcacaatgctgccgctcttgtctgtcggtaatggtcaacgcataatcaaccatgttttgtacctcacggccatattctggcaatatgagtttctcacgttgggtattataatctaatccttcaatatccatagcttcttttttttcaatagaccgtaacttaccgaatcaacaaggcaacgttaaagcaatttcttaggggttttggcaacgaaatccttcaaataaaacggaacaaagtaggctacatcctcaaattgttcattcatcatccgcttctctgccaaagggaacatgtattttgccaaaggctctacattcttgatgagatgagcgttggggtgattgattacctcgatacacttttctgctccattcccaaagaaataaactggacgttcgtcgagatacgacttatatgtatccgcatcaaccacatcggcttgaatgggacgaacctcattcaatgctctgtcaaacaattgtgcatatacttccatgcgacgagcatccaacatcggacacaacagcgcattctcttcttgaatctgttcgcggagcaagacaggcacacacaagagatggagcgttggtactgataacagttttacggaacgtccgtaacaaattccttttgccatggacacaccaattcgaagacctgtataagaccccggaccacaactcacagctacagcatctaacggaattaaatgactatctatgaacgataaggcctcatctacaaatacaccaagcttgacagcatgattgggaccgctactatcttctttctcaaaaatacatgttccatcctgacttacagccacagaacacacatctgtactcgtctctatgcttaaaatacacgacatacgtctatctatataatcctaaattaaaatgcaaatttacgcttttttcctgcaaaatgattacttttgcataaatttaacgtgttgaagctatgatacaatcgatgacgggttacggaaaagcaatcgtaacctacaaagaaaaaaaaataaatgttgaaattaaatcccttaacagtaagtcgctcgacctctctactcgcatcgcaccactgtatcgagaaaaggagatggagattagacagcaagtatcgagtgcgctggaacgggggaaaatagacttttctatttggatagagaaggatattgctaacgaagtaaacccgattaactcgaatattgttgagcattattaccaacagataaaacaaatagcaaagacaacaggcattccagagcccttggattggtttcaaacgattctcagattgcccgacatcacattgaaaacagaaatcgaagtgctgaaggacgaagagtggaatatggcaaaacaggcaatagaggaagctcttcagaatttaattagcttccgccaacaggagggtgtggctctacaaaataagttcaatgagaagattgataacattgcgcgactacttcaagagatagagccttatgagaagatgcgcgtagaaaagattagaactcgaattgtagatggtctcgaacagattccaaatgccgaatacgacaagaatcgcttggagcaagaactcatttattacatcgagaaactcgacatcagtgaggagaaacaacgacttgccaatcacttgaaatattttcgtgataccatgaacgaaactactcccaacggcaagaagctcggatttatcgcacaagagatgggacgtgaaatcaatactactggttcaaaaagtaatttggctgaaatgcagaacattgtggtgcagatgaaagatgagctggaacagatcaaggagcaggtgctcaatgcactgtaagcttaaggaaggagcctcccccaacccctccaaaggaggggaggtataagctggaaaggatagagcgattgggaattataaaaatgactcacacataagggagctgtatcatttgtactttgggattaagggaaaaggtatcttcctgaactctattcattgcgctgatgactgtcgataaagcacatgggaaaaaacaggcaagaaagatataaatacgagacagcagatgcttctttatacaaagttttgcaagaacgggcactgcaacatcgaaactatccgacacaagccgaagctgtgctttgggaatacttaaagggaaatcgtttgggggcaaaattcagaagacagcatctgattggtcaatatattcccgactttgtatgcctttccaaacagttgattgttgaggtagatggggggtatcacttcattggcgaccaaatcatctctgacgaacagcgaacagcatatctcgagtcttttggttatcatgttatacgattcacaaacgaagaggtgttggcagacacgcaaaatgtacttcaaaaaataagacatatcatgaatcatctaaacgaacaaaacaaacagcagaccatacaaaataccacgtccacggataaggctcccctccttaggaggggcggagggaggcctcaatctcgcctcattatcttctctgctccctctggaagtggaaagagtaccatcgtgaactggctcatgcaagaacatccagaactaaagttggcattctctatctcgtgtaccagtcgccagccaagaggcacagaacgagatggtgtggaatacttctttgtcagtccacaagagtttcgcgaacgtattgacaacgacgaattcttggaatacgaagaggtgtatgaagatcgcttttatggaacgttgaaaacacaagtggacaaccagttgaaagcgggtcagaacgttgtctttgatgtagatgttaaaggtggcgtaaacatcaaacgattttatggcgacagggcattgagcatttttatccaacccccttctatcgacgaactgcggagacgtttagagagtcgtgccactgatgcgccacaagtgatagaagaccgcttaaacaaggcggcttacgaactgaccttcgcatcgcagtttgacaaagtggtggtgaatgataacttggacaaagcaaagacagaaacactgcaaatcatacaagaatttctaagacattgaaatctatcggcatctttggcggttctttcaaccccattcacaatggacatatccagttggcaaagcatattcttaggctttctgccttggatgagatatggttcatggtgtctccacaaaatcctttgaagccacaaggcagcttgctcgatgaccatttgcgcttggaaatggcacaggttgcattgcaagatgaaccaagactcattgctaaagatgatgaattccgactctctaaaccgtcatatacttggcatacgctgcaatgtttatcgaatgaacatcctgacaactcgtttactctcattatcggtgctgacaactggcacgtgttcaatcaatgggcacactatcaagaaatcctacaaaagtacgaaattattatctacccacgccagcacaccgccattgacacagcgtcattgccctcaaatgtacatttggtagatacgcccctatacaatatcagtagtaccgaagtacgccaacgcatccagcaaggcaagtcagtagacctgttgataccctctgccatcgtgccacttgccactcggtattatccacatccgtgagcgtatgtagggttggcaatgctcttcatagaagaattataaatgctgaattttctttacaaagagcctctcataactcgcgtgaaaacaaccaacggcaaagttggtcgcaaatacgcgaattttgagaaagtttcataactcgttgtgattaaatatgttacacttaagccttctctcttctttcgcgtttttaccactttttggcgactgaagcattgagataagcctgctatttgcatgctttaatgctgttgttgcatgtgaataacacctctaaagagtgtttccaagaccgtaaagtcaatgtttcagcttgaaaagacgcttattttgttcaaatcagcgcatttttgcatgtcgtttgcctattgattttttctattttgaagattttagatggtcgttttttggtaaaataataagacagaaacaataaattcttttgccaaaaatgagatgaaaaaaacgacgctacaccttcacaaaagtggcattgttgtgataacaaatgacgcataatgaagcgaatgaaaacaagcagtgcgattcatttcattcattagaattgttcttgaaacaatagaacaacgattgttttcatcattaacaacctttctcttctatgaaagagccgcgtacttattcacattcgcttcattgatcgacaagtttatttcagcttaaaagtgatgggaagattgtattgaacccgtacgggcttgccattttcatatccaggcttccatttcttttgcaactttgccactctgagggcttctgcatctaataatgggtcaatagatctgacaaccttaaaatctgataatgatccatctttttctacaacaaaattcacgatgacgcgcccttctattttcttattctgcgcctcttcgggatatttcatgtttgttgccaaaaagttcattaaagccggtatgcccccttcgtactgaggcatcactgatgatattgcatatactttatcgtcatcatcttttacggtgccacctttcttctgtgttttgacaggtgtccgtttctttttgggtttttgtggttgtgtttgccgcaaaacttttacggcatctttcttcacaatagtgggttgttcactgatagagcgtgcgatactctctatgttgctcgcggcgaggagtgcggctacgagcggaaggaaaaacaaatatttgacctttcctacgggttttgttctgcgtttgttcatcatcttgattcttttttttaatggtaaaacattgaaattatttgaaattgtagctacattcttttgatacgacaatcctaagaggtggtattggtaggttttagagttgattccatttgccaccactcgatgatctgccaaatattctatgttcattctcacctctcgtctcaacaaccatgcaaaaggattcatccaacatacgatggtaaagagttcggaacaaatgacatctatcgaatgccattgtctggcatgtgtctgctcgtgcaccaatatttcgtgcagttgaacaggcgtttgtgcatcgggatttacaaatatccattggaaaaaggagaatggactgcctttgcccttgatgacatgtaccttgcaaccgtctatctcgcgcgtcttggtgcggataatcatggccacaatcatgcctacttgcaccaacatccgaagcaagagtaccgctaccccacctatatatatccactgcactgcgttcatccaagtctgcttggcattctctgctccgacagtgagctcaggaagcactacttgccggtacgttattgccattccttgagaggtttcagcggtcatgagccaatcgattgttggcatcaatggaaccaagaaggcgatggcataaatgcctaacaaaagacttcttctccagccaaagaacgtgtctttggcacaaaacatctgataaaagccatacaacagtatgagggctatgtttactttgacgagatagataagcataatctgtattttttaagtgtgcgtgttcaaatctattattttctaaccagcgataaggaaaggtacttattcgttacccctctcaatttggtcaatgatgtcttgcaaatcttcagaagacagtttctcttctttcgcaaagaaagacaccatgtccttgaacgagttactaaagtaatcacgaacaaagcgcgacatacagtgctgtttgtacttctcttctgggatggcgggagagtaaacgtaggtgttccctcgctgctcttgatttacaaagtctttgcgcttgaggttgttcaccaccgaagcaactgtggtgtatggcggtggaggcgtgcccagttcacccaatatttgctttaccgtacaacttcctaattgccatatccgttgcatgacctcttcttcttgtactgtcaatttttccatattcatcttcttgcgtattatcaacttaaacagtaagcaattgacggatgtcagcccattgattgcttcacattcgcaaatctacgaacttttcgtaataactgcaagcatttattggttaataaatcataaatattttgcaaaagtaattgtttgtaatgttattacgaatatctcgtaatatatatttatatataaaatagtactcgttaggggtactattgggctgattgaatacatcaaaaaaagattctataacgtttcatatggacaagtataagagagtataaaaaatacttatccatacgattcgttatagaatcgtgaatgcttacaagtctgttaacgcctcaacgtaccattaataattggcattttctggatcaaactctgtccaaccgtcagcccagttatcgtttgcagcaaaggctccaatgtaagaaactgtcttaaagcctttcaatccggtgaaagaagcagcgttcagcaacgggcttgatgccaaaggtttgaaggtctgggtatctatcaggtcttcccaagactccttcacggtgttaccctgtgataagaagaaggtggtagagaatgatttcttgctgctatctgccttctttgccttataatcagtgaccaactcgtcctcatatttcttgttcatatccgaaccaacgacatccatacctgcaaaccagatgttcttcaaactaagttttccagctgtggcagcaccctgtgtgtcgcccttttcgttatccagcatcaaaccgataggataaccaatggccaacgtattgtaacaactcaaacgagagttacgacgaatttgcatggcagattggaacttaccgagtgccgaaccattattgggattcatgcttccacctgtaatataatcgggcttgttttggaagttcttatccaatttaggtcctataaacgtgatattcgagaattgtgcagtggtataaggctcaacagccgaccccgaaccattgttatcgctttcaaatccattgctttgagaggcatcagcaagcttcgagtcacgtacgacaagaccaaattgtactgtaccgcaatagccattgtcagtgtcaaaatcatcatcccaacctttgtaagcgatgagatacttagcgtttaccgcacctccaaaccactcgtaagagtcgtcattggagtaagaaacctggatatggtcgagctgtgtgccacttcctacggagcccaaggtcaagccgttgatttccttatcctgtctgaatggataaccagcaaactcaatgcgcacataactcagtacacctgagttgtctgcattgtcattgcctccatgcttcgtgcgtggtcctccttctatttccatttcctgctgattgtttacagcctttccacagaggatgacaccaccccaatctccaggcttacgattgcctttggcttgtgcagatgtaaacacaatgggtgctgtaggcgtgcctttagcaatgagttttccacctctttcggcaattaaggcagcctttgtcgccttatcacccttgatgatagtacctggttcaatagtcaattccgagccgtcggcaatatacacccagcccttcagcagataagtacctttctttaacgtttgtttccccttgaagacaaactcctgattgccattaccaatctccttaccattagggtcttcctttccattcgtgaacagtaagtggtcacaactctttaacccaccatctgttccccaaacgtattgggtcgttgactcctttttatcaactggctcatcatcatctccacaagcagtaaaaccgagagagagcgttaggattgtaatcactccccataaattcaaactttttttcatctttgttctgttttaatcaataaacgaaatatgatatttatattcaacttagttttcaaaactgatagataaccgacaacgataaattgcgtccgggctgataacaacgactgatttcggttacctctttcttagctccatcagcgtaggttacgtcagcaaattgcttataatacactttctgtgctaacagatctcgcactcctaacttaagttcccagtgatttccaaactttttagaagctgtcaaatcaatgacatctcgtggcatctcatagctatcgggcacgcgggcattgatgttgtcgcccgaagtggtgccttcactacgtcccacacctatgatacgttttcctatgcgattgtataacaaggcgatatgcatttggtgtgcctcgttcttataaaatattcctgtgttaatcagataaggtgattgcccttgcatgggtctgtctttttccttagaccccttttcaaactgcacactacttttaatcaaagccccgttgagtgaccaactgaaatgaggaagtccgatgaaatcaagcgctttcttgatgtccaattccagtccataattgttggctgccaaggcattgatgtacgaataattcaaatctgtacctcctgtcaccgtataggtccactcaataggatgcttaaagtgtttgtaaaaagcggctacagatatctgttcgcctcggcttggatagtattcgtatcgcaaatcgatgttatccacatacgcattttttaagttgggattgccttttacatcggaagctaagtcgaaatcataatataccgacgacgacacctcacgaaactctggacggttgatgcttcttccatacgacaaacgcagttgatgttgatcattaaacttataagtggtattgagcgaaggaaacaagtcgttggtcttataaaatgtactgacatgactcacttctgtgtcacgtgtatttgataccaactccatattgttatgttcaaatcggacaccggcgtagatacctaacttgccaaaggggagagacattgccaagtatcctgcgcctaatgtgttgtgtccgatatagtcgttgcgcatgtgcatctgctccagcaagtgcaacttatccacaccaaagtaagaggcatcgctcagcagggttggcatctccatgtacctgaatccgtctggcatgttgttgttagacgtgttccaattgtatatcaattcgcgagtggtgtaatcgcgggtacgatattcgccatacgcaccaaacttcaaaaatggctcccattgtccccaattaaaggtaaacttgtcgttcacactccccgacacaatatgctcatctaactgcgtccactcacgtgacacatcgtttcctgtcaacaatcctaaccgattggtttcgatggcatcgttaaccaaataacgtcggcggtcgggaatgtgccgattggcgtatgcatagcccacattccagtccaactcgtgcgccctgaatgtatgcttcccggtaagctgtgcattataggtagtacgactacgataataatattctgccgattgttcattgttcgactgtgcgctgatgccgttacgctcggtatagcgattgttgcccaactggttaaagatattcttcaattggtatttgtttttcccatttttcgacatgagcgtaagattgaacatgctacccaagcgcacattattgttaaactggttgtcaaccgattggcgcagatagttctcacggtcgttctgggcatcgtaaatgccaaacagattgttctccatgtcccgataggttctgtattcgttactgtaattcagcacaacaatcatccccagtcgataccgattcacatcccattggtgattccaattggcagaaagtttcaaatctcccaaaggtttcttcgtcttctcgtgccagtcattgttcaatccgttatccaataagctaatcgcttggtcggataaggttttaagttgactgtgaataccgccgtctaacgaacgcaaacctccatcaaatccaagaaaatcagtattcgaacctttggcataggtaaagtcttgaaatgccgattgggtattccaattgcctcctaaagacagtgagaacgagttttctgacggtatctcctttgtgttcaacacgataaatccaccgctataatcagatggatattcgggcgattgggtttttacaatcaacaaattatctatttgtgagctgggtacaatgtcaaatgagaaagcccttgagtcggcttcactgctgggaacggcacccccattcacccatacattattataacgctgggacagtccgcgcaccatcacgaatttatcttctatcaaactcacgcctggtacacgcctaatcacttcaccagcatttgagtcttgcgtacgacgaatctcttgcgaagagatgttactcatcacatacggactctctttcgccaactgcaccatggcggtctcggtagtttgtttgaccgctaccgttatctgcacttctttcagcgtttgctcgtcagcgttcatctctaccattaaatcggttgttccaacctttatgcctcgaactgttttaggttgataagccacataacgtatcactaatgtataagacagttcctgtaaacctgataacttgaaatgcccatcaaagtcggtcacacccattggcttcttcccttcaatctctatggtggctccaatgagtggttcctttgacttggcatcaacaacagtgcccataatttcttgagccgttaagtgtagactcaccatcagtagtagcaaaatgactacgattcccctttttttcaatttcatttattttcgaacttatcattaacgctgcaaaagtatcacacagatattgcattcgtatttcgtcactatgagaatggtgtgacaactctgtaacgactgttatcacacttatttcgattgtatgacagtactgctatcccaagttgtttgcccgctcttcttcaagccttattcctttcatcctcaagcgtgtgatgcgcttgagaagaaattgtggagtatgaatttttgaatattcaaaaattgggctaaataatactaaaatacttggttcgtaaaagatatttaagtaacttcgaaaacgaaacacaaaatattgcgcatgaaaatgtcagataacaactattgcgtcattcttgctggaggaaaggggaaacgcctttggccctgcagcagagagaaaaagcctaaacaatttatcgactttttcggtacgggtcgcactctgcttcaacaaacctacgaccgccaattaaagattgttcccacagatcatatctttgtttgtaccaatcaggcttatttaccatggatacgagaacagctacccgacttgacggaagagcaaatcttggcggagcctattcatcgaaatacggcacccagtgtagcatgggctgcacatcgcatcatgcgatataatgaaaatgccaacttattagtagtgccgtctgaccaagtgatacaaaacgaagaggcttttgtggatgatattctgaaagggtttgactttgtagaacaacaggcaggacttctcaccttgggcatcaagcccactcgccccgaaccaggatatggctatatacaattaggtgaatctgctggaaacaatgtgtataaagtgcagtcgttcacagaaaagccagaaagagagtttgccaaaatgtttgtagaaagtggtgagttttattggaacacgggtatgttcatgtcgaacattaaatttttgtcggcatgtttagaccgtttgctcccctttgtgttgggaaatcttgatcagatgaatccacaatggaccattgaagaggaaaataagtttattcataaaaactatccactctactccaacttatccgtagattatggtgttttggagaaatcggaagatgtgtacgtgatgaaatgctcatttggttgggcagatattggaacgtggcacagcatctacgaatccatgcagaaaagcgaatcggacaatgtcattattgatagcaatgtgatgcttgaagcctgtcagaacaatgtcatcaaactgtcgaagggtaagttaggcatcattaacggtttagacggctacatcattgccgaacacgacaatgtactgctcatttgcaagaaagaagattcctctgcattgctgcggaagtacattaatgaggtgcaaatcaagaaaggcaacgagtatatttgataattttacgcaacaagtaggcgttgtaaatctgtctgctcaccatgtcagaagtgtgcataaatggagggacagagatgctttattttttatgaaaaatattgacatgggctcaaaatacgagcgtatttgcaaccaactcattacttggtcgcaaatacgctaaaaatataaaactcttattgtcaatgtgttatgcgattgacgcactatatcccctttgttaactcattactttaacctcgcaaaagcatgtacttagtctccttagatgcatgagattgcgctgttatctcatgttgcaaagcacattaacccaatgacttattggaaaaaggtgaagaaacaacgcatttgaagggttatttaccactttcgaactccattattttttctatttcacagatgccaaattttgaaaaattatgacattttcgctcttttactcgctacaaaaatatgcaccgcagcagtcgtttaatagacaaaaaagtttggcttcccgaaagaaaactgttcttttgaaaccctactgtttcctactttagatattcttcacacaaggcgacccacagtgaggcacctatgggaaggatttcctgatcgaagatgtacttaggattgtgtaccataggcgtttcaccattacctaacatgatgtaacttcctggtcgttcttgcaacataaaggcaaagtcttcactgctcatcaacggcttgcaagggtacactacattttcctctccaaaatatttgcgtgccacttcggcagcaaaagccgtttcttcgtgcgaattgacaagtacagctccgggttgtccctcttttatttcatatttgcaaccaaagcattctgcttgggcagcagtaatctcacgaatacgttgcaacactaactttcgtccatcgggctgcatgttgcgcatagacaacttgagtatagcttcgtctggaataacgttacctgcattccctgcttggaatgagccgatggtgaccacgccattattccaaggagagaggttgcgagctacaatcgtctgtagtgccatcaccaaagaagcaccagcaacgacggggtcaatgcttagctcgggcatagaaccatgcccaccacgccccattaagcgtatctcccaattgtccacagccgacatcgtttctccatcatggaaatgcagtaccccctttggtagcccaggtatgttgtgtatggcatatattctatcggcattaaacttcttgaaaagtccatcgtcaatcatcgaaggaccgccctgcatggtctcttcggcaggctgaaaatagaagtaaacggtaccattgaagtgctttgtgtctgccagatacttagctgccccaagtgccatagcactatgaccgtcgtgtccgcagagatgagaaataccgtcgtgcctacttttataaggtaggttgttgacctcttgaatagggagcgcatccatgtcggctctaatacctattttcttctttccgtcgccatgacttaatacgcctaccacaccctcaatgccatgttttcctacatgctcatgaacctcgtagcccatattccttagcaagtcggcaacatacttgccggtatttacctcttgggtagatagttcaggctcttggtgcatggcttccatccactgtttcatcagtggcaacatagcagccaattctttccttggttttacggtcatattactcatatctttggaagacgattactcgctgcgatcaattacgaacttaaatgtttctttcttgccattttcgtactgctgactggcgatatagagtccgtttttggaaggggaagtaatctgcgttccatttggaagataataatgcgttgctacgatgcgttgcccctttcctcctcgttttgctacagttttatcaatacctgtggggtctgtcgtcgtcaggcgataggtctctcccttggaggtattgaatgtaatttcatcatcgcttaccttggtcgcgtttaccttgttgccctgtccatcaatcagagtgaagtctgtggcaattttaggatatttcacggtagctttcttgccagctttggatacgatgtcgatggacaccgccttgttgttcttccactccatggacacttcaaagttgtctacggcgcaaagtccctttacacttccgtttttccacatcgatggcaacgctggtaggatatcaagttttccgagatgactctgcaagagcatctccgccatgcctgcacatgcgccaaagtttccgtcaatctgataaggtgtgtgagcatcccacaggttttcgtacacaccacctccttcactgttgcctgtgttgtcttggaaatgcagcgctgtcttcaagaggctttggcacacgttgccgttgtgcgctctggcgtgtaggttcactttccatcccatagaccagcccgtaccggcattgcctctcgttttgagtgagttgatcgcagcttgatatattttcgcatcaatttcctgacctatttggttgcccggatacaatcccatgagatgcgacatgtgtcgatgagaattataggaaggaactgtagcctgagacgtgtacttccattcgcgcaagagcagcttcccattcatattttctatcgccaaaccagtatccagtttcttaaacttgctgttcaggtcgttaaggaaggtggcatcctcgttaatacccaactctgctatcgcctgtaaggtattgttgaacaagtcccaaaccaattgttgtgagtgtgcagtagcattctcgcttccgggaccatgttcgggtgaatactcgttaggacattcgtaagtgccgtcggcagctttcaccaatcgttgcaaccaatattcagcgcatgagcgcatggctggataagcaatgtttttcagatactctttgtccaatgtgaaacggtagtgctgccacaagtgcatgcagtaccaagcgttagcaatggtataattttgcatccaattggagcccgacccatagatgttgttttcagttgtcagcgtccaacctactgtttgtcctgcaatctgttgcgcattagctcgccattgtggacgctcgcaagcctcgcggtgtatgtacttcaagaaaggaagatgcagctcactgagattggtaatttcagcgggccagtaattcatctgtacattgatgtttgagtgaatgtcactgttccacgcaggattgttaacgttgttccagataccttgcaaattgcttggcaagtcaacgcctcggctgctgctaatcataagatatcgaccgtaacagaaataaatttcctctaacagcaaattgtctgccggacttatggcaaagtcgtcaatgagctttcgtgttgttacgcttggcatcgcattcgtgatattaagttgacaacggtcgtacaaagccttatagtcttctacatgcgcatcacatatcgccgcatagcccttgttcaaggcggcatctacaatgcctgtgacatgcgaaggtagcaaagctgcatcagagatatattcgtcattggaagcgtcaaaattggtagtgccatagagatagataaacatctcgtcagcatttttcacgtcgataccaccatctttgtcgacggcaatcgtgccaccctttgccgtaacgtatgccttgcaatagtaggattcgcctttgggcgtgcccgtgcgtggcacttcgccttggaaggtgatgacgccagtggcgccattcatgttataggtaggcgtttttccgttttggttgaacagaatgatgttgttactaatttttcccttctcgctggctttgtaatgtatggctatcaccttgtcggggaacgagcaaatgtactctctttgataatcaacaccattggcagtgtatgctacccctgcctttgattggtcgatatccaaccaacgacgataattggtcgctgcgttgagacggctgtctgttgacgtgatatatagatttccaaagttcaggtatgagccataattagcgttgcccacaactgctcctacatgacctttccacaatgttttgtcgttgaattgcacttcatctctcttcacgcctcccatgacacagccaccaaactgtccgttaccaatcggtaaagtggaagtcatccatacggtggcaggctttgtgtaccacagcgtgtgtttattggtaggcttccatgtcgtagaccccgttagggacacttcgttgatgggagtaggcttggcatcattgataaccatgtcgttgatagcgacaaattgcagagggttgttcggatcgccttgatcccataagcccaactcgcgaccaacaccagctcctccccattgattcaggaaagtttgtccgcttcctgtagtggaaatctcgaagccttgatattctctgttggtggttttcagtattttcaaattctgaatgccattgggttgcgtaccggcacaaaagaatttgagcgaagtgttataatacagcgtttgtcctgctgcattcacaaaacgataactgtcgccttgcttctctattctccacgtttgctgtttcttcatgtttgccacaggagtggcagtttgcaccttactgccattacccatagaggtgatgacggcttgacctcgttgcatctgaatgtaatagtacacttcgttgccagcggtactaatggttggcatggagggttgtgcaaaagcaagcatgctaacaagcaatgctgttagtgttgtaaaaatctttgtcatataggtcgtagtatttgtaaagaatgatacaaagatatacaaaaaataggatttttacgctcaatcgtgcaaataaaaacaaaatcctttctttttgataaggcggaactttagctatttcttcaaaaggggaaggtgagcacccatgattttggtggcatggtttgaatgctccctaccctttatgttgaacaattttgatacaaagaatacacgttttacacaatatacgttgtttcacagaattcgcagaacctgtaaatatcctcatctcacgaatgggatatgcgctgttggcacgttcattccctccagttgcaactgcacatcaacccctcgtgcatcttcctcttcccatgcaatgacaactgttttgcgttcatgtggcatcaaatggaaatagttgtcggtatagtcgactggcaaaatctgtttgccatcgctaccttttaattgcaaacgaatgagcatggcaggggtatcagtgggattgttcagttctaccttcaccttattcttatccttgacaaatgtcacagcaggcttaacagcgggcaaagagtgcaaagcttggaagttgccctcatcggtagagcaaacataaaaattgtcagataacaccctgttttgtgtatctaatagcgacatcttcaagtaatagaccgtaccacggatagcaggcgcatcgatagccatacactctacggttgtatctggcttgatttcaatccgctgttgatacttcataatagattttccccacatatccagcacctcacattgcgctgttaagctgtccttcaccattttatgaagattgacaacctccatttttcgagtacttgcattccactgtatgtgcaatggttcgcatgcttttttcacgccaaagtaagcagctgtcggttcaaggtaataatcgtaggtctgccatgtcatgctgggccagcaaggatgactcatccaaataagcagtcctaagcggtgcttgctgcccgattcgaacatggcacgataaccattatagttcacccattgcgcaagtttggtaaactgatgtacgtctccaatcacgccaaaagccttctctatgattccattaaacgatgcgccacgctgcgcaccctccaatgtatagtcgtgcttgccccaagcatcgttttgaggccacagatgatgaggagaaagcgtgcggcaaagactctcgtagttcatcacgttgggcattccgcgttccgtgtgcaacttgcctgtttgcttttcaaaatactctttttcaggcaaagcccaataaggaccgtgtccactgacaccctcatccgccgaactggagatgtataacatgtctgggtgcatggtatttacaatttgtcgaagagcagtatcgagcgtcttgggtggaaatccctcgtttcgtccacagtacaaggcaatgcaggggtgattgcgaatgcgataaacatcgtccttcgcattgtttaagaacatacgctcatcctgtggatcgggaccgtcagaggggtttgccaaccagaaatctttccataccatgatgccgtagcggtcgcaagcctcataaaactcatcattgcctgtttgtcctacccaattgcgtatcatattgcaattcatgttgcgatggtattttacagccgcgtcgtattcgcgcgccctatagttaaggttgctctcgctgaagccccagttgcccccaagtggaataaatcgtttcccattaatatataaggtaaggcgtgtgtctgcgtctttatagctcatctggcgaataccagccttataatgtaatggttgagagccaccgtcgtgggcttcgaaaatgtagcccgcatcgtaaagatatggctctccgtaaccattaggccaccacaagcgcaagcgttgtcgctgcagttgcgcataatccgttggtaagaaagtggcttctatggtggttgaggcaggaatggtgacaggcttttcaaacttgaccgtccctatccacccttttaatacgccatgaatggggtgttgctggttgttggtaaggcggacagagggcgtcaccgttgccaatgtatcgggcaaatgaagacgagtggtgaccacggcatcacttaatgtaacacacccctctgaagttaaatacacatgattccatatcccaatgttacgaccacggacagtggaaatccaatcccacccaattgtggcatgaaaagtaggattgtccgcccccaagattcctccattaaagtcggtgttgagttggtttttctccttcactgcaccaggatgctgggtcttgataatctctacagccaacacgtttttgccctctctgagcaagtgcgtaatctctgttttactgcgtatgaatgccccttctatgcgattgatgcactttccattcagatagatgttagctttccagttaatgccatcaaaattaagaaatacagcttgccctaccatctctttcggcaagatgaaagttcggcgataccaaaagttggaattgaagaacgattcagatgccataaacaactggttgtctctattaggatgaggtacagcccctatattgacatagcttgacagcaccgtagcaggtactgtagcggttatccagtcactatcatcgaagtttagacttgctatttgttcacccacagcatgtacctctgaagctcgttgcaaccgccagtttccaccattcaggctccatctattgtcttggtaagtgctttcgggataaggtttagctgtaagtccgcctctacccatcacctctatttcgctcaacacaaacggtttgccattcttcgatgctgtcattttcacttttacatagcgtgtcgtggctttgcaagcaatgatttcttgtctttgtacccgttgctgaagagtggcaatatgctcccaatgctcatcatcctttgataccagcacctcgccacgtatggctttgttgagccagtgcaactttattttgtcgaaagaggcttgcactcctaaatccacttttacccattcatcgctcgaagtagcactcatccaagcactacgaaaagctgcagaaggcaacacatcggtgacgggggtgccattttgggcgaaattaagttgggtaagcgtccaatgtgcagcgcctgccatttggagttccaagcgcaaaccgtatagacggggcactttgctatttaatctgaatgccattttcaaattacgtgtaggcagcagttcggtgtcagttaccttgttagggtcgctatgcgccttgtatctggacgccacccctggcaacgagtcggctgcttgctgcgccacgacctgccattttcccctctcatcacaagccaacaatctaatcttataaccgctggttgcttgttgctcgtggtaagccactcgagcaacgatgcttatttcgttggcagtaacatgcatattgtcccactggtattgaatgaaagccttacttcccagcaggatatttcgcgtatattcgcctcggtcgatagcccattcgcgttctctaaggggcaaaatgccttgattggttgtaactgtgagccgagaaggcatcgcacgagtgataataccatcggtaataagttgtgccgtgagattgtaatcatagctcgaagaatggtacgccttgcgatgcaaagcaatgttgcggtaggtgttatcctgcactaacgtaggcacataagcctcttgcacacgccctggataaatgccaatgccacgagtataggtttgtgcaaaagcaaattgtacccaaaaagtcatcgctaccaaaaagccataaaaataccttgaatgccgtatcatatcgtatgtcgttgaaaattgattgttgattgtttgacaaaaatacgcataatgtacaagaacacaaaaggttaactcaagaaaataagttaaccttttacactatattgttttattgaaagacaaggagtatcctttttgcaaaggtagattgatttacaaatcgatttgtttcaaaatcttatgagtagcacccgtcttagattccacatagctaccagccgcttcgccactcaatcgcaagtactcttgctgagtcatgaactgttgcatcatacgtgcaaacgaagaactgtccgtgatttcgaaccctcccttcgccttgatcagttcctgcgcttcttgaaaacgctgatgattaggaccaaaaagtacgggcattttccatacggcggcttctaacacgttgtgtattcctaccccaaaacctccaccaacatacgccacttcaccgtaatgataaacactcgatagcagtccgtaacagtcgattaacaagcattgagcttgtgcagcttcttcgggggttgttgcggtgtaacgaaccgtctttcccttgcatttttcttcgatacgcttcaaatgctcttcgttgatgacatggggggcgatgatcattttccagtccttacattcattcatgaaaggaataaaaatatcctcgtctggcgcccaacttgagcctgcaacaaatacttttttgtctgctttgaaagcctcaactatcgggagttgctgagctttgtctttgatttgcaacactctatcaaagcgagtatcgcctacgacatcgactgtatctatccctatcgtgtaaagtaagtgcttgctcttttcgttttgaacaaagaaatgcgtaaaacatctcaacactcctgcataacttttgccataccaacggaagaaaatttgatgctctcggaagatactactcacactatacacaggcacattgcggtgcttgaggatgtgaagatagttgtaccaaaattcatatttaatgaagaaagccatgcaaggacgcaccgctcgcaagaacctacgggcgttgcgaatggtgtctatgggtagatagcacacgatatcggcatgctcgtagttctttcttacctcgtaacccgaaggcgagaaaaaggtaagtagtattttgtattcgggatattcgctccggatacgttctatcaaagggcgtccttgttcaaattctcccaacgatgcggcatgaaaccaaatgtactgatgattgggattgacattcttttttagaatgccaatcgcttcgtgttcacctttccacatggtacgcactttcttgctgaaagcactggctacagcaacaccaagtaaatagatatagatagctacttggtaaacaacggaaattggttttctactatccaccttccttattcagaagttgattgaagcgtaggaatgacttcaatggctttatgtaaccgttttaacgtctcttccttcccgaggaacgcagagatgtcaaacatgccaggacccttgcctattcctaccaatgttaaacgaaaggcgttcatgacatcgcccaatttatatcctttgtcttcaacccatttcatgactttctcttcttgattctccaacgagaagtcgtctaaactttccagcaaagcagccaattcggtcatttgctgaacagaatagtctttccaacgtttgcgaacagtcttggggtcgtattctaacggagccacaaagaagaacgaacataagggccacaattccttcacaaagtcgacccggtctttcatcatgtgtactacctgtgtgatgcgttccaatgattcatcaaccccattgttggcaacgataggtgcaaagagttcggcaatctcatcatcactcttcgataagatgtactcgtgattgaaccagatacctttttgataatcaaacttagcacctgccttggaacatcgtgtgatgtcaaaggcgtctaccaactcatcaagactgaaaagttcttgatctgtacctggattccagcccaataacgccaagaagttaatgactgcttcggggaaataaccactttcacgatagccagacgacacctctcccgattttgggtcgtgccattccaaagggaatacaggaaaaccaagtcgatcaccgtcacgtttcgataactttcctttgccttctggctttaagagtaacggtagatgagcaaacaagggcatggtatccgcccaaccaaacgcttgatacaacaaaacgtgtaacggtgcgctgggcaaccattcttcgcctctgatgacatgagtaatctccatcaggtggtcatccacaatgttcgccaaatgataagttggcaattcatcggcactcttgtaaagcaccttatcatcaaggatgtcgcttttaacaatcacttcgccacgtatcatatcttgcacgtgcacttctactccgggttctatcttaaagcgaactacaaattgttcaccatcagcaatccgttggtcacagtcttccttactcattgtcaaagagttgcgcatctgcgtcctcgtatgagcatcatattggaaattatctatttcctttctctttgcatccaattcttctggtgtgtcaaaggcaatgtaagccttgccttcctctaacaactgcttgacatactttttatagatgtctctccgctcactctgacggtaaggaccatgctctcctgcaaaactaacaccctcatcaaactgaatacccagccatttgaaggattccaagatatatgcttcggctcctggcacaaaccgattggtgtcggtgtcttcgattctaaacacaaaatcgccgccatgttgacgtgcgaagagataattatacaatgccgttcgcactccgccaatatgcagagggcccgtaggacttggtgcaaagcgcacacgtacttttctttctgccattcttaataaatgaagataagatatataaatatgtgtaaaaacaagccacactttaacaagtaaagtctacctgcttattttttgattcacgttattttttgcaaaagtaatcttttttttgcattatagcgtattttttttgtattttcgcataatgattatagtaatcacatttttttcttacttcaatgaaagatagaaacttaaaggaaataacaagcctattcttatcatgaagaagtgactttatcaacccaaccaaagaatttgcatcagcatgagcaactttaattttaaggaatctatacagtggcgtaacctatttacccgtagtgctttaattctcatcaccgtggcactcatcgtttggttgttgccaagaaatgcaagtcagcaatttcattatgacatcgacaagccatggatgtacaattcatttatagcaagttttgattttccagtttacaagacggatgaagccattcaagaggagaaagattctttgctacaatatttccaaccctactttaattatcgcacacaagtcgagaaacaacagattgatcgtttcaagaacgattttaaggtagacatcccagggctgcccacagtgtaccagaacattctattggatcgtctccaccgcctataccagcagggaattatcaacacacctgagtacaatcgctttggaaaagactccacaagcatggtgagagtggtgagcggaaaacaggtacaaagtctccaaattaactgtatcaattcaacactctcggcttatgagcaactctttaacgacgcaaagttgatgccctaccgacaactactacaacgctgtaacctcaacgaatatatccaacccaacatggattatgacaaagagcgcagtgagaccgaacttaacgaccttctcagtggaattgcgattgccagcggaatggtgattagcggacaaaagattattgaccgtggtgatattgtcaacgaatacacctatcgggtactcaattcttttgagcgggagatgcaacgtagaaacgtttcggctgatgaaatgaagactactttttacgggcaattgctctatgtcaccatacttgtgctgctatttacgatttatctttctcttttccgcaaagactattttaacaagccaagcagcatcaccatgctctatgttcttgtgacaatatttcctatcatcgtgtcgttaatgattaggcacaacctttttagcatatacatcctaccattaaccactgcagccatttttgtgcgcatgttcatggattccagaactgcatttgttacacattgtactatcgtgcttatctgtgcagcggcagtgaaatatcaatatgaatttatcattatgcaaattgttgcgggtatggtagctatctattcgctgcgcgaactcacacaacgctcacaggtgttcaaaacagctatcttggtggggctgtcttatatcgctgtttatttttcgctacaactcatgcaaaacagttcgctcgacaagctcgatgccgacatgtattaccactttgtcgtgaatgccgtactactactattggcttatcctttgatgttcatcattgaaaaaacgttcggcttcacatctaatgttaccttgttcgagctgtccaacaccaatagaggtattctacgcaaccttagtgaaatagccccaggtactttccaacactccatcacggtagcaaacttagttgtagagattgctaacaaaatcgaagccaacagtttgttggttcgtacaggagcgctctatcatgacattggcaaaatgaccaatcctgcttatttcactgaaaaccaagtaggagccaacccacatatagggttgtcgcctaaagagagcgcacgaattattatcagtcatgttactgaaggggtaaaactcgctgaacaaaataacctaccgtcgtttatcaaagattttatcttgacacaccatggcaccagtacggcaagttatttctatatacaatataagaatgaccaccctgatgaggaagtagaccccgctcctttcagttatccgggtcctgatccctttactcgtgagcaggctatcctcatgatggcagactcggtagaggctgcttcacggtcgttgccagaatacaccgaagagagtattaccgaacttaccaatcgaattattgacggacaattgtcacgtggggcatttgtcgattgtcctattaccttcagagacgttttacaagccaaacaagtgctcatagaaagattaaaagctatatatcatactcgtatttcctatcctcaagaaaaaaagtgaaaaagaaaagtttcctttgtacaaatgggtagacgcatatgtcaacgagaagttaattgatgtagttatctcactccatcgatatttatgaaacaccacctaacaatcaaatttgttgcacaaaccaaatattttgtgcaacaaaactctttatttgtgttaatatattttaaggaatagaggacttttaaggaaatcctgaacaagttaaatacttttgcaatcaaatttataataaaaaaaatgaaaaaagtaatttacgttatttcaggattattatccatttgtacagcagtgaatgctggtggtcttcttaccaacaccaaccaaaatattgcttttaatagaaattttgcgagagatggtgccattggtatagacggtgtttacgctaaccctgcaggcgtagccttcttaagtaaggggtggcacttatcattcaatgcccaaaatgtatatcagtcgagaactataaaaagtggcatgacaataccttcaatggaaaagactcctttttatcaacctttcaagctcaatggaggtaacgagaatggaattaaagaatatacaggaaatgctgccgtaccaatactcccttctttacaagctgctctaaattacgacaaatggggcatacagatggcatttgggctctttggtggtgggggcaaagccgcctttaatgatggacttggctcttttgaacgtcaagtatctgttaaccctgcattattagcttcggcaggactgtccagtaaaacacctcactactcaatggatagttatttaagtggtcagcaatacatctttggcgttcagttaggaagtacttataagatgaacaaacacctatccgcatacgctggtatgcgtatcaattatgtcctaaataagtacgaaggaaacattactaacataacagccaacataggaggagctaatgtcaatcttaacaactattttgcagaacaagcaaacaaattaagaatgcaggcaacaatgttgagttcgaaagcaaccaatctgcctgctggagccgagaaaacaaaactggaagctactgctgcaaaactaaatgcaggtgcatcagctatggatagttataaagaaaaggtgcaagataaatacttggattgcacacaaacaggctggggtgttactcccatcattggactaaactttaattacaagaaatggaatgtaggtactcgtatggagttcaatacatatctcaatatccaaaataatacaaaacgagatgatactggcatgttcaaacatggagtgaacacacccaacgacattcctgccctttggaccattggcgttcaatatgctgttcttccaaatctgcgtacgatggtatcttatcatcacttttttgacaagagcgcacgcatggcaaacaacaaacaagaacagctcagtggcaacacacaagaatatttggcaggtgcagaatgggatataacaaaagatgttatgattagtgcgggcatgcaacgtaccaaatatggcttgggcgacggaagctacctttcagatatgagttttgtcaccagtagctactcttttggttttggtggttctgtacgtatcatgaaacgtgcatgcctcaatgtagcttatttttggacgaactatgaacaatttgataaatcttcatcagaacctttacccttattacaatcaacaaacaaaaagattgtagcaaataacactgataattttacacgtaccaataaagttctgggtgtcggtttagatatagacttttaatcagttataaataccgctttttatgacaagggaagtactcatttcgaatacttcccttatctcataaaactactaagaagcctttgcaatcagagtgtctttaggcaatcctaaattagagaaattcaactcattccttacgtaaaggaagaaagggcatatcacactgacaaacaattagttagaaatttagagaacatcctttcataaaagagcgtttgcagaacagatagcacgtggcattaaaggaaaataaatgctgaattttctttacaaagcgcctctcataactcgcataaaaaccaccaacggcaaagttggtcgcaaatacgcgaattatgagcgactttcgtaactcattgttgctgagtgttttatgcttgcgtcgtctcttttctttcgtgtttttaccactttttggcgattgaagcattgagataagctcgctatttgcatgctttaacgctgctactgtatgtgaataatacctctaaagagtgtttccaagaccgtaaagtcaatgtttcagcttaaaaaggcgtttattttgtgaaaatcagcccgttttagcagggtgtttgcctattgattttttctattttgaagattttagatgaccgttttttggtaaaataacaggacaaaagcaacgtaagccatgaccaaaaatgatagggatgtaatgccttatcttcacgacatagtcgcatgactcacgtcggagaactgtcttcgttggaaactcactctgttacttgcttatgctttgtgccactatctgaatcaagtggggttagtggatgtatcgactcacgaaattgcgaactaatgctgaatattctttgcgatgatcttgatagctctctgcatgctttgaccccttccctatccatagctgtttgggggctggcttcgccttgtaaagcggatagaccatcttcgtttgaacataagaatccttgtcgccgtggataaaaagcatcggtttgtgacactttgcaacttgccgaagtggtgaagcctcttggaacgaccatccgtctctaagtttgttcagggcgctggcagtgtacaataaggggaaagcaggtagtccaaattgtactttcagctcgttttcgaactcatcccacacactggtataaccacaatcttctacgaaacacttgacatagtcgggtgtacgctcccccgagacacacatggtaagagccgctcccatagaaataccatgaactacttgctggctatgcccgagcgaatcgctgaacaaagagtcggcaattgccatccaccgcagcacatcctttcgttccttccaacccatttggatacgttttccttcgctttgtccgtgggcatgatgatctggaagcaacacgttgtagcccatctttgcatagatgtgggctatcatcatcatgttggcatgcgtatctgtatagccatgcaacaaaattgctgtcttgcgactgggttgaggggcataggcaaaaacgccaaaatgctgctctccgttttgcatagtcaccactgtgtcatgaatcagatgatgtgttaacagactatccaaccatggcttgatttctggatgggtgttcatcacatgcgcataccgtgttttttcatccatttgaaagtgagtcgggcgtcccaacgaatactccagcatgtaaaaactgccgccaacaagtgccaaaggcagtgcgatagcgacaatgataagactcattttcaaccatttcttcatgtctttccgtcttgaattgctcatttgaggtgttaatagtggaaaatcaaagataagcaaaataaacaagatgcacaacgataccattaacaggagactccgtttttgcatttattagcacatgataagatggcaaattaagagttttcattttgccatacacctgatttactgtaactttgcagaaattatgagtactaaagcaataagaaatttagagtacaatccagccggattgactgatgtacaaattgcagagagcagacaacgacatggcgagaacgtattaacgccacctccaagtacatctctttggaaattgtacttggataaataccgcgaccctatcattcaaattcttttgatagcagcagccatttccttagtgttatctcttattgaaaaagattttattgagaccatcggtatctttgttgctatcttttttgccacgaccgtaggcttttattttgagcgagatgcagctaaaaagttcaatatccttaatgcattaaacgaagagtcaccagtgaaggtgcgtcgccatgggcatgtgaaagagattccacgacgagaagttgtggtgggagatattatgattatcgaagtgggtgatgagatacctgccgacgggctgcttttgaaagctgtcgatcttcacattgatgagtcttctctcacgggtgagcctatttgctcaaaggtagttttggaagagggaacgcacgatgaggacaacaagacctatccacgaaacataattctgcgtagttccatggtgatgaatgggcgcggaacagccgttgtaacagccgtaggagatgagacagagattggaaaagtggctcgcaactcgacagaaaccacagataccaagacgccactcaacaagcaattggataagttggctaaactgatatcaaaagtgggttcgactgtagcgataatggcattcatcactttccttgttcacgatatcatggtgaatgatgtcgtttggcaagggtacgattatttcagaatggcggaagtggtattgaaatacttcatgatggcagtcacgctcattgtgatggctgttcccgaaggtttgccaatggcagtaactttgagtttagcgctcaatatgcgtagaatgctcaagagtaacaaccttgtaagaaaacttcatgcttgtgaaacgatgggagctgtaaccgtgatatgtacggacaagacaggaacgctgaccgaaaacaaaatgacggtcatggagatgaaaggattaacgccacagatggaatctctccatgatgaattattatgccaagcaatagcgctcaataccacggcagagcttactgacgacagtggaattggaaatccaacggaagtctcactgttgatgtggttgagcaaacagggcatttcttatcagaccatacgcgaacaaatagagatcatagcgcagctgcctttctcgacagaaaataagtatatggcaacggtagccaagcataatgggcagccttatctgtttgtgaagggagcacccgaaatcgtgatgagtttttgtgcattgagtatcgaagaacaagcgcagcttcaaagcatgctgttgggctatcaacagaaagcaatgcgaactttggcgtttgcctacaagcccttgaaagcacctctattctcgaaagatgagctaaaagaggaattacatgatcttctgtttcagacggtggcagcgattagtgatccaatacgtaaggatgttcctctggcagtgaagcaatgccagaatgcaggaatagaggttaaaattgtaaccggtgataccgaagccactactgtagaaatcgcccgtcagattggaatttggaaagatgagacatcgcaaaaggattccatctctggtccacaatggagcgccatgcccgatgaagaggcttatgaatatgcccaaagattgaaagtaatgtcgagagcccgtcccagtgacaagcaacgattggtagaaatgttgcagaaaaggggtgaagtggttgctgttaccggagatggcaccaacgatgcgccagctttgcattatgcccatgttggtctttcgttaggttctggaaccagtgttgcaaaggaagccagtgatataacgttgttggatgattcgtttggttctattgcgcatgcggtgatgtggggacgctcgctgtataagaacattcagcgtttcttgttcttccaactggtggtcaatgtcactgccttgttattggtgcttagtggctcctttgtaggagtagaaatgccgcttacggtcactcaaatgttatgggtcaaccttcttatggatacctttgctgccatggctctcgcctctttgccaccttcgagagatgtgatgaaggacaaacctcgcaagaactctgacttcattattaacaaagagatgaggaaaggaatcttgttttgcggtgtagtcttcttcgccattatgtttgcaatgttgatttattgtgagcgtagaggttctgaaggggtagatattcgcgagttaaccatcttctttaccaccttcgtgatgattcaactatggaacttatttaatgctaagacgttaggaacgaatcataccgcttttcgttatctttggaaagacagaggtttgctcttggttttgttcatggttatctttggacaatggcttattgttacgtttggcggtaagatgttccgcaccgttccgctgtcctttcatgagtggattcttgttattggggctacttccatggttctgtgggctggagagttgtggcgatggatgcgacgaataaagacaaaaaaggcatgaaacaacaagtaaagaatattatctttgatttgggcggtgtgcttgtgggcttggacaaacatcgctgtatcagtgcctttgaacaaataggtgcgaaggctgtcgctgaatatgtgcgagatcatcgtactgcagacttgttctatgacatagaagtagggcaaatgaccaccgcagacttttgtaaagaggtgcgtaccatggcagactgcaacgccagtgatgaagagattgtgtgggcatggaaccaattattaacgggcattccacagatgaagaaggaacgtctcttggcactgaaaccgtcctatcgtttatttttgctcagtaatacgaacgaaatgcattggaagaaatgcgtgacagacgattttacagacgcacacatgaccgaaaacagttattttgagcaaatcttcttgtcgtacaaaatgaacatagccaaaccgaatcggcagatttttgaacgcgtattgaacgctgcaggtattcaggcggctgagacattatttatagacgactctttgacgaattgccagtcggctgcccaattaggcattcaagtgtttcatgaaactacaggcaatgattggctaaataaacaagaatgggatgaagacaatctttttggatgaacatacacacattgatgaaccatgtgttgctaccattggattctttgatggggtgcatcgaggacatcaatacttgatacacaaggtggtggaaaaggcaaaacaagctggcatgccatcggtggtggtgacctttgatcagcatccacgtgcggtgttgcaaaaagattacgtcccagaattgttaacaaccaatgaacaaaagtttgaccttttggctcgtacagcggtagactgtgttgttgttcttcatttcacacctactatggctgcattgacagcacaggagtttatgactcatattttgcatcatcaattgaaagtccgtgctttattcatcggctacgaccaccaatttggatatcatcgcagagagggatttgcagagtatgttcgctatggacaacagttaggcatggaagtgataaggaatgacgcctatgtagacgacgaagaggggaaacaggtgagctcttccattatccgaaagttgatacgcgaaggtgaactcccattggctaatcgatgcttgggttatccctacaccctgatgtctaacgtgatagggggctttcaagaaggacgaaagttgggctttcccactgcaaatttggatatagagcaaatcactcaactccttcctgcacaaggagtgtatgcagttcaagcacagatagataagacaggtacatggtatcgtggaatgacaagcattgggacacgtcctacctttcatggaacttctttatccatcgaaacaaatttgttggataactaccatgccaatatttatcatcaccagctttcaattgctttttataagcgtttgcgtgaagaaaagtgtttcagcggggtggacgatttacggcagcaactggtgcaagatgctgaaaatgtgaatatgttttttaatcagttgaacgaataaatgaaaacaatttttagaacagtcctcgatattgtttggtacttagtgctgtttgtcttgatacagctcattgcgatgaaagtagtgaatttagggacactgctcgttcatggcatggactttcatgaagccttacgacatgtagctaaacatgcgatgctgagtacaacagctgttatcttgtcttcgggactttcaagtgcattgacaatgcttatctttggtggagttaagtgggttcctctgtctcgttcatacgttcagagtcgaccttgggggacgttattttgggtagttttgctgtctcttggcacgttaatcccctccacatggatgatagaacagttggaaatagatgtcccttcgggtgttgaacgcatgttgatggctttgttaggtagtccttggggctatcttgtcgttggagtattaacccccattgcagaggaaatggtgtttcgaggagccattttaaggacgttgagaaaatcgcttcagcagaccactccttggattccaattgccctttcggcattgatatttggattggcacatggcaatttcgcccaatttcctcatgctttcctcatgggattgttgttaggatggatgtatgttcgtaccaatagcattatccctggagtggtattccactggatcaataattcttcagtatttattttgtataacgtgttgccacaaacggctaatcttcggctggtagaaatctttggtggaagccaacgggcagtatggttgagtttgctcttctcgttatgtatcttcctgccggcattgtttcaattgcaaagaagactacatccagcggaagaaaagctaaaatagcgaaacgccacccactggtggcgtttcttttcttacattagtatgttatgaaaaatttgagagaatgttgaaacttcacagtttcgtttttgttttactaaacattatttattcatgagaaagcatagaaattatcttattttatcatgggcgttggctgaatctccgaaggcaatatactactctgttgcatggtgtccgttttcgaagaatcaccaatagcgacagaagccccttgctgcacttgttctactccagctgtatttgtacccatagagccattgcttgtcatgaaaggcacttgtaacgcattgcttagcgtcagaataatggctactacagccgctgccttaaagagaggcataagccgttcgctcagtcttatggtgcgtgcctttacggtcactggctcgtctatcatggaaataatctttgcatcaaagtcgcttcccaaaacgtcttgagtggcttcttgatgtgcatacacaaacaaggctctgtacttttcgagttcggcaggaagctccttctgactaaagaatgtgcgaagaatctcttcctcttcaagggaagtctcgcaaacccaatagcgttctaaaagttgtttgatatatttataatccataattgtcgtatcttttgaatcgttcttttaccgtttgtctggctctgaagatgtttattttcacttgttcttcgctgatgtccagtatctcggcaatttctttgtaggcttttccttcaaaatctcggagctgcatacagcttctttgcttctcgggcagcgcattcacgatatttctcactaattctatgcggtcacgttgcagcgtcttttcgaaaggattggatgagtggtctgaagtttctacgggtctttcttccaacgattcagcgagatgtccatgccttttcacacagtcaagtgccaagtttcggcatatcgtgagactaaaagcttcgatagattctatctcttcccagctgtctcgcttgttccaaacctttatcagcgtctcttgaacaatgtcttctgcctcttcgtgactaagcgtaatgcgtagtgcaagccgataaagcacatttttgagtggtaagacgtcgttccgaaaactgatatttttcatccttgcctctatttatatgacgattgaggtgtatgtaagttacaacgtaatcttcttttaacttttattaaaagataattcttccaattacaagcatttgtcataggtggcatgaggtgttgtggatgttcttcaacccttacctcatttctgttccccctgccttgcttattcaagataagtatagccgtaaagaccagagcgataattatttaagaactcttttccttcgtctaatgaaatctttccttgcttgacactctttgtcacccaagtttctaattgccttaccaatttctttggattgtattgcacatagtcaagtacttcctcaacagtctcaccatcaatgatttggtctattttgtatttgccatccttcacggagatatgtacagcgttggtatctccaaagagattgtgtaaatcgcctaaaatctcttgataggctcctacgaggaacacacctaaataatagggttcatgatttttcagcgtatggacaggcaagacgtgtgagatgttgcgattggtcacaaagtttgcaatcttcccatcactatcacaggtaatatcttgcaaggttgcattgcgtgtaggtcgttcgttcagtcgctgaataggcaatatagggaagagctgatctatcgcccaactatctgggagtgattgaaataaagaaaaattacagaagtatttatctgccaaagttttgtctaaatttctcaattcgtcagggacatgcttgagcgacttagccatcatgtttatttcatgacagatactccaataaatactctctatctccgcccgtgtacgaaggtcgacaatgccgtgcgtgaacaggtcaagagattcttcgcggatttgttctgcatcatgccaatcttccataatgttgcgcgaattcaaattatcccatatatcatagagatcttttaccaactgatgatcattctcttcgggttcaaactcttcaggcatttgaggcaaacttgcggtttccaacacatcaataataagcaccgagtggtgcgcagaaagcgatctgccactctcggtgataaggttcggatgcggaatctcgtttttatccgctgcctctacaaaggtgtaaatacagtcattgacatattcttgaatagaataattgaccgaactctcactattcgaggaacgtgtaccgtcatagtccacgcctaatccaccaccacagtctacaaaatcgacgggataacccattttatgcaggttgatgtaatattgcgctgcctcacgtagagccgtctgtatgcggcgtattttggtgatttgtgacccgatgtggaagtgaatcaagtgaagacagtctttgaggcctttctcttcaagcatttttaatgccaataaaagttcagaagaattcaaaccaaacttggaggcatcgccaccgctttcagcccattttcccgaacccgatgaagccaatttgatgcgaataccaatattagggcgtactcctatcttcttagcagcttttgcaatgatgtctaattcgttgagtttttcaatgacaatgaagatgcgtttgcccattttctgtgccaagagtgccagctcaatgtagttttggtctttataaccattgcagacaatcagagaatcgctttgacattgaactgctatgacggcatgaagttctggcttactgcccgcttccagtcctaaattgaatttctgtccgtgagagataatctcctctacaacaggctgcatttggttcaccttgatggggtagataatgaaattctgtcctgtataattgtattccttggatgcttgttcaaaacaactggcagtcttttctattcggttgtccaagatgtcggggaaacgcaatagtacgggtgcactcacgtcacgtagtgccagctcgtccatcacgtctctaaggtctatctccgtgttgtctttgcaaggtgttacataggcatttcccttttcgttgatgccaaaataagaaacgccccatccattgatgttatatagttcttttgaatcttctattgtccactttttcattgtttctgaaatgttctgtttttagaggttgagaagtgctctcaattgagttactgctaatttaattttttcgtattgatcaagcaatgtcacgtcaaaggtgtactgtgccttttgataataaatttctcgttcacggagttgactttggatataggtcttcacctcatccgctgtcttgttgagtagtaagggtctgacgttcctacccatgttcaaatgtttgtagagtacatcggtgcaggctttcagatataccgttttgccctgcctgttcaagtagtccatgttgtcaaagaagcatggagtgccaccaccacagctgaaaatgacattctcgaactcggcaacttcgtgcagcatttcatgctctatcttccgaaatccctcttcccctcgctcttcaaagatttgtggtatcgtctttcgcatcctgttttctatgtaccaatcaaggtcgtaaaagggcattcccgttgctttagacagggcttttcctatcgttgtctttcctgcccccatgtagccaaggatgataatacgattcatcatgtcttgaggcactttatcttctactccgagttgacttctttacgggtgtattttggataatctccatacactgttcgtaggaaatatccgcagctttgtcgtgccatgtttttggcagtcggtagttctttccgtcataggcgatgtatggaccgtatctaccgttgagtacttccatcttttcgtcttgttcaaaggatttgatgtgacgttccttctcctgctgtcgcttttgctctatcagctcaatcgctgtctctaagcttacttgcaaggggttttcagtcttaggaagggatacatattttttgttgtgaagcacgtatggaccaaatctacccgcccctatcactacatcagagccttcaaactgtcctacagtacgaggcagttgaaagagtttcagcgcctcttccaagctgatggtagccatacttttatccgcaggaagctgagaaaacttcggtttctcatcatcttcagccgtcccgatttgtaccactggaccgaatcttcctatctttacaaatactggtttcccactctcagggtcaatacctatttcccgttctccggctttgtgctcgcttcgggcattcattactttttctacaatgggttcaaaatctttgtagaacactttcatcatctttagccacgaagcctttccttcggcaatttcgtcgaacttctcttctacattggcggtgaagttatagtccatgatagccgggaaattgtctatcaagaagtcgttcactacggttcctatgtcagtaggcaggagttttcccttctcattgcccaccacttcggttttctcctttgacgtgatgtggtcattcttcaaggtgtctatggtgtaggtccgctcatcgcctttcttgtctcctttttgcacatattctcgttgctgtatagtgctaatggtgggtgcataagtagaaggacgtccaatgcccaactcctctaatttcttcaccagactggcttccgtgtagcgaataggactttgagagtaacgctcggttgacgtgatttcatgtcgcagcaagcggtcgccttcggtgaggacaggcagggtgtgggaggtgtcttcttgatttgtctcatcctcatcgcttgattcgcgataagctttgatgaaaccatcaaacttaatattctccacatttgcaacaaactgctctgttacaccactaacctcaatattcacggtcgtcttttcaatctgggcatctgccatttggctggctgccgtacgcttccagatgaggtcgtagagtctacgctcttgcgaagttccttctatctcgtgctggttcatgtaggtagggcgaatggcttcgtgcgcttcttgtgcgcctttcgagtgtgtctgatatttacgaggcttactgtattccttgccataagcctttatgatttcgtctttgctggtattgatagcgagcgatgacaggttgacgctgtcggtacgcatgtaagtaatcaatccgctttcgtacagatgttgcgctatcatcatggtttgtcccaccgtaaatcccaactttcgtgctgcctcttgttgcagcgtggaggtggtaaagggaggggctggtgtgcgtttgaggggcttgcgtgcaatgctgcccactgtgaactgtgcgtctttgcatttctctaagaaagcaagcgcttcttcatgggtagggaaacgcttgtctaattcggctttcacctctgctgttccctctgcatttgctatattgaaagttgcgttgatgcggtagtaaggctcgcttttgaatgcttgtatttctcgttcacgctctacaatgagtcgtacagccacgctctgcacacgtcctgccgagagggctggcttgacttttcgccaaagaacgggcgacagacggaagcctaccaggcggtcgagtacacgccttgcttgttgcgcattgaccaaatccatgttgagatggcgtggattttgaatggcatctaagatggcaggcttggtaatttcatgaaaaacaatgcgatttgttttctcttcatccaaaccaagcacttcgcacagatgccaagaaatggcttctccctcacggtcttcatcggatgcgagccatatatgtttggcgtctttggcgttttttttcagttcgctgactaattttttcttctcctctgggatttcatattttggctctaaagtttttggatcaatgctcaactctttcttcttcaagtcacgaatatgaccataagaggacattaccttatagtctttgcccaaaaacttctcaattgtttttgcttttgcagggctctctacaattactaaattctcttgcattgcttatgaatcgtcttgttatttggcggcaaaagtaaacaaaactttctttataccttttatatatagaatattttggcgggattttaaggtttttaagatgtgtttgcttaaattataaatcagaatgcctttttattgggatgaaatttcataaaataactgtcaaaaaactttacagttgtgacaataattttggggaaatttcagccgaagaggacagaaataattgttttaactcgcatgcacaccaaatctataacacgcagattatcaacaagatgaacaccaattacgacttcactcaatgtatgttgtaaattgtctctatttcctaagattattaaagcatggagataagggccttaacccatggagataaggcggttatctacatgggttaagggcattaactcatgtagataataatgacatgtaaaaatgtttacaattatcggggtaagtgatggtctaaaaatcgacggagaccttcacgaattgaacgtaatccaaactcttcggtatggatatcctctggtgccatccaaagtgtttcgcctgcatcatcaccagcggtcagggttgaggtgtcggctacttcgcaaaggaaaaacatgtccaaggtagggatgtctaaaccgctatatcggtatttattgggtaagctgaagaggtatgtggcttttgtaacgtcaaggttggtctcttctttcacctctcttattactccttcctcacccgtttcatttgcatcggtgaaaccaccaggcaagtcgtaagttccttttgcgggttctttgaggcggcgctctatcaggatttcacctttcttattcatgatgaatgccacgtttgccgcacttggattcagataatattcaaagtgacaattctcgcactgcttgcttttctcgttcttaatcacaaaatgctgacttccgcagacgggacagaactgaaatttttctaataagtgtatcattgttgtttgtgatggataatgtctgttttatcgtttcctctctatggttgatgggactggaatcctctctttatagatttgaactcctgggtcttgacacttacaaagatactaaaatttattgattcggcaaatcctattcactttcctttttcccaaccatctgagtcatcaatgaaacatggataaaagaggtataatgggcatctgacgaacgaaaagaaaatgcaaattttgcaaaataggttaatatttgtttttttgtgtgaactttatttaattactgtatatttgtaggcaataaggaaaactatcaaccaaaattgttaaacctataaaattaatcgtatttatggcaacatttaggacaataatgctaatggcattgacattatcctccgccagtctttcgtatgctgatacgtctgttacccccatggtgacagcggctcagcagcagactgcgtgtaagggtaatattatagatacgaatggcgaccctattattggggcgtctatcgtagtgagtggacaaaagaaagccacaatcagcgatatggagggtaactttacgctgccagatgtggcaacgggaaccacgctcaccatttcgtatgtgggctacaaaccccaaacggtggtatggaatgggaaagacctttctatcacactgcatgaggatgccgaaagtctggaggacgtagtagttgtgggctacggtactcagaagaaggtaaaccttacgggtgccgtctctgtagtgagcaagaagacattagagtcgcgcgccgttaccagtgtagcacaggcattgcaaggtgctgtaccgggactgaacttcaccgtgggcaacggtggaggctcattagaccgccgtatgtctatgaacatccgtggtacgggtaccatcggtgaaggttctaacgcatcaccactggtgctgatcgatggtaccgaaggcgacttgtactcgctggcacccaacgacattgagagtatctctgtattgaaggatgcctcagcaagtgctatttatggttcacgtgcagcctttggtgtcatcttggtgacaaccaagagcggtaaggacggacgtgcaagtatttcgtacaacggcaatatgcgtttctcaacggctacgcaagtgccagagatgcccaactcgtacgacttcgcacgctattggaatgatgcagctgccaacaatggtgagggtgcaccgttcaacgaggaaatcatgaagaagatccatgacaacctcaacggcacactcaaggaagaagacaagggtcttaccaagtggcaaggttatgccgctaacgagccatgggcgatgtacactggttcgtgggcaaacaccgactggttcaaggaaatgtacaaaagcaatgttccctcacaagagcataacgtttctattagcggtggtgtgaagaacatcaactactatgtaagtggtacatggcttaaccagcacggattgatacgccacggtaaggacgtactcaacaagtacaactttacaacgaaggtgaacgctgacgtcaccaagtggctctccatctcgtacagcaacaagtggaaccgtgaggcattcagtcgtccatcttacatgacgggacttttcttccataacatcgcacgccgttggcctaccaatcctgtctatgacccacacggacactatgtgcatggtaatgagattatccagatggaagatggtggattggacaaatccaccacagacaagctgttccagcaactggtgtttgagttcaagccactcgctggctggaagattcgtttggagggtaactacaacaccaccaactatcacaaccactgggacgtgctacctatctactatcacgacccacaggaactgctcacccctgctgcatggagtgatggctacaaggcgggaaagtcggacgtgagtgatggcatgagtcgtaccaattacttcaacggtcgtttctacaccgagtatgcattcacactcaacgaaaagcatgacctgaagttgttaggtggtttggatatggagtcaaatctgtacaccacattgtcggcatcgcgtgccgacctcatcacaccgttggtgcctacgctcaacaatgccactcataaggacgtacgtcctggctttggcaacacccaatgggcaaccatgggtatgtttgctcgtgtgaactatgcttatgattctcgctacttggctgagttctctatccgccgcgacggttcttcccgtttcatcggtgataagacatgggctactttcccttcattctctttgggttggaacatggcacgcgaggcattcttcaagccacttaccaatacagtgcagaccttgaagttgcgtggttcttggggttcattgggtaacaccaacatcaaagcactatatccatggttccttagtcaaccagtaaaggtgacagattcaagctggcttatcaatggacagaagcagactgttgcgagcgtgccaggattggtatcaccaaatctgacatgggaaaccgtaagatcttggaacgtgggattagacttcggcatgttcaacaacagattgcaaggtaacttcgactactttgtccgcaacacaagcgacatggtaggtcccgctccagcaaccccttctatcttgggtgcaaagcaacctaaagaaaacaacagtaacttgcgcaccaacggatgggaactggaagtaagatggcgtgaccatatcggtgatttcaactatggagtgaagttagtaatgtcagacgacatacaaactattacacgcttctacaatcctaaccgcctgctgtttgataaggataacaaagtacaatggtgtgaaggtcagaagatgggcgacatttggggatatcaagtagaaggcatcgcacagtcggataaagagatgaacgactggcttgctaacaacaaaccatcatggggctcaaaatgggctgccggtgatgtgatgtacaaagacttgaatggcgataagaaagtaaacaacggtgagaacacctacgataacactggcgacatgaccgttatcggtaattcaatgccacgctatcgctttggtattaccgtggacgcagcgtggaaaggatttgacttcttgctcttcttacaaggtgtaggcaagcgcgacttctgggacgcttctccttacagcactggtgctaaccacggcatgtggcaggcagcagccttcaaagagcatttggactactggcgtccagcagatgataagaacttcggtcctaatcctggtgccttctatccacgtcctctcttcggtaatggaggaaagaacttcgaagccagcgaccgctatttgcagaatgcagcttacatgcgcattaagaacattcagttgggttataccttacctgttggattgacaagcgcatggggacttaacagagttcgtttctatatctctgcagagaacctgtacacattcactaaaatgaataaaatcttcgatccagaggcaacaggtggtgactggggaccaggaaagatttaccctctgcaaagggttttgtcttttggtttgaatcttaacttttaataattggaaattatgaaatacgatataaaaaatattttaagaggaggaatggtcctggcatgtaccagcttgatgctgacagcgtgcaacgacttcttagacagggcacctctggaccaagtgtctcccggcgactattacaaaaacgctgaccaattgggtacgtttacgtggaattattataaagacatcttccccaacaacatcggttggtgggcaggtgtggccacttacgacaacggaaccgacaaccaagcaacgaccaatggcaacgcgggtatgttcttgcaagaccagtggaaagtgccaacatcgggtggtatcggctttaacgccattcgcgatgttaacaagttcatcaacgaacaggaagctaagataaaggcaggagccattgaaggcgacaaaaagcaaattaaccaatatatgggcgaagcttacttcatcagagccatgctttatttcagtaaactaaaaaactttggcgacttccccatcgttctgaaagaactgaacattgatgccgacttggcagaagcaagcaagcgcatgcctcgtaacttggtggcacgccagattttatctgatatggacaaagccatctcacaattgcaggaaaagcctgtcaatggtggaaaactgcgcatcaacaagtatgctgctttggcagtgaaatcgagaatggctctatacgagggaacatttgagaagtatcacagaggtactggacgtgtgcctggtgatgccaactggcctggaaagaacatgccttggaacaaagacttcaagattaatcaacaagaagaggtagatttcttcttgactcaagccatggatgccgccaagcaggtgtctgatgctgttgggctttcgacagtgaacagccatcaaatgaatcctgccaagagtggtgagtatggcggttggaatccttactatgatatgtttgcttcttctgacctgaacaaatatccagaagtactgatgtggagacagttcaattcggacattggtgtggctcaccttacatccaacaagttgcggacaggttcgcagacgggatggacaagaggcttggtagagtcgttcttgatgaagaatggtctgcctatctacgcccgagaatctggataccagggtgacaagtcgattgacttggcaaagaccaacagggacgagcgtctgcaattgtttgtatttggcgaatcggacgtgttggcttcagacccgaatagtattacggtatataatgagcaagcaaagaaagagaagctacctacagttgagcttgtcaagttgggcattgccaatatcatcatagagaatgccgagagcaaggacaacactggctacagacaacgcaaattctacaactacgacccagccatgcagttgggacagactttctcggatgtctcaggacagatattggtacgcgtggaagaagcaatgctcaactatatcgaggcttcttacgagaagacaggtggtattgatgccacggcacggaagtattggacacaattgcgcgaacgtgctggcattacagcctctatcgagacaaccattgatgctactgacatgagccgcgaagcaaacgtaaatacggattcgtatgactggggtgcattctctgcaggtaagcctatcaacgctactctgtattctatcagacgtgaacgtagaagcgagttggctggtgagggttatcgcatggacgacctcattcgttggtgtgcacttgaccaggtaaagaactaccaaatagaaggtgtgaacttctgggacgagatgtataagaataaggtatttgagtataaagttaaagacgacaagggcaatgaagtggtgaagagctatatcgttgctgatggtggcgacaaggctaccatgtcctctaaggaccttacgaaatactatcgtccttaccagatgaacaagaaatacaacctgtacaatggatacacattctatcaggctcactacttgtcaccattctcagttcaggaaatgaaactctgctcacccgatggttctgtggcaaatacatatctctatcagaatatttattggccaacaacagccaacggtgaggctgaaaagtaaaaatggaaaattgatagataactcttgaatatgggaggcagtgaccgatgttggtcaactgcctcccatttttttgtattggtacgagaaataaccaactatatgctcgttgtttatttttgtattgataaaaagatatgtcgcattaataatatgtaattttgttaaatagatataattaaacgggctggattgtaccttttctttgcacatttctattaaatatgtatttttgcagaccgattatttcggggatgaacttagagtcccctgtgcggtcgtgttaatagtgatgcttttggccgagtgttacggttagtgaatcgcccgtgcaagtgagaaaaaataatgttttttagtagtaaaatttaaaagtttaatggacactttaagttataagactatttccgttaataaggaaacagcaaagaaagagtgggtcgtagtagatgcaagcgatcaaatcgttggtcgtttttgctctaaagtagcaaagttgctacgtggaaagtacaagccatctttcacccctcatgtagattgcggtgacaatgtcatcatcatcaacgcagagaagattaagttctctggtaaaaaagaaacagacaagctatacacacgttatactggttacccaggcggacagcgtttcaacacccctgcagagcttcgtactcgcaagaatggtgtagagaagattgttcgtcatgctgtgaaaggtatgttaccaaagggtcctttgggtcgctctttgttgaagaacctgtatgtttttgaaggagctgagcatgataaagcagcccagcagccaaaggcaattgatattaaccagtataaataataagtaaaatggaaataatcaacgcaataggtcgccgcaagagcgcagttgctcgtgtttacctcactgaaggtaccggcaaaattacgattaacaaaaaagatattgagacatatttcccatcagctattttgcgttatgtggttaagcagccattgacgacactcgaagttgaaggcaaatatgatattaaggtaaatcttgatggtggcggctttacaggtcagagccaagctctccgtttggcaattgctcgcgccttggtaaagattaatgctgatgataagggcgcattgaaagcacaaggcttcttgactcgtgacagtcgttctgtagaacgtaagaaaccaggtcagccaaaagctcgtcgtcgcttccagttcagtaagcgttaattgaggagagtagtagacaaggtgacgagtggacaagtggacgaggtgatacttatacacttaaaaactatcaactcgcaaacttgtaaacttgtaaactgttcattcgtaaacttgtaaaccgtttactcgtaaactataaacagtaactcgtacacttacaagctatcaacttgtaaacttgtaaactgatcactcgtaaacttgtaaactattcactcgtcaactgagcatccgtttagtatctaaatcctcgagatttcccatgcgtggcgaactactcgaagattggttctaatcaactaaaaagaaagtaaacaattaaaaaaagaaaaaatgtcaagaacaaactttgaccaattattacaggctggtagtcattttggacaccttcgccgcaagtggaatcctgcaatggctccttatatcttcatggagcgtaatggtattcatatcatcgacttaaacaaaaccgtagcaaaaattgatgaagctgcagaagctttgaagcaaattgctaagtctggaaagaagattttgtttgtcgctactaaaaaacaagctaaggacattgtagctgagaaggctgcatctgttaacatgccatacgtcattgagcgttgggctggtggtatgctcaccaacttccctaccattcgtaaggctgtaaagaaaatggcaaacattgataagttgatgaacgacggtactttcgcaaacatctcaaagcgcgagttgctgcaagtaacacgccagcgtgctaagctagaaaagaacttaggttctattgccgacctgacacgtttgccttcagcacttttcgttgttgacgtaatgaaagagcatatcgctgttaaggaagcaaaccgcttgggtattcctgtttttgctatcgtagataccaattcagatcctaagaatattgactttgtcattcctgctaatgacgatgcgaaagattccattgacgtcatcctaacagcttgttgccaagcaattgctgaaggattggaagagcgtaaggcagaaaaagcagacgagaaggctgcagcagagcaaagcgaagaagtagccgaggctaagccaaagcgagcacgtagagctcgtaaagaagcagaagaaactgtagagacttctactgaagaggctgatgaaaaagcagaaacagaagaaaaagaagaagttgaagtgaaagcagaagaggaaactcctgctgctgaataattgtatgaacagaggagaatagagaatgatggtatgtaacaaaaatatgccaaaaattttctttattcttctctgctcttttttatataacaatacatattaacccctataaataagaaataagattatggctgttaacattgctgatatacagaaactacgtaagatgacaggtgctggtctggctgattgtaaaaaggctttgaccgaagcagaaggaaatatggacagagctgttgagcttgttcgtgagcgtggattagccattgctgcaaaacgttctgatcgcgagacttccaacggttgtgttctcgttaagaagtcgaatgattttgccgcaatgattgcactgaagtgcgaaactgatttcgttgctaacggtaaggaattcattgagtgcaccgagcaaattcttgatgctgcgattgctgccaaagcaaagaacatcgaagaaatattgggcttgacccttgctgacggtaaagacgtagcaacaacggttaaacttcgctctggtatcactggtgagaaaatggaactcgatggttacctcttcattgaaggtgaaaacgtggagacctataaccacatgaacaaaaacatcctttgcaccatggttcagaccaacaaaccagcagaagagcagggacacaacattgctatgcaggtagctgcaatgaaccctgtagcactgaacgaggaaagtgttacacaagaggtgaaagatgcagagtacaaagtggctcttgaaaagacaaaagaggaacaggtagaaaaagctgtgaccaatgcgctgaagaaggctggcttcaatgtttacatctctgaaagcgaagatcacatggaagaaggcatccgcaagggtgaaatcacagaagcacaagctgacgaaatcagaaagctgaagaaggaagttgctgaagagaagttggcaaatttgaacgagcaaatgattcaaaatattgctaaaggtcgtatgaacaagttctttaaggagagctgcctcttgaatcaagaatatattcaagatagcaaactgaccgttgcagactatctgaagcagaccgacaaagagctcacagcagtgaactttaagcgttttagtttgcgtgcagactaaacatcgtatcgtattgaactatcaataaaccgtatagagccagtgaagagattttctttactggcttttttcttgcctattttctacgtgcctgctgggctgttcggttcccacacaaagtgtagccacttgacaggtagacattttcatctaaggcaaacaagcgtagctctttcaaatcagtaaaaatgggacaaacattcctcctcaccattctttgattgaacgaagctttttgtacaaagcgcaccatccacaaaacagcatttatatcattgatgaaacgcagttttcgaagataatcaatgctgaattttctttacaaagagcctctcataactcgcgtgtaaatcaccaacggcaaagttggtcgcaaatacgcgagttttgagcgatgttcataattctttgatatttaggttgttatgcctaaatattttcttttcgctcatattattgccaacttcgggcggttaaagcattgagataagcctgcaatttgcatgctttaatgccgctgaagcatgtgaataagacctctaaagagtgtttccaagaccgttaagttaatgtttcagcttgaaaagacgtttattttgccaaaatcagcccatttttgaagggcatttgcctattgattttttctattttgaagatttttaatggtcgttttttggtaaaataataagacagaaacaacaaattcttttgctaaaaatgatatgaaaaaacatcatcacttactacaccaagggcatcgtatttgtgttacagtaaggacaagcggctcatgcttctgttcaagaaaatatgagacggaggactcatcttgcgttagtagtcgcgcgaaccgtgcttttcctcgaaagaccgcttgcataccagcggacagaaagccttgtatcccacctttgtcaatcgtggcaacaacttcttgctggatgagggcgacccaagctcttcatcatcaagttccatgcgaagaagtcgggcaagctgaacctgaagatgcgcgacggcatgttggttgaccgcaacttaggcgtgagcaacttctaaccgcgcatggagcggtggggtggtgagccacgagaaaaacctgatgaaaccaattcttctatcttatggtaagacagatcttttggtttcatcaggttttatttatggttcaaacaaacctcgcgattcaattaagcaccgtggaagagatattcggcttgaatgtctttggtgagctctgtgaataaccgctcttgcagcttgtcggctacgcatagcgcacgagtcaacaccttgtcagaaaattcttgcaacatgtcttttgcacgtagcggctgtgttttgtatatacgcaaatactcttcttccatttcacgttgccgttggtcggtttcctcctcaaatttgcggtacgtttctttaatcatgggcgcatatttgttgtagttcaccatacccagcaccatcaccttacggaatttccaataagcagaatcggcactcgactggtcggttccctgcgtatattcaactggatatgagctgatgccctgatacagcggcaagaacaaacctaagtcggccatgcccatggcaacgtaagcaacgcagccaatggcctgaggcagttcaggacgcacctgtaggatgtgggtctgtgtggtcctgaagatagatactgggcgataaggttcttttggattgctatgtagataagggtcgtgttcggtattgtcgtagtggaaacggaatgccgtacgcaagtctgttatgctgataggcttctcagctttggcgtaaacggggaatgtatttttggttacgtcattctttatcgctggtgaaaacatctgctgcagaccccatacgcgcggatagttataggtggtgtcgagcttgacgtcgcgcgcatacgatacatggaaatcaaattcgcccttcttcgggtcgtgtaatccatgtttctctgcaaactcaatcaagtcggcggatgccaaatagttttctttatcgttagggtcgtactggcggaaacggctctggttgcccgtgacgaaatattgctctttcggcattctgcaagccaaccaacgatgtccgcaggccgtttccaagtaccatatttcttgtgcgtctacgaatccgatgccgaaaccttctgcaataccatgtttctcgatgagcatgcccaagcgctctacgccttcgcgtgcagtgtgaacgtaaggcagtacgacattgaacacggcattctctgccaaccccgtttctaccaaggggtcatgttttaacacctcatcgctgctgaaaatactttcagtcgcactcatgcccacgccggcggtgttgaatcctgcgcttccccagtggcgtggtaagttgaagggtgccaatgcactgtaacccaatgcttcgtttggcagttcacagcggaacggactgtcaagggcgataaattcttttggtccctctttcgtatcttcgtacagttcgtagtttttggcttccatggcatcccagtcttccgaacgggctacaatcatggaaccgtcggctgtcatctcttttcctactataatggtagtacactctgatggtaattcacttacttggtttttcttttttttcataggttgttgtgtgtgatatgatgtttaaaatataatgttgtgcggtattagactccgccatttgcaaatttaatgaatattttttagatgatgtatcaatagggttgtaaaattttcaagaattacacggctttttcatttaataatgttggtttgtgtatgcatcctatcaaacggaacgttcttcgttaaaatggcttctgctgcagcgactttttaacacaaattctgggtgttttttcaaccaacttgctcactcggtgaaaatatgcgaaaaatagaggtgttttgttattttgctgattgttagatgattatgcgatttgaaaacttaaaacaccatgaaaaggtgaagtggtttgaatgtgagataccttcttttagtacaaaaaggctggctataggatgtaaattgggacttaaaagcatgcacattaagcgccaagagcatacctattgtaaggaaaaagcatgcatattgccgatttggtctgtgtgaatgtggtaaaaaatgatgatttcaaggctttgaacacctaaattaccctcccagtttatctatttcgcaattttgttttgtcaaagaaaatgaattgatttaacaaacgaaaggtttattaacgcatgcgggtagcgatggctacatctataacatcatccacaatgacacaacaggggagcttgccaagcacacaaggcataagatgaagtataggcttcgtcccaagggcagacatcttccaatcaaggacagggtgagtatccatgaaagaagtaaggaagttgacgggaagagattcggagattttgagatggacttaatcgtagaccctgaccagcacgccatactcacgctggtggaaaagtccaccaatatgctgcttatgcagaaactgccatttggaaagcagtcaaagcctctggcaaaggtagttaggaaactgctgctaccatacaaggacattctgaagaccattacaacagacaacggacctgaatttgcggcacataaggaccttaccaagtttttaggtgtgccagtgtacttcgccgatccatattgctcatggcaaaagggagcggttgagaatacaaataaactaatcagacaatatataccgaaaaaggagtcgtttgaacgttatacggacaagagaattatgtcgatacaaaaaaaattgaacgaaagaccgagagaaaaattaaacttttctacaccaaaacgagagttcttcaaacatgttttataattttgcacttgctggttgactctacaaggcactttctttgtcttactggcatataaatcaccgtttttatgtacatttgtgacagttattgcatttaacttgttcaacaacatccattttaattattcttctcatgaaaatatttgccgttggaatgaattataaggagcacaataaagagctccacgaatcgttatctaaaacaacaagccctgtcatttttataatgccagattcggctttatccaaagatcacaagccatttttcattcccgatgacttgggtgtgatagaatatgaaacagaagttgtggtaagaatctgccgcttaggcaaaacaattccatcccgatttgcgcatcgttactatgatgcggtgacggtaggaattgactttacagctcgagagttgcaacagcagttgcgtgccaaagggcttccttgggagctttgtaaaagctttgatggtgccgcaacgataggagattggatggatattgataagtttcaggacattcagcggcttcagtttcacttagatgtgaatggaagtacagtgcaaaaggggtttacgggtgatatgctctataaaatagacgagttgatagcttatatcagtcgttactttacgctaaaaactggtgatttgctctttacgggtacacctgtgggagtgggacccgtacatatagacgaccatcttgaagggtatctcgaggattataaggttcttgatttcaattgcaaataatagtggagtaataaaacgtgttacgaaggattaaatatatctgcattgtttggatgctcttgacaagtccgtttttaatggctcaagcgcatttttttaacttgacagctaacgatgtcaagatagacagtgtcttaccctatttctcgcattcgtttgagttgaatgagtgctatgctgattcttcctacacggtctccattctttatcctgaatttatcgacatgacaacagcggatgtggcacgctatcaacagctttcaggcgcaccgctacccgctcttcccattcctcagcacaagatagcagtaaacagaaagagaggtttgctgcaggttggtttctctcctttggtttatcgaaatcaccattaccaaattttggtgagcttcatgttgcgcatcgaagccaaaccgctcatgtcttcgatgaaaagagccacagcgaagacccgagcaagcagcactaatcgatatgccgaccattctgttttggcatcagggaagtgggcaaaaatacgagtatcttcaacgggtgtgtaccaacttacggatgagttgataagacaagcaggctttacagaccttcagaaggtaaaagtttatggctatggaggacgacttcagaatgagcaattggtatctgaggaactcatcgcaacagacgatttgaaagaagttcctacttgttgggtcgatgggcgtaggctcttctatgcctatggcaccgtgtcatgggattcaaacactgccactcgacgcactcgcaatccttattcggacactggctattatttcttaacccaatcagaagatacgcctgttgtccttgattccaccgcttttgtccactctttttatccttcacccgactattatcacaccttatatgaagttgacggctattcgtggtatcatggtgggcgcaatctgtttcatccaaaagcgatagatgtagcggaaagtgctacttacaccatcccctctttggcatccaaaggaaaggtgaaaatggcagtcaacatgtcggctggcagtgcttcgcgaatatcagtcatgcacaacggaaagcagttgggtgaactcgccattgctctaagcaagtatgacaaaggtaatgaagcatcgggcgtttatcagatagagcgaacttccatgaccgacaccgtgaaactaaccactcggtcgggttctccttcacgattggattacatttcttttatatggcaggagcccctccctgcccctcatctcaaaggagtcaacttccctgtacccgaatttgtacaagcaattaccaatcaagacttgcacgctcacggctttgcagatatggtcatcatcattccttccagtcagaagttgaaagcacaggcagagcgtctcaaggcttttcacgagaagcatgacggtttacgtgtacaaattgtttctgcaaaccagctgtataacgaattttcgagtggcacgcccgatgcaaatgcctaccgcagatatctcaagatgttgtacgaccgtgccacgacagcggcagacatgcctaagtatcttctgctttttggtgattgtgtgtgggacaatcgtatgcttactgcgcagtgccagtcgttacatccagacgattatttactctgttttgagagtgagaactcttttaacgaggtcgattgctttgtagacgatggtttcttttgcgctcttgacgacggtgaaggactgaacaagggctttagcgaccaacaagatattgccgtggggcgtttccccgtaacgaccgaagccgatgccaaggtaatggtggacaaagtaatcgcctatgttatgaataaagatgcaggtgcatggcaaaacactttggtctttatgggcgatgacggagataacaatttgcacatgcaagatattgacgacacggcaaacgctatttcaagtcaatatccgtgttatcttgtgaagaaaattatgtgggatgcgtatcagcgcgaaacctcatcttcagggaacacttaccctgaagtctcgagaatcataaaacagcaacaagcggcaggtgcgctcatcatggattacggtggacatggcatggcgacccaaatttcgcacgaaaaagtgttaaacttgcacgactttcaaacattccaacatcctcatctcccactttggatcacagcgtcttgcgacattatgccttttgacggtgaaactccaaccattggtgaagtggctgttcggaatccacgaggtggagcaatctcgttttttggtaccacacgcacggtaatagcccattacaacgcgcgtatcaacacatcgtttttgcgacatgtgttgagtaaagatgcccatggcaaccctgtgacgataggagaagcacagcgcttggcgaagaatgaaatgattaccggcaagaaagaccttacgtgcaacaagttgcaatatgcgcttttaggcgaccctgctgttgcacttcatcaaccctcttacaacattgtcgtagattctatcaatgacaaagcattggcttcaactccaactgtggcattacaggcaggaagtacggtcacggtgaagggacacatcgagggcgtatccgatttccaaggtcttgtttttgctaccgttcgggataatgaagaaaaaatcgtgtgccgtcgcaacgatcaacaagaaaccaaggaggcactcacctttatggatcgtccaaggaccttgtataatggagcaaataaggtggagaatggtaaatttagctttgtgtttgctgtgccgagtgatatcaattactccgaaggctctggtaaactcaatctttatgccatcagtgacaaccacaaaatgcgagcaagcggtgtgagcgaagcctttacgttgggaggtagtgcagaattgaagacagactcgcttggtccatcgatttattgttatctcaacagtccctcctttgtcaatggcggcaatgtcaatagtaccccttatttcgtagcagagattaaagatgacgatggaattaacgtatcgggaagcggtatcggtcacgatttgcagttaatcattgatggagatatgtcgaagagctataatttgaacgctaactttacgtacaattttggcagttacacggctggctcaaccttctatcagttgcccaaattagcacccggtcctcatcaattactcttccgagcttgggatgtgcttaacaatccttcaacgaccaagctctccttcaatgtcgtacgaggcatggaaccgcagttgttctctatcgattgtaccaacaatcctgctcgcgaagccactacctttatccttgagcacgatcgtgcaggagcagtggttgatgtggaaattgaggtttttgacttgagtggcagactgttgtggcatcatcaagaaagcagtgtgagtacatccaacacgcaaactgtcaactggaatcttacggttgagaatggaaatcgcttacaaactggcgtttatctatatcgtgcccgcatctcttccgaaggaagtgcaaaggtttccaaggcaaagaaactcattgtaataagcaataattagctattattttcgttaggaaaataccaatcgcatagaatcgcaatagaatgaatagattttcaaaaataagtgtcctcttcgtatttatcttgtcggcgctctccttatccgcccaagacaaacgaaacatgtttaatccagtgaactactcggtgacctcacagatgattgcgcccgatgcacgtgcggcaggtttaggtgatgtaggtgctgccaccgaccccgatgtggtttcgcagttctggaatcctgctaaatatccttttaccattagtcgtgcaggagtagcattgaactacactccgtggctcagacagttagtgaatgatatcgatttggcttatttggctggttattatcgcattggcgactacagtgcaatctctggttcttttcgctatttctctcttggtgaagtaaacacgtacgttgggcaaaccaaagacggtggaatgacaattaatccttatgaaatgtccgcagacattgcgtattctttgatgttgagtgaacacttctcattgggagctgccgttcgttggatttattcagatttaacgtacgattttaaggaagaaaccactcccggttcggcttttgctgccgatattgctgcctattatcagaactatatcaatctcggagcacgcgaaagtcagttaggcattgggttgaatatctctaatatcggaagtaaaattacttttggaggcagcgacaacagtgagtttatccccaccaacctacgtttgggtgcttctctcatggtgccagttgatgagtataaccgttttacaatagcggcagatgcaaataagctgttggttcctacctatcctaaacaggacgaaggcgaatccactgaggcttatcaagagcgagtacagaaagactattatgatgtttcgagcattggaggtatctttaagagcttcggtgacgcaccaaatggtgcaaaagaggagttacaagaaatccaatggagtgttggagcagagtatgtctatcatgaccagttctcccttcgagcaggctatcatcaccaatcggagaataagggtaacttaaaatattttacggtgggagctggtttcaagatgagcgtgttctcattggatgcaggttatgtcattgccatggcaaagagtaatccgttggatcaaacccttcgcttctctttaagtttcgatatggacggtatcaaagacttgctgaagaggtaagcgtcacaccccctacccctcaccaaaagggaggaagcctttgagtattaatagatacgccctcttaacttgttaacttgtaaacttgtctactcgtctactcgtaaacttaaaaactcatcaactcaaaaactcaaaaactcataaacttcaactccatgtcctatccttcatttcgcattggctttgggtatgacgttcaccaattggtagaaggtcgcgctctttggctgggtggcatcaagattagccacgacaagggattgctgggacacagcgatgccgatgtattgattcatgctatttgtgatgcactcttaggtgcagcaaatctacgtgatataggatatcactttcccgacacagcccacgaaaccttaaatatggatagcaaagtaattttgaaaaaaacaatgcagctacttgcgtccaaaggatatcaactgggaaatatagacgccaccatatgcgccgaacaacctaagataaacccgcacatccctgcaataaaagcctgtttggcagaagtcatgaataccgatgaagacaatatctctatcaaagctacaaccagcgaacgcatgggatttgttgggaggcaagaaggaatggcagcttatgcaaccgtactcattgtgaaacaaaactaatgtctggtagttgaacttcgctttacaccatcctccaattctcgcatctttggaatcaactgctcgacttcgtcgcaaataagtacaaaatgcaatcgtttgagtcacagcgagtccatttttcgggtcagtcgtaaaacccagttgcacccctcctctcatgcacataatttcataagcctgtaaaggaagaaaggaatatccgttactcccctgaactgtgccctgaaggctttgacttttgcgttgaaggattcagcattggcatttgtggctctgttgacaaagaaattgagtatggtatcataatggttcttaaaggtgtcaatcaccgtatagaagttgtccacccccaacttctctacctcgttaaaccctgtctcttataaccatttgacgctgccgacga

SEQ ID NO: 118 - DNA, 217641 bp, Prevotella timonensis
  source 1..217641: mol_type = genomic DNA
tctcgtgggcttgkwsattagtrwargagactatttttaaggctggttctataaattagctttgttagattttgagcttatttttgaggtcaaaatgcaagagagtgaaggagtgtagcgagctacacgactgaacgaacttacattttgaaccgaaaagaagccaaaagataacaaaacgtatttcataaaaatttaatgactatatgcggtggtaatttatagaaccagcctttattattttcttgccattttgggtaagagcgttagccgtttttgtcttattattttaccaaaaaacgaccatctaaaatcttcaaaatagaaaattttaataggcaaacgacctgcaaaaatgcactgatttgaataaaataaacgtctttttacgttagaacattgatttaacggccttggaaacatacattagcggtgttattcacatgacataagagccttaaagcatgcaaatagcaggcttatctcaatgctttagtcgtccagaaatgataaaaaatcgaatgaaaagaaatgattgatacgtaatgtattcaatagcaatgaattacaaaagtctttcataactcgcgtatttgcgacccactttgctgttggttgatctcacgcgagttatgagaggctctttgtaaagaaaattcagcatttatttttatttcgtcaagtgtgtgtccaattttgcaaacgttgcattttgtggctgcgttttttgctgtaaaaatacgattcttccatgaaagagccgtgtgcaaaaacatcaattattgataaaaatgctgacaattcatagaattataattaactttgcagaaatcacacacagttcttatattgaaaggagatgttgttgattaaagaatgaaatggatgaaacgaatgaattaaatacgaccatgaacgtcagcgtgctacgcatgaaactctctctcggcatcaataggttgtatgtctttgctaaattcgtttcattcggtgaacgccagcgttcattgattcaagtaattggatttgtttcatttgtttaattcgttgttgaaacaaaagaaaatgattgttttcataacaaacaacctcataaatgaaagtgctgtggatatgatagctttcacagaaaaacgaaaaaagcgatgataaattacgatttaagcaaaataaaagcgattatatttgatgtagacggtgtattgtcgaagtctactatcacgctggatagcgatggagaacccttgcgaaccatcaatatcaaagacggttatgccattcagcttgcgcaaaaaagaggtctgcggatagccattttgacgggcggaaatacgccagctgtgcgtctgcgctatgagagtcttgggttggaagatatttatatgggctgtagcgttaaaattaaacactatcaggattttattgagaaatacggactcaccgatgaagaagtgatatttgtcggcgacgacataccagattatgaggtcatgaagcaatgtggctgtccctgttgtcctgctgatgccgttgctgaaattaaagaactgtccacttatgtgagtcattatcggggcggtgaaggctgtggtagagacatcattgagcaagtgttaagagtgaagaaattatggttgaacgaccagacggcattcggttggtaacacgacgcatcaagaaaaaataggaaaaacaaacgaaaagatatgacgaactatcatcttattcttgcttctaactcaccacgtagaaaggaactgttagaaggattggatttgccttttacggtgaaggtaaaaaactatgtttctgaagattatccgaaagatttgccggttgctcaagtgccacaattcattgcgaaagaaaaggcgagtgcctatgacgtttgtcatggagaattgttgctcacagccgataccgtcgttgttgttgggcaggaagtgctgggcaaacccgttgatgaatcggatgcgaggcgcatgctccggctgttgagtgggcgcacccatcaggtgataacaggcgtttgtctaacaacaacttcccaacagaaggcgtttagtgtcagcacaaatgttacttttaaggagctttcggacgacgagataaattattatatttcaaaatatcaaccttttgacaaggctggtgcatacggcatacaagaatggatagggtacgtgggggtgacaaaacttgaaggtagttattataatgtcatgggactccctgtacaacgaatttatgaagaaatgcaaaccatgtagcattttcgtgctacaaaaggctttaagtaagactcaatgaattattattatcttttatgaaaaataaacaatcgtttgtctgatagcattttcttctctatctttcattgttgttttatttttaacgatagtagttctttagttcttgtaatggcaatgtttagctatttctctaagttcttcatttacttaatgatgtattagttttgacggttatgataacaaaactcacaaattgtgcaaaaattcattgtaaatagtgaaaacttatagaatttttgtgataaaacttgtgaaaattaaaaaacatacctatatttgcaagtaaagagaataacattaataaatcacgaattgtatggcaaagtataatatcactgagaaaaaagagaaagaggctgcctaccgttcgctcgttagtccccagttgatggacgaactgaaggaaaaaatcttagacattattcttattcagaagaagtataaagataagaattattcagcgaaaaagttagccgatgagcttggtaccaacacacgatacatatcagcggctgtcaatgttcgttttcacatgaattatacttcctttgtgaataagtttcgtatcgaagaggcgatggcattactcgcagataaacgctatcaagatttgaacatgcaagaaatctctgatgtggtaggatttgcgaatagacagtcgttttattccgcattttataaactcaataactgtactcctcgtgaatacaggattgaacatttaggaacacaacctcaagagcctgttgcgcctaagaaaagaggacgcaaaccgaaatctaagaaaaaataatttcattattttgcatttatagtgattcaagattttaattactcggacgagcgatttgctgatttgcaaatgcttcgttatcgattaaaaggctttgagacgcttagccttcaacaaaaaatatatatctactatctatctaaagctgcacaagctggtcgggatattactaccgatcagttcggtaaatacaatctcaagatacgaaaagtcttagagctgatttatgcgcagcatgccaatgctatcgacaatcctgagttccaagctttagaagtctatctcaaacggatatggttttctaatggtatctatcatcattacggttgtgaaaagctacaacccggcttttcgccttctttctttaagtcgttgttattgactattccgccgtcgcaattgccgttggaggcaggtcagtcggttgaaatgctgtatgatgaattgtatcctgtactctttgaccccaactacctaccaaagcgagtcaacaaaaccgatggagacgatttggtgctcacatctgcttgtaacttctatgataacgtgacgcaggatgaagtggaaacttattaccagcgaatgaggcgtacccatgacgaagaacctatctcttatggattaaattccaaggttgttaaagatgaaaatggaagggtacaagaagtaaaatggacctcaagaggactctatgggaaagccattcagcgtattatcatgtggttagagaaggcgatgccctatgcagaaaacgaccagcaaaagcatgttttggagcttcttattacttactatcatacgggagagttaaagctatttgacaaattttcgatagaatggttgaaagaacaagaagggcaggtagattttatcaatggttttattgaagtgtatggtgaccctttaggtttgaaagggtcgtgggaaggcttcgtttcatacaaagacgaggaagccactcagcgcacaaagctcatcagtcagcatgcacagtggtttgaaaatcattcgcccgtcgaccaaagatttaagaaacaagaagtaagaggtgtgacagcgcatgttgtttgtgcagctatgttgggcggtgatgaatatccagcctcggcaattggtatcaacttgccaaatgcagaatggatacgcgcacgatatggttcgaaaagtgtcacgataggcaatctcaccggggcttataatgaggtggcacgaggcaatgggttgcatgaagaatttgtggcggatgatgaagttctgcgtcaaatcaacctatatggaaatctctgtgacaatcttcataccgatcttcatgaatgtgtaggccatggaagtggacaactattgccaggcgtcagtggtgatgcgttaagggcatatggtgatacgattgaagaagctcgggcagatttgtttgctttgtactatatggcggatgaaaaattggtggagcttggactgcttcctgacacgacagcctatcaagcacaatattacacgtacctgatgaacggtctgatgacgcagcttgtacgtattcagttggggcataaaatagaggaggctcacatgagaaatcgtgcactcatcgcccattgggtgttggcacatgcaggtgatgccgtagagattgtggagcgttctgtagaaggtacaaacgaaataaagcactatgtacaagtcaacgactattccaaattgagaaatctctttggagaattgttggctgaaattcaacgtatcaagagtgagggtgattttgaagcggctcgaaatatggttgaaacctatgctgtcaacattgattcggtcttacacgaagaggtgttgaaacgataccgccaattagatatcgccccgtataaaggttttatcaatccgtggatgaagccccaattagataatcaaggaaatattatcgatattgagcttgattataccgagtcgtatgcgcatcaaatgatgagatattctaaagagtcagttgccgatgaatcatgatataaatgaaacagtgaaagaaatcaagcgttcgtttcgcttgttaatgaatggtgttgcctcgcagtctatgcgtgagaagggtgcttcttatttcgtgaactggggttgttcgttaggcgatttatcccaaatggcaaagcaatatggcaaaaactaccatttagcgattgccttatggaaagaaaacatccgtgaatgtaaaattttagccacgttgataatgccgccagagcaattagatgctgacatcgttgatatttggatagcggacatacacacgcaagatttagccgaaatagcatcgttcaatctttttcaatatttgccttatgcttccgttcttgcctaccaatggatggcgacagatgataagataaagcaaatttgtgcttatcagaccttgtcacgcttgtttatgaggggagtagtgcctaacgaacgaggcattaacgagttcttagatcaaagtagtgtcgctttgcaacacgaagatgtgggcgttcgacatgccgctatgaattgcatcgtgcggttttgtgcattgggagacgagtatcatcaaatcgcaacgaaggcacttcaaatggagatttaagatttatacttgcatgctgatacttttttccaaagaaaagttgtaactttgtggtgttatatagctcaatatgaaaaaagatatcagaaatgccgttaggcaacatctggatgattatcttatcacaaacaatctccgaaagacatctgagagatatgcaattcttgacgctgtgcttagcttaaaagggcatttctcgttggatgagctgaatgattatctcttagaaaaaagtttcagggtgagtagagcgacgctatataacaatttgcggctctttcaaaagttacgattcgtcgtttgtcatcgtctttctaatggtacaaagtacgagtcatgctgtgacagtaaggaccattgtcatcagatttgcaccatttgtggtaaggtgacggagattaacagcacagaattgagagacactgtggaggagatgaagctcaaaaggttcaaaaaagacgcttatacattatatatatatggggtgtgtagttcgtgtcaagcaaagattacacgccgcaaatccaacagaaagaaattaaaaccataaaatcatgaatacaggtaaagtagatgtgctcctcggactacaatggggagatgaaggcaaagggaaggtcgttgatgtgctgacacccaaatatgacgtcatcgcaagatttcaagggggacccaatgcagggcataccctcgaatttgaaaaccagaaatatgtgttacgaagcatcccctctggtatctttcaaggtggaaagctgaacatcattggcaatggggttgtgcttgcgcccgacctctttatgaaagaagcccaagaacttgaaaagagtggacacgaattgaaaagccgtattcacatctcgaagaaagcacatttaatcatgcctactcatagaattttggatcaggcatacgaggcagcacgaggaaagggaaaggttggaacgacagggaagggaattggtcccacttataccgacaagacttcacgcaacggtctacgtgtaggagacatcttagaccgctttgacgaaaaatatcaggcgcacaaggagcgtcatctcaagatgctgaaagcactcaattattctgattttgatattacagaaacagaaaaggagtggatggagggcgttgaatacctcaaacaattcaagttagtggatagtgaacatgaaatcaatcgtctgcttcgacagcaaaagtccatcttgtgtgaaggagcgcaaggcacgatgcttgatgttgattttggtagttatcctttcgtcacctcttctaatacgatatgtgcaggtgcttgtatcggactcggtttgggtcctcgcatgataggaaatgtttatggcatcatgaaagcgtattgtacacgtgtaggttctggtcctttccccacagaactctttgacgaaacaggcaagcaacttcgtgacttaggtcatgagtatggtgctgtgacagggcgtgagcgtcgttgcggatgggtggatttaatccaactgcgttattctgtgatggtcaacggggtgactcatctcattttaatgaagagcgatgtccttgatgagatgaagacaattaaagcatgtgtaggctacaagttgcccgatggcaccactacgaaggagcttccttttgacttggagggtgtggagcctatttaccaagagttggaagggtggcaaacagatatgacaaagatgacctctgaggacgaattccctgctgctttcaagaaatatctgcatttcatagaggagttccttgaaactcctataaagattgtgtctataggcccagaccgcgcacaaacggtgattagaaaataatgtgaaggaaatagcaatggcaaacaaaccaagtattgtaaaaggaacacgcgacttctctccagcggagatgtctaaaagaaattatatttttaacactatcaaagaggtctatgctctttacggttaccaacagatagaaacgccgtcgttagaaacgcttcagaccctcatggggaaatatggagaagagggcgataaacttttattcaaggtattgaactctggagatttcttaaataaggtaagcgatgaggaacttcaagagcgcaatgttttgaaattagcttccaagatttgcgaaaaaggccttcgttacgacttaaccgtaccttttgctcgttatgtggtgatgcatcatgatgaaatacaattcccattcaagcgttaccaaatacaaccagtatggcgtgctgaccgaccgcaaaaagggcgttatcgtgaattttatcaatgcgatgccgatgtggttggctctgattctctattgaatgaggtggagctaatgcagatagtcgatgaagtgtttacacggtttggcgtacgcgtgttgctaaaaatcaacaatcggaagattctgacagggattgcagaagtgataggtgctgcagataagatagtagatatcactgttgcaattgacaagttggataaaatcggactggagggtgtgaaccaagaattggcgaattccggaattgatgctgatgccattgagaagttgcagcctatcatttcattgcaaggaaccaatgaagaaaaacttaagaccattggcgaggtgctgaaagacagcgagatagggttgaaaggtgtcgaagaggtttcttatatcttaaaggtgttgaagtcggtagggctgcatcatgaaatagaacttgatttaactttggcacgcgggctcaactactatacaggggcaatctttgaagtaaaagccttggatgttgagattggtagcatcacaggcggaggtcgatatgataatcttacgggtatcttcggcaagcccggcttgagcggcgtcggtatctctttcggagccgaccgcatctatgatgtccttcatgcgctcaacctttatcctaaagaaaccattggtagcactcagctgctgtttatcaactttggtgaccaagaaacggcttactgtctaccattagtgaatgaggctcgtcgacaaggagtgtgcacagagcttttcccagatgctgtgaaaatgaagaagcagatgagttatgccaatgctcatgaaataccctatgtggctttagcgggtgagaatgaaatgaaagaaaataaaattacgctcaaggatatgcgttcaggggagcagaaattattgtctaaagatgatttaattccataccttttagagcgaaaataacacaatttttcggtaaataataaaaagtttatgatccaacatcagttttccttgttggttatgagagaaattatcataaattttgtacatttgcaagcaatacaaaaagaataaaatatgatattagataatcaggcttacaacagacttattgatgcgggaattcacccatcggctcaacgtatcgctattatggagtatcttttgacaaatttcacgcacccaacggtggatgaaatatataaaaacctctgtccaaaaatccctacattgagtaaaacaacggtgtataacacattgcgtttgtttgcagaacatcatgctgcacagatgattaccattgacgatcatcgagtttgctatgacggaaagatggagcctcatgtacattttttctgcaataaatgcggaaagattatcgacttgccaaacgaggcagctccccaattggcagaaaaacgtaacattgacggtcacatcgtggacgagatgcaactctattataaaggagtttgcaacgaatgtgttaatgcagagctggaaaaatcacagaattgatttttattactgaaaagacttaccctttcacatctttaatatttcaaaaagaacccattgagttagctgttttaactcaatgggtttgtgttgttatctccatgggttaacgcccttatctccatgggttaacacccttatctacatgagttaacacccttatctccatgggttagtagcgttaagtcaatgacttaattttataggtgattgcgagtaataaatctgaagatttgttattctatattttcaacggtcaccccgtcaaattcagagataaaatcaataaaaccgttgtcaaacctacttcgtttcatcaccatttccatgctgacatggtaagcctctttggcttgaaaacgttcaagttttacacggtatgaatgtagaacagccttttcgttttttaatcttaaaagaatttcatcaatatgtgctttgtcgggtgaaataaaggaaaaactgatatggcgtgttccaaaatgctgtatcgtgtagttcagaacctccaaacagataagcaccaaaaccgtgctggcaacagaaacggtgtacaatccagcacccgtagccaagccgatggcggaagtaacccacaaacccgcagcagtggtgaggcctctgactacatgtttttggaaaataatcgttcctgctccgataaaaccaataccgctaaccacctgtgaagcaatgcgtgaagggtctaaagagacgttgggtgaggtctccaaaatgtgagaaaagccatattgtgaaacaaccatgaagagcgcactaccaagtgctaccaaaaaatgggtgcgaaaacctgcttctttggcacgatattctcgttctatcccaatcagaccgcctaagatgcctgcaatgaaaatccgaataatgaaggttaattccataaattacttttatctttgcgaagataaataaattttagtgaaaatacaaatgagtatcgaaaaaaatccattatctttgtatagcgtattgagttgttcatattttatcgaacaatctcaggctttttttataggaataacagtgttatgaaatctctaaaagaactatacaaaataggaaaaggcccttcgagtagccatacgatgggaccgcaattggcttcaaaaatctttttgagtaagtatcctcaggcagatagctatgaagttacactctatggaagtttggcagccacagggaaaggtcacttgaccgatgtggctatcgctggtgttttgggcgagcacaaagatttggatatcgtttggaaaccgcaaatattccttccatttcatcccaatggcatgctgtttaaggcttttgatgcgcacaaacaagaaataggcgagtggactgtttatagtgtgggcggtggtgctttgtccgaaggcaagggcaaagacgacatgttcaacacaaagagtgtctatgagatgactaccttgtcagaaattatggcgtggtgcgaggagaatgggcgcagctattgggagtatgttgatgagtgtgaagacgatgatatatgggactacttgctcgaagtgtggcaagtgatgaaagaagctgtggagagaggcatcaaccatgaaggtgtcttgcccggtcctctgaacttgagacgcaaggctgccagttatttcgtgaaagccaatggttacaaaaaatcactccaatcacgggcgttggtctatgcgtatgcgctggctgtgagtgaagagaatgcttcgggaggtaccattgtgaccgcacccacatgtggatcttgtggagtaatgcctgctgtgctttaccatttgtcgaaaggacacggcttcagtgatactcgaattgtgcatgccatggcaacagcaggcttgtttgggaacattgtcaagtacaatgcttcaatctcaggagctgatgttggttgtcaaggtgaggttggtgtggcttgtgcgatggtatcagcagcagcttgtcaactatttgggggcagcattactcaaatagaatatgccgccgaaatgggactcgaacaccatttgggaatgacatgcgaccctgtttgtggattggttcaaattccttgtatcgagcgaaatgcctttgcggcaaccagagctttggatgcaaacttatacgctacgttctcggatggcaagcaccatgtatcctttgataaagtggttcgggtgatgaaaaagacgggtcatgacttaccttccttgtacaaagagacgagtgagggtgggttggctgccgaaatttgttagcgggaggcttgaaatccctctaacaattcgtacttcttgtgcatcattctgttgtatatgttgcgcaaccaccaaggactactgcatacgaaaagactgccaatgacgatgagcaggatataaatctgaaaattgttcaggaagatttgcaacaccgacatgaatgccggaggaactgttacgcagatgatgttgatgagcggctgtcggtagttgttgtgagagtaattcttattgataaactttttgttgagtggagtgcattgtttgttgtacacagccaattgaaaaagcaaaaagtattgaaatcccgccgtgaaaacggcataagaaatgatttgaagaacatcaaacttcccagaaaaaacggtggggagcatgagtatcaacggcatgatgagcattcccacataaaagagatatttggctttgagtaagctgagaatattctctttttgtaccatgagacagtcgatgtaattgccctcgtagtccataatgcgtgaaagcgacatcgcaccaaataccacaaagttgtaaaaactaaagaagtcggtgtaaaaagtcccatcataaacatcagtgaaagccaacaataaggaaaaaagtatgacaattgacatgcttccaatgaacgttttgcgagggtttttattacgaagaatcgattgaatttcgagttgtaaataagttcctacatccccatagttttcaaacaaagagagtttcttaagtgtagacgcattggttttctctgtattttccagttcgcttgtgatatgggtatattgaatgtggcggttcagcacgatgagcgcaatcaatagtactatggaagcgaggtaggggagtgggttgttcgcttctataagcgttcctatcgtagcataaacagaaagcaaattctctattccagcgttctctccaatataccaaggtgacgctaaaatggcaaaaatgccgataggtaacagccaccaaaacacagagtctgtggtcaaaattcgtgtgatatcataaacttgtcggttcagataaatcaagagcgtgtagaagataaggaccccaaggcttatccatattccaaagctaaacagcacagacatcagcaaataggggatgatgaaggcgtaccaaataaagtttgaggctttgaagaacgacatgccgatgaagttgtctatgcaggtgtatttggaaatgggaaggagtatgtagggttttactaattgggcaggggcttcttgggtggttaaactaaacataaagtcagccgcaagaatgaaaggaatgatggaacaaataaattccaacgatgtcatggaggtgctgccttgtacaagaagagagaaaagaatagccaaaaaagccatgtaaatcagcccaaagatgattcctacccacatcacaatttgggcaattttgttttgttgaaagctcaagctacgcttttctgcaagtttgcgatgccgccacatcatcttaaagagtgctattcgctgttggaagtctgtggctgataaacaaagttttgttcggttcatcatgttgtggcttggcttaaatggagaaggatgcgttggctggttggcttatctcaaatctatcacttctgcagaagggaaatctcgtgatttgaaaacaaacaagttgttgggtaagttcttggtacggaagttacgaacttgaatggtagaccattgattgccttgcttgattttgatttgtgcagggatgtaattacccttattgattaaaatgtacatctcggaaatactgcttcgcttgttttgggcaaccattcgtatctgataattgttccccacggttttgctatatagttggtatccagatttatacatatagataaaagtataaggattcatggaaacctgttgcgtatgtgaaggagaggagatgttcacttcgttggtttgcttcaggtagctccattgggttttgccgtcgaaccacactgttgcctgtggcgtacgtgcataaaactttgcgcctttaatggcgatagagccattggttttacccaacttagggtgcgaataggtgaaattggcactcgcacccgccttgtttccgatgatagcagctgtcttatcaagaatttttcgtgcctgttggttgttttgagcatgaattgaaatggaaaaaaacaatgcaataagtactgctcctgctttcaaaaatatattctgtaatttacgttgtttcatattgttaatgttgtttatccatgtatgttactgatgatagcattcagagacgcttcatcttgaaccaatacatcgcgcggtttactaccttgtgctggtcctacgattcctgcagcttctaactgatccatcaatcttcctgcacgattgtaccctatggagaagcgtctttgaatcatactcgtggagccactcttagaagtgacaatggcatgggcagcttcttcaaagaatgggtcgaggctctgaatgtcatttcctccaccagtagtccccgttttcccgtcaacagcaggttctggaagctgcaaaggctctacaggaccgggctgattttctataaattcgttgattctttctatctctggcgtgtctacaaacgcacactgaacacggacaggttcgttgccatttaagaagagtaagtctccacgacccactaattggttggcacccgttctgtctaagatggttctcgaatcaatcatagcactaactttgaatgccattctgccagggaagttcgccttaatattacccgtaatgatgtttgccgtaggacgttgtgtcgcaataatcatgtgaatacccaccgcacgagctaactgtgcaatacgcgtgataggcatttcaatctctctaccagcagtcataatcaaatcgccatactcatcaatgatgacaacgatataaggcatgtattcgtgtcctttggttaagttgagctgatgattgacaaatttacggttatattctttgatattacgtgctccagctaatttcagcatgtcgtagcgataatccattaaggtgcaaagtgaatttaacgttctcaccaccttcgttacatcggtgatgataggttcgtcatcattccctggagccgttgccataaagtgatctgtaatgcgggagtaaacactaaattctactttcttaggatcgatgaggacaatcttcaactcattaggatgtttcttgtagagtagtgaagtgatgatagcattcagtcccacagatttaccttgtcctgttgctccagccactaaaaggtgcggaatctttgccaaatcaaccatgaatacctcattggtgatggttttcccaatggctaaaggcagttccatctttgactcttggaatctcttggaattcaagatgctttccatggacacaatggtaggcttcttgttcggcacttcaataccaattgtacccttgcctggaattggagcgataatacgtatgcccaacgcagccaagctcagcgcaatgtcatcttcaaggtttctaatcttagagatacgtacaccttcggctggtgttatttcgtaaagcgtgatagtaggacctacggttgccttaatctcacgaatggcgaccccaaagctgttgagcacctcgacaatgcgagcattgttggctttgatttcctccatatccacttggggtttgtcttcttcgttgtacttcttcagcaagtcaagttgtggatatttgtaattcaagaacggctctttaggattgataggtgtcttcaaaacctcttctagcgtcaaggttttacccgttgctttttctccttctgtagccacctcaaccgttaagttgccgtcattgtctccctcagtattcgaagattgtgccgatgttttcggcgtttttttaccttcttgcttgtttagcatggacacatcggtgaggtctaccactgttggctgtgcctcttcttcaggttcttcagaaggattaacgtcctcttctgcctcttcctcaggtcctattatcgcttcaggtttcgcctcgttatggtgggaaagatttgtcaccgtaaagggaatcttacttgtcaaatacttcacggggttcaaagcctttctgatgacctctatggtttctgcactcaggtaggttaagaacatgagtgccactaacaataagaccgctgttaagccgggaggacccaccaaattctctaattgttggacacaaaagacaccatggttgccgccaggattgaagacttggtcacccataatgggagttgcaaacttcgctaaggtgacagaactccatatcattacaacggtacaaccaaagaaccatttccaaaggttgacgtggtaggctttcatgagcttcaaaccaaccaaaatgaaaaatgctgggatgaggaatgaagggatgccaaaattgagcgtgatgagcgagtaggcgatgatagcccctatacttccacagtaatttgcaaaggattggtcggcattcatccattctctggggcgcaaatcttcaagaatactctgatctgcttgccccgtagaaaaaaaagaaaccattgcaataatgacgtatattgcaatgactaataaaataactcctaagaggaagtccgtcttctcgttactcaatatattttgaaagccaacagcttctcctacatttttaggcttgcgttctggcttctttcttttcacgcccatattatatcctgtgatttgattgcaaaaatagtgtaaaaatgtcagaatcctttatgttttcagaacttttttctatttttgcaaaacataaaaataacgaactatgatgcgaatactttatagtaaatttaacaaagaagctatccatgaacttccacaagttttatttacgggtcgaatcatagtcatcacctcagagaaaaaggcagaaaaagcggttgattttcttctcaagcaaagcattttgggcgttgatacagagacgcgtcctgtgtttagaaaggggcaatcttataaggtttctctgcttcaagtggctacgcatgacacctgtttcctgttccgattgaatattttaggcatcactccatctatcaagcgattgttggaaaatacagaaaccaagatgattggtttatcttggcatgatgatctcttggctctccataagcgatctgattttaagaaaggtaactttattgatttacaagacattatcggagatttaggaatcaaagatttaagcttgcaaaagttgtatgcaaacatttttaggcaaaagattagtaaacgtcaacgactcacaaattggaacaatgaaacgctctctgaaaagcaaaagcaatatgcagccaccgatgcttgggcgtgtattcagctgtatgaggaaatcatgcgtcttaaagtgagtggggattaccagttagtggaggtggaggaagaacctaagaataatgaattaaagaatgattagcaaaacaattcaactaaagaaaggtaaagaggagtctctcaatcggtttcatccttggatattttcgggtgctatcctaaaaaaagatgatgacattgaagagggtgaagtcgtgaaggtttacacgtacgacaagcgtttcatcgccttggggcattatcaaataggctccatagcggtacgagtgttgtcgtttagtgacacagaaatctcgctctcattttgggtctctcgtctccagtctgcattcaacatgcggaaagccattggacttgctgacctttctgataacaataccttccgattggtgcatggagagggcgataacctaccgggattgataatcgactgctatggcacgacagccgtgatgcaagctcatagcgtgggaatgcatcgacagcggcatgagatatgcgaagccttaaagcaggtaatgggcaaccgaatacaaagtgtgtattacaaaagtgaaactacactaccttataaagccgacttgggacaagaaaacgagttcttgttaggtgccagtaaagatgatgtcgcccttgaaaacggattaaaattccatgtggattggctgaaagggcagaagacaggctttttcatcgaccaacgagagaatcgttgtttgcttgaaaaatatgcgcaaggtcgctcggttcttaacatgttttgctacactggtggtttttctgtgtatgccatgcgaggcggagctaagttggtacattccgtagacagtagcgccaaagccattgagttaaccaatgcgaatgttcaaatgaacttccccaatgacgagcggcatgcttctttttgcgacgatgccttcaaattcttggacagttatgatgcgcaatacgatttaatggtgttggatccgcctgcttttgccaaacatcggggggctttgcgcaatgccctaaagggttatactcgtctcaatctgaaaggatttgaacgcatcaagcccggtggaatcttgttcacgttcagctgttcgcaagtagttaccaaggacaacttccgcaatgccgtgtttacggcggctgcacaagcaagcaggaatgtacggattttgcaccaactccaccagccagccgaccatcctgtgaacatttatcatcctgagggtgagtatctcaagggactggtgctatatgtagagtagcgaggtgattggggtgcgtgcccttctcctcgttacaaattgacgcaaccatctgtagtgaacgactttgagcgacatatcgagcagtacatctcttccttgtcattattaaataaggaggagctttacctcgtggctctatcgggcggggcagatagtgtgtgcttgcttcgatgtttacacaacttaggttatcggttggaggcggtgcattgccattttcatctgcgtgcagaagaggcggacagggatttattgttttgtcaagacctatgtacccagttgcaaatacctttccattccactcacttcgacaccaagacttatgctcaatctcatggggtgagcatagaaatggctgctcgagatttgcgctattcgtatttccgaaaaatggtagaggttcgccatgctgctgctgtgtgcgtggggcatcacagcgaggacagtgtagaaacgatattgctcaatttggttcggtcgacaggcattcatggattgacaggcatttcaccaaagaaaggaattattgtccgtccacttctctgtgttaatcgtctgaaaatcatagattacctccaatctattcaacaaaactatgtgaccgatagcaccaattttgttgccgatgtgcagcgcaatcaaatgcgactacaggtcattccgcaattggagcgaatcaatcctgccgcacaagtcaacatcttgaaggcggcacaacggttatcggacattgccgacatctttgacaactatttgtcgcagcaggtgcgttggcatccgtcagagggttatagctggtttcctattgccgagctgacgcacgaatatatcttgtggtatctgttaaaagactttcatttcagctctgtgcaggtagaacagatttggcaaaacctccatggcgaaagtggaaagcaatggcaatcgtccacacacgaactcttgttggaccgcaatcggctgctcattgctgcctgttcggcattcccctcgaccgtgttgagcatgccacggataggcaattaccgctatgatgacaaatggcagttggcgatttcgcaggaaaaacccgacttaagtgccgctgacctcaaagaccctcgttgtgcctttgtcgatagtcaccatgtagcatttcccctgtgccttcgccccgttcgccctgcagaccgctttcagccgttcggcatgaaaggttcacaactgttgagcgactacatgaccaatcgtaagatgtcggttttcgacaaacgtatgcagttggttttgaccgatgcccatgaccacatcgtgtgggtagtcaatcaacgaacggcagattggtgtcgggtaacggatgaaaccaccgaagttcttaaggttgtgtgtacggctgctccttgtcattcatcatcattttgagtcctccgtgtggcgataagcggcttccttccatgaaagcattttcacaaagaacaaccacggacattgcagaaaagaaaaaggaaagtgcacacttttgtgctttcattgcttgattatcacattaaaacattatatttgcaatatcattaaagacaaacacagtatgaaatatcatcaattcaaaggattgggcattgccgttgtcaccccttttacacaaagtggagcggtggattatcatgcattagaacgattggtgaaatatcaattggagagtggagccgactttctttgtatccttgcaacgacaggagaaacgccttgtttaagttgtgacgaaaaggatgccatcacatcgttggtgaaagacgtcaatcaaggtagagttccgatactcaaatattgtggaggaaacaacaccgccgctgtgatagcagagatgcaatcgacagattggagcggaattgatggtatcttgagcatttgtccctattataataagccttcacaagagggcttgtaccagcacttcaaagccatttcccaagccagtccgctgcctatcgtgatgtataatgtgccaggacgaacgggagtgaatatgagtgcggaaacaacgcttcgattggcgtgggaatgtgaaaacattgttggaattaaagaagcatctggtagcttggagcatgtggatgaaatgatcaaaggaaagcccgagagatttgatgttatcagtggtgatgatgcccttaccttttcaatgattgccagtggtgcggctggtgtaatatcggtcatcggtaacgctttgccaaaagagttctcgcgaatgatacgacttgagtttcaaggagagtacgaaccagctcgcaagattcaccacatgtttacagaactctacagcctcttgtttgtagatggcaacccagcaggtgtgaaagccctgttgagtgatatgggattgatagagaatgtgctgcgtttgcctctggtgccgacaaccattaagacaaaagagaagatggctgccatcttaaaggaaatgaggatataagggtaagtttatcgtttttatcttttattgttagataaaaacttttcctactccgtggtgtgagtagccatgctcaacctctctatttgtcgattttacttacaacgactgttgaacttcaaaataaaaccgctgatgtttaccaactatttgtgtaaacatcagcggtactgtttaatttaatctatcgtacgaatcgctgatttcgatttggtgaaactactcgttcaccatgacagcgaagtaatctctcttacctgaaggccaaatacctttgatgtaaagtactgggtccttactggtggaggctttctttaccgcaagttgcaagtcgcttaacgatttcatcggtgtgtcgttcacatcttgaataacgaatccctttgcgataccaacctctttcagtggtccgttgctcaccttcatcacctctaatccgtagctaatgcgcagttgctctttctgactctgtgtgatttcacggtaatttccgcctaacacatccaagtcagcaactttcacaatgttggtgtttccttgtgcattctttaaggtaacagtcttatttaccttgttcttacggtgtaagaaagtaatcgacatcttgtcgccagggtgcttgccgtagataatttcttgcagttctgccatttttgtcactttctttccatcgatatgcgtaatgacatcgccctctttcaagcctgcggcagcaccagcaccatcttcttctacctttacaacatacacaccagagttagttcctaagtccacatccttgcctttgtccttttctacgttgatgtagttgagcacatcttgtccttggatgcctaacatcgcacgctgtacattgccatatttcttcaaatcttctaccaccttactcataatactcgtagggatagcaaagccataaccagcatacgaacctgtttgcgagtaaagcatggcattgatgcccaccaactcgccttgtgcattcacgagcgcacctcctgagtttccttggttaatagcagcgtcggtctggatgaaactctctacaccattggcatagagcgaacgtgctttggcactcacaataccagctgtcaccgtgttgttcaatccaaaggggttgccaatagcgatgacccattcgcccaccttcaggttgtccgagttcccgatggcgagagttggcaggttcttaccttctactttgatgagtgctaagtctgtcattttgtctgttcctatgatgcgagccgaaaattctcggttgtcactcaaggtcactgtcaactcatctgctccttcaacaacgtgattgttggtcacaatgtaaccatcgctcgagataatgacgccagagcctgtagctctcttcggtggagtctgcatttgtcgtctttgagaaccaccctcaccaaagatgtctccaaaggggaatccaaagaagtcggagaacggattacgttgttgcacttcaacggtctttccattttgtacatatttaatatgcacaacggcaggcagtgccttttctgaagcgtaagttaaatcaacgggttgtcctgcaataggagcctgatcgccagccgcatttaccttgataaacgagccagccgaaaaagctaatgcgataacacacatggctgtgagcaaataacttgaatactttttcatgtaaattataattaaaaaatgttttgtaatatttcgttagaaaatgtaagcacaatggctaccattctcttcgttttgtttctttacatgcaaatttaatgtctaatgcgatgaatatgccaaaatgtcttatatctttatcccaatttaacatttgcgtttcgctccttaacggctcttaagtactgcattgctcttttttacagaatttactggttgcagcggttctatggaattgtatggatttgttttatggttcgcattttttttgttatctttgctcccataaaaacaagtgctctggctctgccgctggtatcgaatgatacgagaggaaagtccgggcaacacaggacactccacttctgaaagtagaagctattggtgacagtaggtgtcggtagaagaaaataaccgctcactggtaacagggagtaagggtgagaaggtggtgtaagagaccaccagctaacgggtgatcgttaggctgtgccatctggaggttgcaaattcgcgtaaaccattgacggagagttgtccgctcgaacactcggtagacttggagcgtcatgctacagtagaccgcttgtggcaatggagggtagaatgctggagttggagggtgaccttcaatgtagataaatggtggagcaccagttttatattggtgacagaacccggcttataggagcacttgatttttttttgttcatttggataccaaagcgtgcggatgtagtttgagcggtcgggtggatgttgtcctcctatcagtatcggcgagaaacgcccctgttggaaatgctcatgcggaaaacacggtatataacgtggcgaaaggtgctttatcaagcgcctacccacatcactaataaactcacacttcaatgaatcaatccttacaaaaattgaagaactttctaaccattgatatgtggcgcctgaagtcagacgatgtttctaaaccgaaatatctgctggtgagtattctcaaaaaactgtatttagccattactttcttctttacaaagggaacgagcgattatgcggcagcgttgacctattccaccttgttggcaatcgttcctatctgcgctgttgtgtttgccatcgccagaggatttgggttctccaagtacatcgaagaatggtttagacaagcgctgtcggggcaagaacaggcggctgacatcattatccgttttgtcaattcttacttgatacatacccatagcggtgtgatactcggtgtgggattgttattcatgctgtggaccgtactcaggctaacacggacgatagagcaaacattcaacagcatttggcaggtgaaacaagagcgtggactctttcgtacggtgaccgattacttggcaatggtcttcatgatgcctatcatgatagtgctcatttcgggtatttctattttcatgactacctttgtagacagggcgtccagttatatgctgcttgctcctattttgcagattgcgctcaacctgatgccgtttgtgattatctcctgcgtatttgtcggcttatacatctttatgccgaataccaaagtgaagttttctgcggctttggcacctggcatcttggcaggtgttgcgatgcagttcttgcaattgttctatattcacgggcaaatgttgctctccagttataatgctatttacggtacttttgctgccttaccgctttttatgttgtggatgcaaatatcatggacgatatgtttgtttggcgcacaattgtgctataccaatcaaaatttagaggatttagccttcatgaccaaccctgccgaactgagtcatcgttaccgtctcttgctgagtggggtgcttttgggtaagatttgtaaacgattcattgaaggaaagaaaccctatactgccctcgaattgaagttagaaaccaacattcctattcgcattactaacgatttgttgtacgacatgaccgttgttcaccttatcaattcaagctatgatggcgacagtgcggagggagagttgatttaccaacctgccgaaatgctggatcatctgacggtggggactttagtcgaccgcttagaggcgttgggggcttggcatcttgacttagatttgcacgaccatttggaaactccgcaatggaaaggtgtcttcgatctgcgaaagaaatacttggatgaattacgaaatattcccgtcagggatttaattccagaggacgatgaggttgccctgcaataaggcaccattgacccttgcttgtccaagaaatgaaagcaactcaatcggaataaacaataagatagataacgataataacaataaaagaaaatggaaactaaattaccagattttatcaaatacactgacaaattctcaaagacaggatttatcgataagatagcaagtattgctaagcgagctggtgctaagttggtgtatgccgctcttgtgctgtattatacccttgagagtgatcaggtgtctgtcaaagacaaagcaatgattatcggtgcattaggttatctgattagcccgcttgatgtggtgccagatgccattccaattgctggactcagtgacgacatggcagtcttgatatatgtcttgaaacgagtatgggtcgatgtctcggatgatgtcaagaagaaagcccaatcgaagatggcgcagtggtttgatcaggatgaaatgatttcgaccgatcaactcttttcggagcgtccagaggataatccggtctaacaagcgacaggacttcgaagggtaggggcatggatgatgcttcttaggcgacaggagtttttgggctgctcattgtcaagcgcaaccttacccataaacattttgcacctgacgctttcatcgaaggctgatatttttgcagcgaaaggacatccaacaagcagtgttggcactatgggtgaaacgctgcatgggagcgtcataaatgctgaattttctttacaaacagcctctcataactcgcgtatcaacaaccaacgtcacacttggtcgcaaatacgcgagttttgagccatgtttgtaaccgtttgttattgaaagcgttacggctcaagcgcttctttttcttccctttttccacctttctttccagctatcccattgagataagcctgctatttgcatgctttaagccagttatgtcatgtctttaacgcccttaaatggtgtttccaagcccgttaggtcaatgttccaacccgaatagacgttttttttgttcaaatcggcataattttgttgagcgtttgcctattgaaattttctatttcacagattttcaacgaccgttttttggtaaaacaacaggacaaaaacgtctcatgttcgcaccaaaaatcatcaggattaaaatgcgagaagagtggaaacatgagtgctgagacagcggctcattgatttaagggtaatagtgttgaacaacgaattgaacatagaaagcgaatcaactcaacaagacaatgaacgcaagcgttctgcgaatgaaacaaatttgccgacatcaacatgccgtgtttattagctaaattcgttttcattcggtgaacgcctgcgttcattgatttctggcagtggattcgttgcatttgttcaatttgttgttggaataaaagaacatgattgtttttggctacaaacgacttttgaattgatagaggggtatgctgagacaatcattcggttaaaatttataatttttacaactttcttttgcaccttcatcttaaaatgattatctttgcaacaataacattatagaataggacattatgacaaaaacaaaacaaatttacagatgttccgtttgtggaaacatcgttgaggtagtgaatgcaagtacaggaacattaagctgctgtggtaagcccatggagttgttaacagaaaatacaactgacgctgctactgaaaagcatgttccagtgattgaaaagactgactgtggttaccgtgtaactgtaggtgaagtggaacatcctatggcagaggaacattacattcagtggattgatttgattaccgagaatggtgtgttaagaaagttcttgaaaccgggcgaaaaaccagtagcagaatttaagacctgtgctaagaatgtaacagctcgtgagtattgcaacttgcacggactgtggaaagctaccaagtaaacaggtggtagaatcctccttgaatattcgttgaatgaatcttcgaatagcgacccaataaaaaagtcttcaccatatgcgtgaagacttttttaatgattgttttttgaaaggaatgcgagtgtcgaggaagtctcgcttttgcgctccactcgcttatattttcgactgatacagataacgcttaatactccttttaggcgtcttttcaaactctgtttcgtgaattttaatggcggaaagcttgctgtatgcaggtatcaacttattgagctcttgcctgttttgctccatgattttttccaaatcttcatggtcaagtccaagtgttttcgcttcatcaaagtctggatagacgagcccaacaagtttgtctccatcctgaagtaccacactctcgctcaccaatggcagcgagttaagcttatcttctatttcttcggggtaaatattctgtccactggcaccgagaagcatgtttttggagcgtcctttgataaagatgttcccttcactatccatggttcccaaatcgcctgtatggtaccagccgtctttatcaatggcttgttttgtcgcctcttcatccttataatagcccaacatcacattcggacctttggctaaaatttctcctgcaacgttttcagggtcggaactgtcaattttcacctccatgagataggcaggtcttccgcaacttcctggtgcgaaagtcttccaatccgaatacgaaatgatgggtgcacattctgttgcaccgtatcctaccgtataaggaaaaccgatgcggtgtaagaatttctccacatcttggttgagtgcagcccctcctataataatctgatatagattaccgccaaaggcttgataaacttcttggcatatcttctcttccacctttttattgataacaggcatattgagcagtagtttcaacatattgttgctctcaatctttggatagacacgctttctgataatcttctctatcactaatggcactgcaatgatgagcgacggcttgatgtctgcaaatgccttggcaatgatggctggactcggtaagcgagttaagtagaaaatatggcagcctgacaaaaactcgtataggaactcaaacgccattccgtacatgtgagccatagggagaatgctcatcacatgatcttctggttttatcttgtctttcaagttatgaaaagcaaaggcaatgtttccccacagtgcacgataggggagcatgactccttttgagtagcctgttgtaccactggtatagttgattagcgctaactcatcaggatttttttcaatatagtattttacgtgctcttgacggaaatactttggatattttttcccaaacatttcgttgagatgttcacgtgcataagttaatttctcggttctggactccaccaatgagtagtctggaagatagataataccctctaagtcgggcatttgagttgcattgatgaccgtggctaccacatcgcctacaaacaacagtttggcttcgctatgatttacaatgttgtgaatttgttctgctgtaaactcgtgcagaatgggaacagccactgctccgtaagtcaaagttgctaagaatgcacatgcccatgcagaactattacgaccgcatagcgcaattttatctcccttttccacaccactattttcaaacaggatgtgtagcttctctatctttcgcgctacatcgtgatactgcagtgtagcaccttgataatctgtcagcgcatcaagcgtccaatggtctttgatactcttttcaatgagcgcattaaaactcggtatttctataccgtttgctgtatgctttgggctgtttgttagttcgttcatgttcgtaatattataatgtgaagcaacaccgtcgggttcttgcacatttgttctatttgtgtgcaaagttaagatgttctttgcacattagcaaatataatgtgcatattttgcagctaaatggtgatttaatgaacgaacgagtgcctacatcactattttttacctttcaaaagagtgatgtgctgtgttttatgagttgtgcatgaagttgataaaatacggtttctttattcgtatctcattgatttggcggggtggatgtgtgagataagctgactgggggctatcaacaccagcagactgatgaccaaagtgccgaggttgaggagcagaatcatccaaacattgatttcaactggaaccgtattcacataatatacttcggggtcaagcttcaccaaacctgtataatgctgtaatgcaacgagccctaagccaatgagattacctaaaatcatgcctcgtccaatgatgaaagcggcaaaccataggaaggtgcgccttatcatattgttgcgcgctcccatggctttgagcaccccaatcatctgtactctttcaagaatgatgatgagcaagcctgaaatcatcgtaatggcagccactgctaacatgagggctaatataatccagacattgagatcgagcaaatcgagccatgaaaagatttgcggactaatatctcgaatggtttttgaggaataggtctcgccatattgatcgacggagcgattgacgtgttgaataagatagttcgccgtcatgtccacctgttggaaatccttaacctttatttctgctcccgtgacctgatctgtttcccacccattgagcttcacagcggtgtacaaatcaatgtagcaagtcacatcgtcgtattgggcaagattggtttgatagatacctgcaatcttaaatcgtctgacacgtacgccatggtcatcgataaaataggcgaaaatacgattgcctaatttgagttgcagcttttgtgccatggattttgacaataggatttggttgctgctcttcttgtctgagaatgctgggatgtgaccttctattaaattgtgcttgataaaggtcgaatcaaaatcgggtcctacgcctttgaagacaacgcctaagaagtctgagtcggtcttgagaaccccttgtttgtttgcaaaacgctgtacatggtctacccccggacattttttcagcacctgaatcatcgagtcgcccatttggatgggataagattcagaggtttgcagcgtcatgaagtttgccacttggatgtgacttccaaacccaataaccttgttgctcacggcatgtttgaacccaaagacaacgcatacggatatcagcatgaccgccaaaccgatgcccacaccgatagttgcaatgcgaatagcaggtttggacaccttttgtttgtctccttgttcttggtaaatgcgtttggataaaaagagtggtaagttcatatttcgtaatttcggcaacgttgttcgttcgtttctttgttcgtttctgcaccgagagggtagactacgggttgctgaagtctgtcctgtcttcctgcaaaggtagcaaatatattgattgcgcaaaacttgcaggtctattatttttttgtacttttgcattcataattactaaaaaaaaagaacaacatgagaacaagaaatgccaattggtttgagacaagtgtgcaatatgaacgacaaggagaggacggactttttaccaaagtgcgagaaatgtatgtcatagacgcctttacgtttggtgaagcagaaaaagcaatcacacaggagatgtcttccttttcgagtggcgagttcgttatcaagaatattacgcctgccacctacggagaaatctttttcagtgacggagagaatgatgacaaatggtataaggcaaaactgatgttcatcaccattgatgaagaaaaaggcaaggaaaagcgcactgccgttaattacttggtgcaagccggttcggtggctggtgcattgaagaacatcgaagaagtgttttctaccagcgtacttgatttcacagtagcgaatattgcggagacaaaaatcatggatgttttcgaacatgaaatgaaaacgcaagctgatgatcaacctgaaatggattcggcagacgctaccaaataacggaatgccgcttcacttcacttagcaaccactcaccttatttcttcctacatcaacagtcaatatcatggtcaacgtagttcaaaatttacaaaacattcaacagcaattgcctgctcacgttaagttggtggcaattagcaagtttcatcctgccgagagcattgccgaggcttatgcttgtgggcagcgtgtgtttggagagagcagagaacaagagctaagtagaaaggtggaaatgctgcccaaagatattcagtggcatttcataggacatctacaaaccaacaaagttcggttgatagctccttatatcacgatgattgaggctgttgactcagagaaactcttgcttgaaatcgagaagcaggcggcgcgcaatcatcgtgttattgatgtgctgcttgagttgcacattgcggaggaagctactaaatacggcttctctttgtccgattgccgccaatggttggcaaaaggacaatggcggagcttggagcatgtgcgcatctgtggcttgatgatgatggcgtctaatgttgatgacgaagcgcagatacgggaagagatgactttggcgagccgttttttcgatgaagtgaagtcacaatattttgctgatgcgccttatttcaaggaacgcagttgggggatgagccatgattatcgcatcgctgtggagtgtgggtcaaccatggtgagagtagggtcggcaatctttggtgagcgagtttagcgtgctatccctctttttcttttgattgagcgcagcccatagcagtcctttaatgaacaaatccaaccaaagattttggttggatttgttcgttttaaggtttgacaaacttcttgtgatttctgatatagatacctttctctaatactctgtcatcggttcctacataacgaccgtccagtgtgtagatgcgctcatcgacagggcggtctttgtacgtagctggttcaattccattggtgaaatcttttcgaagaaaatcaaaatatatcttgccatctctttccgaaatgttataaatgggcttatcaagcgtcccccctgtccatggtggatagttgggcaatttgttcgcatctgtgagttctgttacattcttcgtcccgggaaagaggtcgccttttaattcttctctgtatttatttctgtccccattgtacgagctgtacagcagtccatcggcaggaattacggtcatgcggggcttttctttcacgttgttcacgctgtttgatgataatataaatgctgaagcctcataatttacatgatatatcaacagtccatgactcttcaagcctgcattccaacgctcttcttgaatgttctgaacaatgtaataatctttttccctcggatctttgtcattatagatgcgataggctttgccctcgttatcaatggttttcaattcaatttgctgcgcagtggtcaaagcatcaatcgtcatccagcccatggcttcgcgttcccaagctgtataggcagtaggacaccagccattgcgggtatattcgccatcgtccatgaggctccatgcctccattccttggttgtcccctcgggcactcgccaatgtaggatagaaatcgggaagccccatacagtgactgaactcatgacaaaagagtccgatacctgatatcattttgtctttaggctttttagggttgccaatcaattcgttgctgatgcctgctctatatatctttttcccatcaaaggaaggggtggagtaaatccatcctgctttgggccacatggtgtcgtcgggggcacccatgttctgtccatagccagaatagacaacatacaccaaatcggcatagccgtcgttattggcatcatagtttgcaaagttaagcgaatcgttcatgagttggcaggcatcggtaatcagttcactgaacttttcaccgccaccgttgggatctgttcctccataatatgcaagattgtgcgaaagtgtcacaggaccatagacgtcaaactgtggtgtaaactgcccaaagctcatgtccttgaaatattgttgcacgctcgaagcgtttctacgttcaccgtgtccgtagtcagtagggcgtcctttgccattgagaaactgttggaacgattggcgaggattggtaagtgtaaatggggtgtcattgtattgagccaaaatgacaatggctttgggcgaacccatgtgtgggaaaaaagtactgttcacctgtacaggttcgcgacgcatggcacgagtttctatctgttgttgtgctctttcaaaaaacaggtttctgttttgcgctgccaccgctctcttttcagcgtcttgtcgttgcgatttctcatgcgccaagaggtttgacgatgatattttcccatatcggtcgatatgcgcaatataaaagatgtcggctttgcgaatcagtatgacaccgtctttgtcggtgtaccagttaaaatgttcatctccatgttggtaggcttgtaacacgctaccgtcgggttgcgtgaccgttagcggcattttccacgctttggcagcccaagacagacttaccagtaggagagaaatccatgtcaatagtaactttttcatattgtgacgttgtagttgtaacatattcaatcgttttgcaaaaatacaaaatttatctttattttgcactgtttcttacctttttgcgtgtttcgtgtaattcttggcgtgtttgtttctgatggaaattaaagaacttccttgcttcgtaatcaatttcttgcttgatggaaattttcacttagaactgataatgcagttgtctatgattagcgtttcccgatgccagcacaattatctcctgctcgtggtctgcttaacccgtgtgaataaccagcttaactcaatgggttagtgcctttaacccatgtagataaccagcttaacccatgtagataacggcattatcccatgtcttcaatctcggcggctcatactgcctgtactttggaagactgacgctcgcacatttttttaacgagagagaggacattttggggaaaataaaaaaggcaattcaaagaaggatatcttcaaattgcctgatattcatagtgctatgttcgtctatttagcttctttcatgactccctcgatgtagagacgagtcatttctggattgccatttgtgcgaacagtaatcgttttcttaaaatgaccagggaacttgcccttaccattataggttactttgatttcgcctttcttacccggttgaataggggttttggtatatgctggaactgtgcagccgcagcttgctacagcctgattgataatcagaggcgcattacccacattggtaaaggtaaaaacgcaggtttgaacaggtgaactctcactgaactcaccgaaactctgtgttgttttatcaaacttgatttgtgcattctgttgtgcatttgccatggtgaaacaggtaaagagcatcaacgttagcatcattaattttttcattgtttatcctttcttttacaactattcgctgcaaagatagatataaaataatgataacggtcaaatattaagaaaaattaaactattgtcttcatgaatttttcctcagaagatctctttattttcttttgaggtcttgttgttgcacataaggataatactatcagaaatattaagcaaataatagatgtttttttcattatttaaaagtttaaatgttcacacctcttttctcctctccctccatacagatgtgtaaagagcgtcttgcctgcaatcatagtagctttaatatttacttgtatttgatggtcctttccataaaatatattataatagttatcgctatatagaagttcacaatattatcctattcctttgtgaaacaatgtattgatttttcagataagttcactataaacatcttataatctttattgttgccatttagtggatttattacatcaacaagggggttactggcaaatgcgttggtcgtattttcttcatatcttgtaattctatatgcataaagatttacaaatacaaaaaaatgcgtattatctttatagcataaatattgtctaaaataacaatttaacacattattttgtttgtcaaaataatggttgttatcctttttatcaagatacttaattataagtgcctctacgtcatttatgcaatcttcggtcatctttatatatttctgattacttgttaaaacccctttcccatttatcaattgagcgttagaagctaaaatgtgaatcttagaattttgattacaatctttagcccatttcttttcaatccttatcgacttttgttcagtctgtttaccagtgcaagcaaacaaactgaacaaaattattacagcaaaacatttataccacatatactaaaatttataatcaaagccaactgttcctggttggtcggtgtttttatatgtaataggttttccattcttatctttaacaaactctccattacgatatacttcgtagagtcaaccagcaagtgcaaaattagtcaatccttttataaaactcttgtttggtgttgaaaacttgagtttttcacttccaatctggagtacaaagtgccgatgcgttctcgtatattcacttttcattgttttggactacaaatatagcaaaaggcagtgaatctttcctcgcctctacgccaaaccatataaacatcatattgataatcagatgattattttgataactctcgatttggagcattacccgaaatttgttatatcttagaactctgttattcaaagatattctgaatttgtcgaattcacgttaattagaatagtcatctatctgaaataatatccaagaacgcttatctgttttaaataaatatttcatatatattcccgaatcatagccctttaagataacagtatgcgtcattgtatcaacctttaacattattttttgcccatctattatagaatcgttgaattttgtatatatccaatcactcttgctgatatgaagaatcgagtctgtctcttcataatcataaccttcatatataattttcaacggaaacaaaatgtgtttccgttgaaaacatgagtctgaggcgaactttttgaaaaaatcataaaaagttgtttttcctgtcacatttttttttagtgatatcacagccctatcctttaaaacttgctttttattatttggttgtgcacagcttattaaacagaggaaaacaaatagtatgtaagtaaacttattcataatatatgataactactcgttggcggaatttatttaagttgataagtatgagtaaaaagttgcacacgtcgttgagcttttagtaacttagtggtacaaaatctattaggttataaaatcattgctatgcacaacctcatggcaaagttccaaaaaatacttgaaatctgcaagcaatatgctggaaatcaagtttgcctctgccctcattggcacaatcgttgagcgttcctctacgattggctgcactcggcatcgtgcaagcaagcttgcctctgctttcgcttaaacgaataattctcatcggctgccagcaagcggttctcctcgtcccacttgaacttctgctcacttgccctgtcgtcttccttgttgtctttctttacacgagaggtggtgatgtagaccaggtttccattgaggtcgtaagcgtacttgtgtccgttattgatgttcgtgctgtccgtaggagtttcttccgtgcggtagttgatgtcacggacactggccagttggaacttatgccccgtagagccctgataggtgtaggtgaggtcatagcctgcattgagggtaccgttgaactgcacgttactttgcgtgaggtgctgcttcttgcttgtgattcgatgcatgttgtcgtagcccatggcaagggtgtaagatgtcgtcttattgtccgttcccttgtaagtacctgttgagcttgacaaacggtacaaagggtcataagtatagctgtggctcttctgtccgccagccttgccactctgtgggagcggagcattgttctgaacacccaacacattgctcacggcatcatagctgtagacattgtccatgatggtacctgccttggcattcactacaaggttctgcaaccgtctgcgtgcagggtcgtagctgtagaacgtttccgctccgttacagtatttcaggtaggtgcgctgctcgaacttgtcgtagcctatcttactgacatagtcgtaatgggtagttttatagccactgaccttctctacctgcccaccgaggttatagccgtaggttactttctcctcatcggggtaaatcatttccaataggcggttatggctgtcatacttccactgtgtgacgtaagttgccactgcttgattaggcacaatcagcgtgcgcacggtcttcaacacctcgcccaaattgccgtagtagtactcgatggcaccgctaccgtccttaataattatcatcatgcacaaaccacttgttgttcgtgagtaaatttagtattttctcattgttgaatttcttaatttgaaaagaaaaggttaaataccccacgtcaacattattatggattaaccattcgaacgtttcgtcaaaaatagttaggcctatcatgtaataagtgtcaatactttccttgcttcgccctcgtggagtataagtcttgtttcctctcatgaactctataaactctttccttgaaaatatagaatagatttcatcttttgttatattatacccttttgttaagtagataaagttggagtctatgttttggaacaaaggcataaaaacaggctctaaaaaatcaacaacaggccattcatattcaaaatttaaagttttgacttgttcttggttattgacaaaaccgtcaatgtctaaactatatattttatatagttgctctgttatatgtgaatctataatactttcaatcattgactcgttggcagaatttatttaagttgataagtatgagtaaaaagttgtacacgtcgttaactttttagtaacttagtggtacaaaatctattaggttataaaatcattgttatgcacaacctcatggcaaagttccaaaaaatacttgaaatctgcaagcaatatgctggaaatcaagtcaacgggaagagaacatagagtcaaccagcaagtgcaaaaatagtcaatcattttataaaactcttgtttggtgttgaaaacttgagtttttcacttccaatctggatgataccgcacaaagctggcgtaaaaatttgaaatgcagattagtgattgcagactttgcttgtttcagcaattttaattaattttgcaatgttgtaaatggaatccattgtgggctcctaaaaatgaatataattttcaaactatgtatagaacaaatacatgtggagagttaaggctctctgatgtgaacaaggaagtaaccttgtcgggatgggtacaacgcacccgaaaaatgggcggaatgacttttgttgatttgcgcgaccgttatggaataacacaactggtttttaatgaagccgctgatgcaaagctctgtgaacaggcaaacaagctgggacgtgagttctgtattcaggtcaaaggcacggtgagcgaacgacaaagcaaaaatgaaaagatgcccacaggagacattgagatacttgtgagtcaattagtgattttgagcgagagcctcacacctccttttaagatagaggatgagacagatggtggcgatgatttgcgcatgaagtatcgctatttggatttgcgtcgccctacggtgcggaagaatctcgaattgcgtcatcgcatgactatcttgatacgtaatttcttggataatgagcaattcattgaggtggaaacacctgtgctgattgggtctacccccgagggcgcacgtgattttgtggtaccttcacgtatgaacccaggacagttctatgcactgccacaaagtcctcaaaccttgaaacagttgttaatggtgagcggcttcgaccgttacttccagatagctaaatgtttcagagatgaagacttgcgtgccgaccgacagcctgagtttacacaaatagactgtgagatgagctttgtcgatcaggaagatgtgattggcttgtttgaaaacctttgtcgtcatcttttcaaggaaattcgaggagttgaattgcctgccaagttacaacaaatgacttgggcagaggcgatgaaacgctttggcagcgataaacccgacttgcggtttggaatggagtttgtggaactgatggataccctgaaagggaaagcagacttcagtgtgttcaacgaggcagcttatattggtggaatttgtgtaccgggctgtgctaactacacgcgcaagcaattggatggcttgacagagtttgtaaagcgtccacaggtaggtgccaaaggattggtgtacatcaaatataatgaggacgggagtatcaagagttccatcgataaattttatacacaagagcaactgttagcggtgaaagagcagatgggggctaaagatggcgaccttgtgctgatattgagcggaagccaaccttacaagacccgtgtacagttgtgtgcgctgagacttgagatgggcgaacggctcggcttgcgagataagaacaagtttgagtgtctgtggattgtcgatttcccactctttgagtggagcgacgaggaacagcgattgatggcaacacatcatccgtttacgatgcccaatccagaagatatcccactgcttgacgaacatccagagaaagttagagcaaaggcgtacgactttgtttgcaatggcatcgaagtgggaggtggcagtttgagaatccatgacggtcagttacaagcaaaaatgtttgaaatcttaggcttcaccccagaaaaagccatggctcaatttggcttcttaatcaatgcctttaagtatggtgcaccacctcatgcagggttagcttttggcttggatcgctttgtgagcatcatggctgggcttgacagtattcgtgactgtattgctttcccaaaaaacaacagtggaagggatgtgatgttggatgctcctaattatattgatgataagcagttggacgaattgcagataaaacttgatttacatcaataaacgacgatttttatgcgttgtaggctgcaaatgtgttatttcgttagtcgaaaattcgtataattaaaagaaaaatactacttttgtatcataaagtataaatgaacagccacatgtggcttaataataattaataacttagcgattatgacagaaaagaaagtaacaacagcagcagcttctaagaaggcagctccagcaaagaaaactacagcaagcaaaagaacttctgtgaagaagcctgctttggtagtaaacgcagaaagtgttggtttccgtgctggtgatgtttatcaaacattggcatcagctggtaaggcaatgagcgtagcagaaattgccaaagctgcaaaaatcggaacagaagaagtttacttaggaataggttggcttttcaaagaaggtaaaataaaagatgctgatcatctttttaccttagcttaaatcgtgcaattctcttagagagataccaatgcaaaagatgagtttgttttcgataaaaacaaactcatcttttttatgtgctatgcttgctgtcgcagtttactgataatcctttacacgtatggtttgttgataaagcaccttgttaggatttttacttgaatgaatgatataggcaaaattatagtttgcttctttcagcttcttgatacttgtgttatctttgatttccttaatcagaagtgaatgtaacttttgcgagtttcgtttgacgatttcaggattatccaattcgtccacaaacgaacaaaagtattggtatgttttcgttgctttgtcaaaggtcacactatctgttctggtactgttgacaacaggagtgggacagtatttctcggtgtattcctttgcttcacgaacacatctatcttctaaattttcgtgacagctcatcagagctaaaacggtggttgcgacaataaatatccttttcatttgttgatgtttgtttcttgcaaagatacgtatattttactaattttatgaatagctccaacgaattattaaagataaatagctatctttgcacaagattggcttcgcctcaacatagaaagtaaactttctctgtcttcggcttgcgcaatctttgcagaagcttggcttcgcctcaacatagaaaataaattttctctgttttcggcttgcgcaatctttgcacaacaggatttattgacgataacttaattggcagataacgaaacaaaccaatgaatagaataaggaatttttgtataatagctcatattgatcacgggaaatcaaccttagcagaccggttgttagaatatacgaatacggtacaagtaacaggcggtcagatgttggatgatatggatttggagaaagaacgtggtataacgattaagagtcatgccatccaaatggagtatcagtatgaaggcgaaaactatatactcaatctcattgatactcccggacacgttgacttctcgtatgaagtgagcagaagtattgctgcgtgtgagggagcactcttggttgttgatgccacacagggtgtgcaggctcaaaccatctcaaacttgtatatggcgatcgatcacgatttggaaattattcctgtcatcaacaagattgatatgccttcggcaatgcctgaagaagtggaagatgaaatcattgaactcattggttgtgaacgttcggatattctacacgcatcggggaagacaggacaaggaatagaagaaatcttgaaagcggtagtggagcgtgtgcctcatccagtaggggatacagatgcgcccctgcaggctttgatttttgattccgtctttaatagttttcgtggtatcatcgcttacttcaaaatagaaaatggaagtatcaagaaaggcgataaagtcaaattctataacaccggaatggaatatgatgccgacgaaatcggaattcttaaaatgaatatggtgccgaaacaggagcttagcacaggggaagtgggatatatcattagcggaattaaggatgccaaagaggtgaaggttggtgataccattactcatgttgctcgtccttgtacgcaagctatctctggtttccaagaagtgaagcccatggtctttgcgggtgtctatccgatagatcctaatgactatgaaaatctgcgcgcttccttggaaaaactgcaactcaacgatgcgtcgttatcttttctccctgaatcgtccatcgcactcggttttggtttcagatgtggattcttaggactgttgcacatggagattgtgcaagaacgcttggacagggaatttaatatggaagtgataaccaccgttcctaacgtttcttatatggtttatgacaagcatggcgaatcgaaggaagttcataatccatcgggacttcctgagcagacgatgattgaacatattgaagagccttatattaaagccaccatcatcacggacgctaattatatcggtccgattatgacgctttgtttggacaaacgaggggaattgataaaacaggaatttatttctggcaatagggtagagctgcattttatgttgccattaggcgaaatcgtgattgacttttacgataagctgaaatctatctctaagggatatgcttcattcgattatcatgtggattcgttcagaccttctaaacttgcaaagttggatattctcttgaatggtgagcctgtagatgctctttctactttaacacatcaagacaatgcggtgaccttaggaaggaagatgtgcgaaaagttgaaagatttaattccaagacagcaatttgacattgcgatacaggcggctattggaggaaagatagttgcaagagagaccattaaatgtgtacgaaaagatgtgactgccaaatgttacggtggtgatgtgagccgcaaacgaaaactcttagagaagcagaagaagggaaagaagcgaatgaaacagattggtaatgtcgaggttccgcagaaggctttccttgctgttctgaaattagattaggaagaagataatgctaactttaacaatcatacaagaatgaaagaacctgtcaatacacctcgtgatattgcgagggaattagctcgtaaatatagtacgatgactcacgaagaattagatgctttggagagtattttggtgcctatgaagtttgctaaaggtgaaatgatattggcagaaggagaaatttgtcaatgtatttattacttggataaaggtctgatacgacagttctattttaagaatgataaggaagtaaccgagcatcttggtgctgatcacactatatttatgtgtatcgagagcttgtttaaggaagaaccgagtcatctacaggtggaggctttagaggcttctgttatttatgcgttgccaaaagaagagttagagaaagttgccttgcataatgtgaatattcagatgatgtatagaaagatattagaagaaagtttgattatttcacagatacatgccgacttggttcgctttgaaacagctcaaaatagatataagcgcatgtgtaagttatatccacaagtagttttcagagctccgcttacttatgtggctaattatcttcagatgacccctgagacattgagtcgcgtcaggacttctatgttaatggaagattagttatcaaaaggtaatagggatgagcaaattttcttcgctcatccctattatctttgtcattttaagaattactctttttcatttgacgcttgcggcggttatttatatttatcaatgtagtcttgagctcttttatcgcctaattgtttagctttctcaaacgcctctatgcctaacttcttttgtttcttctgaatgagcgcaagtcctttgataagatagatgtcaggataattaggtgctatcccaatgcagagttccgcagttttaagggcatcgtctatgtagtttactttgagttgcaacgaagccatttcagccaaataggttggctcttgtcgattgagcactgctgcatgcgcaatatcattcaatgcctgttggtatcttcgtagttttacattacaattaaagcgcgtataataaaattcatggtttgcccttcccagcatgagtgtgtcatagcggttataatccatgatggcttttttgtaatcgccagcttggtcataagctgccccacgtgcaagtacaaatggagcggcaatgggtgtcaagggttgaggacatgcagcgacagcactgtcaagcagactcagaatttctgcttggtttgcctttaattgtgcttttgcctgtgcggcttcgtaaaacagttctccagagcgtagattcgttttggtcaatgcaatgaacatatcatacgctttctgatagtttcctttggagtaaataatttgtgcttgttggtgctgataggctggcaacggatttatctcataagccttttgtgcttctgcaagagctttgtcaagcgaccaagctaagtatgtggagtctggctgaaagagttgttgatgaaaaatgatttttgcatattccgcatgtgccgcatctttcttgtgtacattttgaatggcagtctccatttcggttgcagcttttgcaaattcttttttgttggcatactgtcttgcctgtgctgcatatccatctacagcttgaggaaataagtgcttaaaatcttggatatatttaatgtagtttttcttattttgctctgaagccatcatcagcgtcaccaaggcatcttcttctttggcaggcaattgtgtcctgatggtggtttgtcgtaacacagggtctgctaaagaaagtccgttgttaatctgcatgtctttcatgaaatgagcatccaccgcatgcgttccttccgaatggttcgcatgttgtaaaatcccaatgagttcgcctttagcattaacaaaaggacagccctccatattctctggtgtctccgaggagaatatataataggtgtacttgtccatgaaaagttctgttttctggataggtacttgctttgcttcttgatttttaatggaataacccaacatccagactttctcaccattattagaaggcgtgcttgctattttaataggtgtcgtctttccattgactttgaatttacagacatcgtacaactcattagccccaatgatgacatccacggacaaagcattgccgtttgtgtcaatgaccactgcactgtctgcacctacgaaaggatagaacgcactgatagcctctccattatcactgataaacacgccattggttgaggctaatagtgtaccgtctgttttgaaagtcgttaggctaaaaatagatgctgctgctttctttacctgttttgactgaccatggacatacgttacggagaaggtagccatgaacaaaagcgttaataagtaagatattttattttttatattcatcatgtggttgtcttagtttacatttaaaagttcacgtgcgttagctaatgctgccttggtaatattgctaccgctgagcatttgtgcgatttcttctattcgttgttgctcatttagcggagtcatattgctgatggtgccgttgagagtttccgtcttagagactttataatgattttttcccaaggcggcaatctgtggtaaatgcgtgatactgatgacctgtctgtggttatttcccatttcgtccatgatgtgcgccatcttttctgccacactaccactcactcctgtgtctatctcgtcgaagataatcgttgggagttttacagctccactaatcattgcttttagagagagcatcacgcgggcaatctctccacctgacgcaacctgtgatacaggacttaaaggggagtttgtgttggcactgaacagaaacgagacactatcttttccgttcgggcttaactcttttggtttgatgtctaccttaaaattgattttaggaataccgagcggaactaatcttgctttcatctcagactcgatagtctttgctgctttcttcctgatagtcgtcaatctttctgcttgttgcgtacagttgtctaataactttgcaacaatatctttttgtttctgtatttcctcatcgctatgatcaaggaggttgatttgttcttgtatcttttgttggtatgctatgagttcagcaatcgatgcaacatgatacttatgttctaacgaattgatggtatctaatcttgcttggctttgttcgagttgttgaggattataagaaacctgatcgcccagggctgtaatctcttgcagcaagtctttcatctcaatataacaactctccatgcgttgagagatttcttgcactggcgtgtatatctgctcaattttttgcagttgttggctcacttgattcagtgtttctataatgccgttcgattcgttagaaatgagattttgtgaaagatagagtgctgacttgatttcctcagcatgctcaagggttgaaatctcttgttctaaaacttcttgttccccttctgatagcgctgcatcactaagttcttggagttgaaatcgtaaatagtcttcattctcttggtcttttgacaccttggctatcatctcttccaatatcgtttgttcttttttatatttctgatagctttcttgatactttcttagtgtatcttcgtctttggtcaaaatatcaacaacatgcagttgaaaatcctctttgtttaacaataggttttggtgttgtgaatgaatatcgatgaggcgttctcccaaatctttcatcacagagagcgaagcaggggtgtcattgataaaagctcggctctttccattgatgttgatttcccttcttaagatgcaatcatgagggtcgtcgtcaaggtcattttctaagaagaaatctttgaggtcatattgccgaatatcaaaatgagcctcgataacgcaacgttcctctccttgtcttatttgtttcgtatcggcacgattgccttttaataatcctaaagctcctaagatgatactttttcctgcacccgtctcacccgtgatgaccgagaatccgggatgaaacagtatgttcatttcgtcaatgagcgtaaagttttgtatgtatagttgttttagcatttattctttgattttttcccaggcttcattttgcgaggcattgatagaaaacaagatgtcgtacactgcctctttttccttttgcgtgccttttcccttatagatattcgccaactcgtctcttttatagtcggtccatatctgtgggagcatgcttaacggtctattctcccgacttttcttgaggtcctcttgtagggctgttgtgatgttggtgcgtccacgttctgcattggtagccatttcatcaagtccctttctataataatcgtattgcagttttctaaaaggagacattgcgctatccatatagtcattaatgatagcgaagcgatttcggctatcatcaaatgatttccaacctgtaaaattcagattctgtgcattgttcgtgagacgtagacagcgttgcaagatgtcgtcgccacccatgagtgcaaacgaatcaaggttgatgccaataattagataggcataataggcaatgagcgcggtcaactggttgtctatggattcctcgttaaacttgagttggtcgaactctgcaaactcaaaattgaagtcattgtccgtattattatataaggtggaggtgtaggcagaattgtaaacgggtctgttggcttgtatcagtgctttacaggtaaacatgttcgttgcctgatcgtatttcgttaccgtgatgttaaaattacaaggtatccgttctattttcttgaaatggaggtttgtccactgcctgtcattgatgaaggtgttcagtgttttctccaagttttcaaagatgcgttggtctgttccttgtatctgactgtggttgatacgcactttagcgttcaattcttgaccgcacgccctcttcgtgcagcacgtacagaaaagaagtaaacagataatggtacgtatcgttctcattttactgattgttcttattaaattcacgcaagcgaattcttgtcaacacttgcttggtgttgtttgtaaagtcatttgataacatccaactgtaatagcctgggtcttggcgcagcacttctgaaacagtctttcccttgtattttccaaaattgaatacttctactctgacaggcgaaccgtcttcatgggtcatcacttttccgttgctgtctttctgctcgcgccatacaatgcgcccagcaaagtcaacagcgtcgtttgtcttcgagaagttagccaagtactgcatgtcattgggcaaggctctttctttttcttcggctttgtctggatcgtatctctcgagctgtcccaacaacacccgataggtggcttctgcatcttcgttggctttgtgtgcttgaaagtcttcctccatctttcgtccgcagtaaaacttgtatgcggcagcaaggttacggcgttccatcttatgaaagatggtttgcacgtcaatgagattacatttggaaaaatcaaagtcgatacctgctcttaagaattcttctgccaagagtggcacatcaaagtggttggagttgaatcccgcaatgtcgctatccttaaattgattttgaagatgtgctgctatttctttgaattttggagcgttagccacgtcttcattcgtaattcctgtaagctcaatcacttcatgtggtatcggtttctccggatttacaaaaatactctctctttcttcttcgccgttaggatgtactttgatgtatgatatttggataatcctgtcattcaccaagtctaatccagtggtttctaagtcgaatataattaaaggcttctttagatttaatttcatttttgatgtagatgataaaaagataaatgtatctacaaagtataaattcccgaagtctcaggtgctcatgtagatacatttagcaagttaatggtgactatttaatcgttcagtaacataggcatgatgagcatcaatacttcttggtgttctggttgtgtggaagggatgataagccctgcacgacttgggtcggctaattggatagtcacttcgtcgctgtctaagttggtgagaatgtcagtcagcgaacttcccttaaatccgatgctcatcgtttgtcccgtataatcacacacgatttgctccttcgcacttgttgcaaaatcaacatcttcagaagacagctctaattttcctgtctcgaggtggaggcgaatgagttgactgctctcactggcaaacggcaatactcgtcttaatgcgcctaacagtccttttctatcaacattgagctgattaggattatcctgtggaatcacagagttgtagttaggatattttccctcaatgagcctacaggacagtgaacctccttcgtatcgtatttctgcgtttctgttgtcaaacttaatgacaacatctccttctcctttcgtcagtactgtcctcaaaagtgtagcgggcttcttaggtaagatgaaagaagcaggtgtatcgctttttatttcaaaattcttatttcttactaatttatgcccatcgcttgccacgattgccaatccctctggtgttaaatcaaaataaataccattcatcacaggtcggagttcatcttgtgcggtggcaaacagagagcggttgatgttgttgttcagaatgtccgcaccaattgtcaccactgttgccccatcaggtatttccgatgtttgtggatattctgctgcattttgtgccgtaaaattataaactccattttggtatagaatcttgatggtaagatgttcggtgtctacatcgaaagtcagtggttgctctggcaactctttcacagcgtctaaaatggttctgttgggcacagcaaatttgccgtttccatcgcattcgtcaagagagacagaagtttgcatcacattctcgctatcgcttgcggtgattttcaattcgttgttggctacatcaaagagaaaacagtcaagaataggtaacgagttttttaagttgatgaccttagaaagcgtttgcaaacgattgttcaaggcactgcttgataatgtaaatctcatgggtataattttttaattgttattcttaataagtagatacaaaaatacaaaaaaccattgtctcaaacaaaaaaaccgtctaaaagtttcgtattttagaagtattttactaatttcgccgttcagagaatcctattcaattgataaattattcataaaacgtaagataaatggaactacaaggaaaggtgattgcagaaacacctgagagaagtggcacttctgcaagaggtgaatggaaagcaaaagattttgtgattgaaacacacgaacagtatcctcataaaatgtcgtttaccgtatttggcgaagaacgtcttcaaagatttaatattcaggtaggacaagaggtgttggtgtcctttgatattgatgcacacgagcacaacggacgttggtataataacattcgtgcttatgatgttcgtcaggtagatcctgcttctttaggagtacaaggcgctccagtgcctccaccaatgggcaccacagacacaccatcaacgggtgctaaccagagtcaggcaccgttccctccccaacctgctacgacagaagagagtacggacgacttacctttctaagttttaactaaggaattgttttataaagtggatttgataagtaataagtcatcaaatccactttacttttgagtagggtagagcgtattttcagaaaagaggtatggctacgatgagtgtcccatgggcttcctcttcctttcttcttggcatctgtgaagcatccgttttgtgtggagtgagcgccacggcacgttattggtactgtcgtaaagcagccaacaataaattgttttcggtttttgaacctatggtcactcttatgcagttttcgcagagtggaagatgactgcaatcatacacgctaattcctttttctcttaaatattgatagatagctcctacatctttcatcttggctaagaagaagttggcttctgaagcatatacttgagcgcattcgggtaatacgctgaaagcgtggagcatacgtgtgcgctcttggataattgtagagacccatttgtcaatttcaaaactatctttaaggatttctatggcttgcttttgtgccaacgaactgatattgaatggatattttatgttgttaaacagttctacaatttcctgagttgcatacgccattccaagtcgcaaggctgcacacccatacgctgtactcatcgtatctaatacaattaagttggaatattttttcagttcgtgcctgaaagaaagttggtgggagaaatctataaagctttcgtcaacaacgactatcccatcaaacaaagtcaatatttcgcaaatcgcatctctctgtataggcttgccagtagggtcgttgggcgaacatatccacaccactttggtgtgttggtcacaagcgtgcaacaacttgtctggctgaagctgaaagtcggtatttaacagcacaggcttataccctatgttgttgatttctgctaatcgcttgtatcgcattcgtgtgggagcaatagccacaacattgtccacttttggctcacagaaaatgcgataaacaaggtcgattgcttcttcacttccattccctaaataaatattgtcggtaggaactttcttcagagcgcttaatgtcttcttgagttctaactgtaacgggtcgggataccgattcagtggtttgttatagggattttcattcgcatttaatctaattacgttttcagcgagcggcgcttgttcttcaatagaagtacaagggtttagcttacggagatgcggacgaatcagctgctctaatgttttcatgcaacaggacttttagttattccttaattccgcaacactattataaattaaactttttaagtacttgagcaacaaaaagttgcccatgatttttgccatgtcgaagaattcacttatcttagtgttgcaaaaaacaagagaatccgacgatagacatggcgaagatacaaattaaatctgagagactcactccttttgggggattattttcgggtcgtggagcaatttgactccacattatcatctgtaatgcctcaagtcacattgtggggtaaggggatattgtaggcagaagtgggtgcttcaagttcaaattatctgcaaattcagtaatgagaggacgtgtacacgcaataaggacgttcaagggcttagttgcggatttgaggattacttatgtagttaggctgttgcatattagtcttcgttagaatggtcgtttatgaaagacgttaccaaatcttttattgtttgttcagcattatcaatgccaaccaaacttatcaactgttcataatcatcgatttcattgtctgtaaaagtaatgactatcttacgttcgttgtttcctgcaatatgagtatagttttcgggatgagcccaaaagcaattttcacataattccacatccttgattgtccagttaggacagtgctcgcaagtccaagatttggctctattcgcagaaggactgagtagcatgtagcaatctatgtcgctttcatcttgttcgccgcctatctcatatggaactcgatggtcaacttgcaaaagcctttcctccattggctgaagataaataaaacaaactgaaccatgtttgtcaattagagccttctttaatgcttcagaaagtgcagttctacctgccaccttggatattttattgtcggaaaaaactggatcaccgaatttgtaggcaccaattcttttcccctcactactttttacattataggtaaccagatttactcctcgttcccttacgtctcttgtcgctcttggtgcatgtttatatccgtatttattttccagttcttcagttgtaataaagccatactttaaaatatgctgtataacagttgcgggtcgcttatctgttatcgagttaagcctctcaagtatttcctttgaatatttcattatgtaaataataattgattatgaactgttggttgtactacatcttgaagatttgcgcttagatataaagcctcaaatgtaacttctttctttccaagtaaaagagcctgacttgaaaggcctgcattgagcattacttttcttagtcccaaatcattaggcaaatcgttaccatactgtttatctccgcaacttccatcatagctgatgatgtagtcaatacctcttctattgagatcttccaagctttcgacaaactcattataatctatgccagaaaaatagcgattgtctctagttgcgcaaacaccttgatacggaggatccatatatacgatgtcaccaggtcgagccatctgcaatacttctcgatagtctactgaagagaattctgtcctatttttcaagtagcttgaaatgcggaagatattctttgataagtttgcaggagaaacacctttgcgccgtttgtccggagattggttgaactgaccattaccactatacctaacagaaccttttacacatcgggctaaaagatacaacatattggcggcgcattgattgccactattaaagtcatcacgcactttatagtaatgtgcaacactaccttcattaaaagtcaactgctcgttccagacccttgtgtaatcatcgagtagacgctgaggattgttgattgcttcctctagcacactaacaagaggtgtattgaggtcatttaaatgatataattgagctttattcagtcttgaaacagctattgtaattgcagccatacctgcgaaaggttcaattaaacgattgaatctttgaggaaaatacggcagtatctgaggagctagatttctcttagaaccttgatattgaactatatgaggtacactaccattcatcttgtttaaataatataatcttaattccgcaacactattataaattaaactttttaagtatctgagcaacaaaaagttgcccatgatttttccatgtcgaagaattcacttatcttagtgttgcaaaaaaaacaagagaatccgacgatagatatggcgaagatacaaattaaatctgagagactcactccttttgggggattatttttgggtcatggagcaatttgacaccacattatcatctgtaatgcctcaagtcacattgtggggtaaggggatattgtaggcagaagtgggtgcttcaagttcaagttatttgcaaattcagtaatgagaggacatgtacacgcaataaggacgttcaagggcttagttgcggatttgaggttatttagattccggtgatgctttcacttcgacattttcctttgggtatagaggcgatgttacatctaatggagcgtttcacatataccgcaacaattcttatttgttcttaaaaagcattgcaaatatagtgaaatgcaatgaggtatgcaagaattgtcgtacttttgcagcatgcgtctattccgtcatacttttgtgactgggcgacttttacttcttacctgtttgacagttgtcatgttactgtgtgcgtgtcgtgaagagaaagtccctgttgaaactccttggggtactactttaggagcggatagcttagcttcaagcgacaactttttgttagatgacatcgttagaaacggtgaactgattgtcctcaccatgcgaggaccgcagacgtattatgattatcgtggcagaggcatgggacttcaatacctgctctgtgaaaagtttgcgcacagcttaggcgtgtctttgcgtgtagatctgtgtaaagacacggcagaaatggtgaacaaactcaagcagggagatggcgacatcattgcttttcccttacccatacaaaagaatgtcttggtttctgcgggtcctacaacagattctgggaaaacaaagtgggcagtgcggaaagacaatgaggcattggctgacaccttgaacaaatggtttaagcctgcgtttatagcacaagcgcagcaagaagagtcgtttctcttgtccactcgaagtgtgacacggcgtgttttctcacctatgttgaatcgttctaaaggcatcatttcaaattatgaccactatttccagctatatgcccccgttgctcgttgggattggcgactgatggcagcacagtgttatcaagagtctaccttcgaccctcgtgctcgctcatgggctggagcgagaggactgatgcagattatgcctggcacagccgctcatttgggcttacctatgtctcaaatagaaaatcctgaacagaatattgcggcggcggcaaaatatttgaaagagttgagcgcgcatttcagcgatgttcgaaatgtgcaggaacgacaatattttgtgttagccagttataacggtggcttcttccatgtgcgcgatgccatggcactcacgaagaaatatggcggtaatccgtatagctggagccatgtgtcagcttatatcctaaagctcagcgaacctaaatattacctcgatccagtggttaaatacgggtatatgcgtggggctgaaacttacgactacgtcaataagattcgggcgcgttatgcacaataccgtggtgtagcaaaaggtggtttaggaggagggttcggtcttcaaacgcccagagaagccaaacgcaagcatcgctttcatgtttaggctggttctataaataacctttgctggcataaatttttcatcctttggttacttcgctctcaaatttaccgattaaataaatataaaatcttgcgtaccaatgaaaaagctgcatgatatctcatcggtatgcaagatgttatattcattttttaacaacgaaaaacacgaaagaatctaaaaaaaacattgccgcaaaagccattctcgaaagaacgtcccgttctgtctaaaataacgaaaaacatagttgcagcatttcacttttgacaaactctgagaaaaatcacaacgcatttcttttcgctgttttcgtcagaacgtctacgttctttggtttcttcatatcgctcgcacattttcgtgttttctgtttatttcgttgttgatttcttctacgtcgtttactacaacaaaatatacctttgttaaatgaaagagccgtgatgtgcggtggtaatttgtagaaccagcctttaggctttttgtttcgaggttgagtgctgcttttcgcaacagaactgttatccctcacttgtttttgtttgtatttcttttcgctggcgacgggctttctttttcgctacaattgcgccatacatataataattgacgtaaacgcccacggtcatgatagcgatgaggataaaccctgtaaggatggagcaaccgtaaagtagaattgggaaatacgaaggtaacgtgttcacatctccttgtaaaacgccttgttgtgaaagtgtgtgactaaacaccaatagataaaagggcattgctactactatggtgaggaaaaagacaatcactccaaacaaaagctgtgtagagaagatatatccgaaatgcctcaatcccgaaaaataacctccaatgacgtgagttttgaaacgagctttgggggcttgaacataattcatgtacgaataattcaaaggtagcaagagaagagtgcaaacgagtaagcaaatcgggaaaatccacatttgaacattggtgcctgtctgttgcatctcttgtcctgttgcaatgagttgcagcgtagtgagctgccaagcaatggcacccacaaacagcacgatgaaaataagtcctaagaacaccgttagttttagatttctcagaaggttacatctaaatccgttttcattgagtaggttggtggtgctgcccatgtaccaaaccatggcggctacatacagcaaagacaataaggaggataagacaaaaaagctggtgcccctattgtcttccaaaagggaattaccatgctggatcaaccacgccgtaacaacgccttccatgatggcaaaagcaaggagtggcaaccaatttcttcggagaatggtcattacatttgaacaaaatagcaggtaagccattttgatacaagaggatatactgcgattcttatataattctttttccattttttatcttgttatttgttcgttcactctcttcttctaaattcactacaagtaatggctgttgcaatggctacattcaagctctctgctctgttcgcactcttggcgaagttgggaatgcaaagcggtttgtttacaaatgttcttatcgctgctgaaataccattcccctcgttacccatcacaatgagtccatgacttccaaggttttcgtggtagatgtcttttccatctaatagcgttccatacacaggaaacatggacgcatgttggcggatatagttttccaaatccaagtaaacaacgttcacccgagccaaacttcccatggttgcctgcactaccttggggttgtaaatgtctgccgtgttctcactgcatagaatggtgggtattgcaaaccagtctgcaatgcgaacaatggtgccaagattgccagggtcttgtatgtcgtcaagggcaagtatgagttgccgagaagggtcaaaagctaagtgactttttctcatttcaaacacacacaaaacctcttgcggatgttgttggcaacttatcttggtgagctcgtcattggttaccgtttcaatcggcacacccatttgctgaagatgagtcaggcgctcttggttgtgaatatcttgtagccaatgaggggtagcaaacatcatcgttggttgaaaggtggaaaggaggtctccaaccaccttaggaccttctgcaatgaacgttccttgtgccactcttccttttttcgatttcagcgaatggatgtatttcagtttggctttacttatcatatattcgtgtggatagtgaatctattcgtctggatagtaaatcgagatgcgtcaatcattcctgtcgtttcatcaatgtcgtcgtctcgtctttgcaaatttagataaaattccccaattaaaagttgtttgttcccaaaaacgatgaagataaagtgaagaggcacgactctttcagtgaagacaggttgttgatagccacggttctttcattgaagggcaatattgttaaacatcgaatgtgaccaacgaaacgaatacaacgcaacaagtccatgaacgcctgcgttctgccaatcaagcaaatgcccatggggagtttttccaaactcaatgagattgaggtgttaacccatgtagataagggcgttaacccatgtagataagggcattaacccatggagattggcagtcaaagtcaatgagatagatgtccaaagtcaatgagattggcgtgagtgtctggctggcgtacgtttttgccgttattttacaggcttcttacgcaccataagcagatttttacggatgcgctattgcttgccgaagtttattttttctttccgctgatgttcagcttgtaaatgagatgcaacattaagtaatttggaatagcattaaaacgtttctcggttttgccttgtccgtttatctcataatttatactcttgagctgatgaaatatatcgtacccttcaagtttggctgccagtttccccctaaagaaactcttactaacgtatgcgttacaaattaaatcattagtatttataagaggatctgaataaccactgcgactaaacatcttaagatccatacctgtttctaatcctaatttaaatttgtatgaaccaagaataccataattaaaatccaaggtacgaatagatgagaatttttcacgtctactgttagcgtatctccatttcatttcaccaactaagctacaggtcaatcctcctttttgataatttaaagataggttatcctctaaccaatggttattcactttgctcaacatactttctgtttgacctgttactcccgttaagtctacattgtggttgtaactatagacaatagcatttattaatgtgaagtagtttttattatctaatggaaaagtatcatataatccaatattgccagaccagttccccctaacattctgtggcttgtatgtatatatacccgttatcggatcgtaagtaaatccattagcaatagcattctgatgaatattgatatttataaatgccatcggcagcttaaatcgcctattgttgttatcactaaagcttaaatttacatttgtatttctactatttttcaaattcggattacctaaagagatagctaaaggattggagtcgtcagatcgggtaatttttgagtaaaggtttggagtttccactttcgaagtcaaagttccgtaaaaaccgtatttatttattgtaaaccccatatttaaagacaattctgaaatccaattatattgttggacagaagtgtttagtagtgaattgcgaaagtcaagtttttcacgtttgtaaccaacagacacgtttgtattaaagaacacattgttgtgattcttagattttgaataaccaaatccgagtgaagcagaattttgcttacttatataatatcccttgtaactattgttggcatctaaagagagtaggagagaatcacgtgaagatggtaaactgccaagagggtgattctctttctgccatccgtcaagtttgtctaatctgtatttttggttgtttcggtaacttcctttttgctgatattgataccctgtgaaaagtctaaaaccattaggaatcacgaatgtatattgtggtcctaaacgataattgtaagaataagatggagtgtcgtcatatcgattgcgatagtcatcaatagcattgttttttaagtacttcaactggtaattgttgaacattgaattcttggtatttagatagttaccttctatcaatgctgatacacgatcaccagatggcaactgtttatatgcattaacattggcgaaagttttgagtgaatgaccaaatccatatgtttttgtagacaatcggtttacaccaaaatcatttataagcctgtttcttgaagaggaaaatatcgtatctaatattgcttctgtgcaacctattgatgatgggtctgcattgaagcgtgctgaacgggcagattcccaattatcaaatttattgtaatttaagtttatggttgattttaggtaaattggggttgaaatctttaaattattttgaaagtcataaataaagttcttggatttaacctctgagatgctacgattaaagttgtttcccccatttaagaaagattcagctatcatttgactattgttatgtgtatctctccacgagaaacttgttgacatactgttttccaatgtgtttttttcattgctaacagcagcgtttagacctactgttttttgtataacctgaccgtttggcagcttagttggatcccaatctcccttttctccaggtttgcggtcttcattcacattattactatttgagaaaacagataactgcaatcgtggtgtgaagtataatccgaacgctttggctgcatacctgctatttgtaccaccagctatatcaaagttagctatcaaagttttttcatattttttctttagtaagatatccatgatgtagtctttcttatcaatgtcaacacccatcgcttgacctttatcggtactcttttcaaacacctttagattcttaacggtatagtttggtaaattttctattaattgtttgttatttcccttgaagaaatctttgccgttaagtgtaagataatctaattttcgaccattgatgaatatttcgccattactattaagtgtggcacctggtaattgtctgatcagagcatcaagcatacttccctcaggaaggttgaaggcttcggcgttgaagaccaatgtgtcacctttcatcaccatcttgattttggtgcttttcaccaccacttcgtccagtgtatgttctttatcttccattccttttttcttgatgggaatgtcttgcatgtcaatgtttgtatttctacctttgaatagtatctctttgttgacaaaagttgtaaaataatcaggatgttctatcttaaaaatgtattttccctcactcaaattcttttgcatatagaaataggagtcgggatgaaccgctttgtcgttccatataaaggtgcgacatgtatctattactgtactatctgccgatagtaaagttagtttgacatttgatatagggaggtttgtaaacgagtctacaatacgaccatggatagtataatttcgcgttgagggaagcattaacgttgtttgataagctaatatttgtttcggcagtaatgttaataaagaaagtaagacaaatagtgtccattttggcatttttatattcatagcccgttgacggaatttatttaagttgataaatatgagtaaacagtggcacatgtctttaattttagtaatttagtggtggtcaaaatattaagttcaaattatcgtatgtacaaccgttatgcaaaattcgttataatccttgatttataaaagcaattctgtgaaaatttcgttaatgaatcacggctctttcgttaaaaagtcttggttctttttatataccattattttatagcgcaccagtgacatagggtagacagttcttttctaaagatatgagcataatcatatggagttgtcacaaattgagcgacatcatcatgttactgatattaggacgagtgtcaaattgtgtcagcagaatagaattttgtcctgttattttaccgtaaatcgaccgttgaaaatctccaaaatagaaaaaatcaataggcagacgatagacaaaaatacgctgattttccccaaaaaaccgtctcatctcgttggaacattgttttaacgcccttgtaaacactctttaagggtgttatcttcatgtcacaatcgcattaaagcatgcagtctggcagtcaaagtcaatgagatagatgcccaaagtcaatgagattggcgtgagtgccgggctggcgtacgtttttgtcgttattttataggtttcttacccgccatccttagactttttacggatgcgctattgcttgtcgaagcttattttttctttccgctgatgttcagtttgtacatcaggtgcagcatgacgtaatggggaatggtgttgaagcgtgtctcggtcttgccttgtccattgacctcgtacgacatgctcttgagctgctggaaaaggtcgtaggcttcgagttttgcgcttaactttcccttgcaaaacgactgactgaggtaggcgttgcacacccaattatcagtgttgaacgacgggtcgtcgtatcctctacggctgaacatcttcagatccatgcctgtttccagtccgaagccgaaatgataagatcccacgatgccgtagttgaagtcgtaagcgttgatggtgtggaagttctcccgcttgctgttgacgttgcgccagcccaaagcgcctaccaaactgcaggtggcaccttctttttggtagttcagcgagagttcgtttctcgtccagtggttgttcaccttgctcagtacgctctcggtatgtccctccacagccgtgaggtctacgttgcgactgtaacggtaatccaatttattgtccagtgtgaagtatttggcactgtctaacgggcagttgtaatagatgcctgccgttccagcccaattacctttcacattctgcggtttgtaggtgtaaacgcccgtcgtagggttgaaggtgaagccgttggcgatggcgttttgttccacattgagtgtaaaatccaaagttggccacttgtatcgcctgttgtgttggtcagcaaagtgaattatggtaaagtaggtcgtggtgtttttgaggtttgggttgcccaacgagatcgccaaggggttagagtcgtcgcgcctgtcgattttcgaatacaggtcaggcatgtggattctcatgtgaccataagcccagatgctgtattgattgtaggtggcgcccatgttcaggttatatgatgtcttccatgtctgttgactgatgttggtgttgagagccgtactcctgtagtccagacgttgtttttcgtgttgaacggggatgtagagacccgtatagaatgagttcttgccactttctttacggtaggtgatgttcaaagacaattcctgtgtctgtgtcttcaaatatccttgataactgttgttggagtccaatgctcgccgaagagcgtcgcgtgacgagggcagggttcccaattcgtgtgcttgctgttgccactcttgcagctgatccagtcggtattttgagttgttggtgtatttcatttgttggttgaaagagaattctggaaggaaagtccagccacttggaagttggtatctatagcttacggatgcgttatacacgtagctgtgcgagggtgtgtcatcgtatctgtcgcgttgatctttggctgtcgcaccctgcaggtagtctaatcgatattgttcgaatgccgttcgtttggtgttgtcatagctgaaagaaccttggaagaagatgttgtctcccgatttcaaaaggtaggaaccatataggcgattggatgtctggaacgaataaccttctccaagactttgattttgctgtctgttgaggactgcgtcttgcactcgccgactccatggcgtggtgaacaaggtgtcaagaacggcttgggtgtcgccccagggcgccgggtcttgtttgaaggagccagcacgtaggatgctccagttgtcacttttgcggtaagtgagactgttctcaacacgtagccagaagggtttactcatctcaaattggtgttcgagctgggtctcgaagtttttcgagctgctctctgacacgcttcttgaatagctgttgttgcccgtgttgaggaacgattcggtggctgtttggctcacattgtggctgttttgccaggaaacactggtcgacacgttgtcggtgatggtgtttttgtcgttgctggtagcaaggttcagccccactgtcttctgcgttacctgtccgtagggcatcttggttgggtcccagtcgcctttctcgccgggcttgcggtcttcgttcacgttgttgaggttggcgaagacagacatctgtagccgtgggttgaaatacagaccgaaaagctttgtggcgtatcggctgttggtacctccggctatgtcggcgttggcgatgaagtttttctcatactctttctttagttggatgtccataacgtagtctttcttctccacatccacgcccaaggctttgctcttctcggtgcttttctcaaacacctgcaagtctttgacggtgtagctgggcaggttttctatcagtgttttgttgtctttcttgaagaaatcttttccgttgagcgtcagataatctaattttcgcccattgatgaaaatctctccgtggctgttgagtgtggctcccggcagctgcctaatcaacgcgtcgagcatacttccctgtggaaggttgaaggcttcggcgttgaagaccaaggtgtcacctttcatcaccatcttgattttcgtgcttttcaccaccacttcgtccagcgtatgctctttgtcttccatgcgtttgcgctggatgggcatgtcatccaagtcaatgctgctctgtctacctttgaaaagtagttcgtggttgatgtacgtagtttggtaatcggggtgctctatcttgaagatgtaggtgtcttcgctcagcttctttcgtagatagaagtaggcatcggggtgtatggcttctttattccatgtgacagttcggcaggtgtccaccatcacactgtcggaattcatgatggtgatcttggcgtcaagcacgcagagatgggtgaaagaatcgaccacacgaccgtagatatcaacgttgcgttctttcttgtggtgtgctgtctgtggtaaggcttgtgtgaataacagcaacaaagcccagcataggagagttgttcttttcaggttcatatatgattgatttatatttttgttcgttaggtgagtcgctccagtgccggcaccgtgatgtaccctctggtaagttttatcagaccgtcggtctgcatggcgttcaaagcaatggatatatctaagcgactggcgttgagttcggtggcaagtctcaccatcttgattttgaaaaccttttctcccgcaggtcgcagcgagcggtctttgaagaagtggatgatgcgttgccggagatcagcaggttgtggatgccatggctgtcgctgtaaacgctgactctgcgtacaaatgatgttgaggaggttgagcctgaacaccatgaagtcttgggtaagggtaatgacgtgctgcttactgatagacaacgtgttgcatgcttctgctgtagtataggttcggcgatagtgttggtgcaaaccaaagagatgttctggctcgatgacgaggggtgctttcagggtttctgtaagcgaatagccatggtcatccgcctctgccatcacctcgacactgcctttgaagagcactgttagctgtcgacaggcttcactctcctttgcaatacattcgccttgtgggtgctgtgcaaaggacagcggtgtggtttcggcaatgcgcagcaagtccgactgactgagaccttgaaacagtggcagcgacagaagatgaaatgcttccgcatcgtctgtgtgatagtccaaggggaggggagtgttagatgtgcttgtgcggtgagccatgaggatgatatcttagggtgtgcggtaaaaggatgcgtgtacagtgtgcccaagagaggagctttagtgctttccttatttcttgtcagacgggttctctgcgccttgaatggctttcttcaatgaaggagaataccacaccttgtttttcccctgtccgtcggcatatatcagatacaccatgaggtcgggatgatgttgcaacacctgttgcgttttttctaatcctaacaccataaacgatgtggcataagcatcggctttggcacaagtattcgccaaaacggtggcagagaggatgttgtgctgtactggatagcctgtctttgggtcgatggtatgggcatatttcttcccattcttataatagaatcgacggtaatttccgctcgtagccatggcagtgttcgtcacattgagcaccgtttgcagttcgttgttcacctgagtggagtcgtccgtgggcttggtgacgccaatcttccacggcaaccgtttgtcgctgttgccctgcaccactatctcgccaccgatttctatcatgaagttctcgacatctcgcgaacgtaaatattgcgccaccacatcacttccgtaccctttggcaatcgccgagcagtcgagcatgatgcgtgggtcttgcttgcgcaccttacttccgatgagttttactttctcgtagccagtcaggtggcgcaaactgtctatcaccgcctttgtgggaggcgtgcccgacttaaatccgaagccccacacattgaccaatggggcaacagtgatgtcgaaagcaccgtgcgtatctttagaaaccgtcttcgccaagtcgaaaacttcgatgaacatttggttgagcttaacgggttcgttgcgattgattttggaaataatcgactcgtcattgaaggtagaaaacgtttggtctaccaactgaagtcgttgtaaaatctctcggtgtaagtccttgtccgactgataagtaatgtgatacgttgtaccaaatatttgccccgtattgtgttgatacggcatggtgttttgttggcgaataatgtaaatcgagccaacgattaagaaaagaagaaaaacaatccgaaatatagaagattttgttattttcatcattcaattattttaagttccagccttgattttttttatttgttcgcacacttcctctcaccccatacgtcaggtagagcatcccattcttcatcttttttggttcactccgcctgctaaatttccaccgtaacgaggaatgtcccacctatgggcgttgctttgggtttgccaaagcccggcacgtaccaagggttgcctgcctcagtgttggcactactggcaatgcggtgtttgtatctcacgctccagcccatgcgaagaggtccccaaagcttcacatccacgcccatcacggcttccaaccagtggtattggttgctaatatcgttcagattgaaggggagctgggtgccatacacggggtcggtaatgccagggtggttcaccgtatatttgaaagaagtgtagccatagcgtgcccccacgtacagccgatagtcgtcgtctttgttcttcagcatgtttacatctaaaccgatacgaccatacggcgctttgcaagtgtagtgcaagtgggttgtgacatcctcgctgtcggcttgtccgtaacccaattccacgacaggaaaatatttgttgcgcaagctcactcgggcggcagcttcgtattgtccatagtcggagagcagcagttggagcggtcccaccaagtcggcagatactgccacatgtcgtagaaagcgtgttgagtctttgggttgctcaaatatcttctttggtatttgcgcctgtattgttgtgctcaataggagcagcacactaatacagatattttttgaaatagaggtataggtgtgggttcgttgcatcgtaattcacgttttcgttgttaatgattaccgagtcgagcgtttgatgggtacacgtcaccgatttgaggcggtggaacatggcaggcggacagtcaatcgattcaaaatgcggctggtcgtctttggctatgcgcagcgtgtcacgaaatacttgcccgtccttgttcgcaattttgaagaaaaacacatcctctggctgtgcataactgatgggcaagataaagctgtcgatgcccactgcccgattgagcaacaccgtgtccgtccccatgctacgcacggcaatgatggtcagcgtgtcttccaacttcggttgtgaacccatgagcttgtacgatgtcaccacggtgttgttcaaagggcaatcgatagacgagcatgcggtgaagcccaaggcgacagacagcaaaaagattattcttcgcatcgaatggttttttctatttggtaatcgtttcgagttggatttgacctactaatcaagtcgcccacaaacccagccaagaacagttgggtgccgatgagcatcgtggtgagggcgatgtagaagtagggcgaatcggtaatcaggcgcatggggatgccgttggaaagggcgtagagcttttctgctcccagtatcatcacggcgatgagcccaactaaaaacatcaaggagcctaaaaatccaaagacatgcatgggctttttaccgaagttggacaagaaccacagtgtgatgaggtctaaataaccgttgaagaagcggttgagtccaaacttagaggagccgtatttgcgtgcttgatgctgcactaccttttcgccaatcttgcagaatcctgcctctttcgccaagtaagggatgtagcggtgcatctcgccatacacctcgatgttcttcaccacttcttgccgataggctttcagtccgcagttgaagtcgtgaaggttgctgatgccactaattttgcgagccgtagcattgaagagtttggtaggaagtgttttgctcagcgggtcgtatcgtttctgtttatagcccgacacaaggtcgtagccctctttcgtaatcatgcgatagagtgctggaatctcttcgggcgaatcttgcaaatcggcatccatggtaatcaccaccttgccctgtgcttccttaaagccacaatacagggctggactcttgccgtagttacgtctaaaacagatacctcgcacagcctccgactgcttactgagtcgttggatgacctcccatgaatggtcggtagagccgtcgtttacaaaaattacttcaaacgaataagcgtttgcttgcatcacccgctctatccatgagaagagttcgggcaacgattcttcctcgttgtacaagggaattactacagatatgtccatactattctattcatcattcacaacgttgccctcactcttttgtccgcctctcctcatctgcataggagagagggtagaggacggcgtgtcggtagggcgaagttgtgaggtgtttatttcttctttttgccaaaaatcgccacaatggtgctggtcaatgttccaatgaaaaggttttgcatcatgaacataaatgccagttcaatgggcgaaacgcttcgcatcatttcaatggattgctggaggttactccagtagtcggtgtttctcgtatctatcgctttcagctcttcaaccgactggttgagtagctgcacaaagtggccgttgtccaagaactggaaatacagacactgcaccatggcaaatatcagcgaggcataaaatgtcatgtaacagccgtaggcaaaggcacgccgataagagatactaccgtcgagcgcatagttgcgaaacttgatgacacgccacgtcatcagcactggcgtcatcaagagaagcagattgcccaagatattcagcggtggatacatcaaacaggcaaagctggaggtccacagcagcgcaagccaaagaccgtcaatgcgagcaaaggctttgagttggataagtgtttgtacgtttatcataactaatgtgcaaaagtaagcaaattatctaataaacagagaattgtttcttattatctttcctctttctgaataattcgacatattgtaccattatttcaaataattttagtatttttgtaaacgaaacaatcgaattattatttatttacacattaaaagacgctattagctatgaatctaaaatcgctacgattattatggacctttgcactgctccttgctttggggtggagtaccgcacatgcagcggacaaagtaatccgcattcagaactcaacaggtacatggaccaagtccaatcctgccaaaacatgggctgcgcaatggaccagtaacgacgttgatcccatgctcaccctgacttgtgctgccaacaacatggcgtactacgacgggaacgagataaagctttttacaggaaacggctcggtgaagttcagtgctgattacaccttagcagttattcctggttacgaaatcgtgagttacgaattctctttctcgtccgagaaagcaggacagaagattgtggtgacgccgcaaggtgctaccgaattgtcgtcggatgaccctacacagtggcaagccgtgcaggttacagacattcacgccgctactgcaacgttcaatgtaaagcatgcgacacaaactgccgcaggttttgcactattgaagaacgtgctggtaaccgtggcaaaggctgctgctccagcaaattttcatccgctctatatcactcgtcccaacgaacatccttaccgcataccagccttggcttgcgtgaaagacggtaagttactggctttctctgattatcgcccgggtggctcagacatcggttatggcgaggtagatattcaattgcgaacctctaccgaccacggtgctacttggaccgatgcacgtaccattgccgaaggcaaaggaacgggcagcggactcgattatggctttggcgatgctgccgtagtagccgaccgcgaaagcaatgaggtgctgatgatgtgcgtggcaggacatgttccctaccaaacagcgaactaccaaaaagggaatccgctgcccatggtacgttttctgagtaccgatggaggtgagacttggggcaattataccgatgttaccgctgccgtttatggactctttgacggaagtaaagacggcgcagtgaaaagtatgtttgctggttcggggaagctatgccagagcagtatcgtgaagcatggaacgcactaccgtgtgtatatgcctgtttgtgcccgtgacggtggcaaccgcgtgctgtattctgatgacttcggagcaacttggaaagtattgggaggaaaggatgcacgtcctgctcccggaggtgatgagcctaagtgtgaagaattgcccgacggtagagtgttattgtcgagccgcgccaatggaggacgtctgttcaacatctatacctatactaacaatgagacgggcgaaggctcgtggggcgaggtggctaagtcggatgcgaacaaccacggaacgacagcacagagcaattcgtgcaatggcgaaatcatgatacttcccgtgaagcgcaacagcgatggtaagcaaatgttcttggcactgcaaagtgttccctttgggccgaaccgtgccaatgtgggcatctatttcaaggcattagagagcttgaacgattatttcacgccaaaagcgtttgcaagcaattggacaggaaagaaacaaatatcacaaatgggttcggcttatagcaccatggtgtggcaaaaggacgacaaagtgggattcttctatgaagagtctacctatggtgcggattataccaacgtgtacaaggcattgacgctcgaagaaatcaccgacgacgcatttagctacgacgctacagtgaaacgtcccacggaggatgccaatgccattcagtattcagacttgacaaaggtaacacaactgctcggtcacaagggggtaggtttccctttggctgatgccgagagtcgtgagctactcgccaagatatatgatgcgcctgccaactacacgaaggcacaattagagcaagccgtgcagcaatttttggaagagactaacgtggagaagccccaaaacggactgctgtacctcgtgaagttcgtaggcaaagatggaaagacttatatggtggattacgcagatggaaagctctccgcaaaaccaatcacagaaggacaagctcccgaacgttcggcaggtttcaaggcgcacgtactcgccaaaggcaaggtggcgtttgaaaccatggacggtaagtttctgtgttatcccactcagttgcctgctcctcaagacctcacaggttatcacgttggtggggtgaccaatcaacttgatgaagcggacaacggactggatttgcaaaaggctaccgcaagtggtaaggtagagagtacggaagcactcgaccgctttggcaagttttacatctgctccaagcgaggcaatcgcacggacaaccagcaagaggcgttgggcttttggaccctcaacacgcaagccaatgtttttaacaatgctgatgtcccttttctgaacaatcagctcacttcgctggtcgttgttgagcggatggtactacctttgggtaagcaggttacgacgttggcagaggtggacccaaacaaggcgtatgcgctctataacgagcattttaccacctacgctgtaaagaaagaaggacagacaaatgtgtgggtgcaaggcatggtgggtgatgctggacacagtttggcaaacggtgactttgcgcaaccctataacccatcgtcgcctttcggtgcatggcagctcatgaagaacgaccaaggacagtggatgttgtataacattggcgcaaggcagtatgcccgcactccgtcaaaccaaagtggtacaggtccttgtactttcgtcgacgaggcattgcccattaacgttacagaactatcgaatggcggatttgcctttaacacaggctacaatgcacagcaattcttttgtgcggctccgcaattggcagacagtcccattaacgtgtggacttctgacgacagcgggtcgcgctggttgttggtagaaaatcctaatgttcaggtggatgttcataacagcattcaacaaacggttgctgcgaaagccaatcggaaaacgggcatctacaacctcaagggacaacgcatacagaccgacaagctgcatcaactccctgccggaatatacatcgtagacggcaaaaaggtagtggtgaagtaaaggcaatgctaaagatgactgctattggggtcacggctctttcatctaaggatattgttgtttaacaacaaatgaaacaaatgaaactaatcaactaaacaagacgatgaacgcaagcgttctgcgaatgaaacaaatctgccgacatgaacgtgatgcgtgtttccgtcaaattcgtttcattcgttgaacgccagcgttcattgattctgacaatctgattcgtttcattcgttcaattcgttgttgacactaaggaacatgatagtttttgacaacaaacgaccttattaaatgaaagagccgtgtattgagatgatttggaacacatagaaatacggctcatcctctttcgactttcctttcgtttcaaaaatagcaccacaagcaacatcaaacaaagttcacatttaccaatagacgctgaagaagtggcgagatgattcgccacttccttcttatgtcgcccatgttcaacaaaaatacaatcacatcaatatgaaacaaatctataaaatttcgctcgcagctgtaacggctgtcttgtccctaaccactggcatggcgcaagatactgggttcgatctcagctcgcagcgcaaagagtcgcaaaacatcttgaaagtgcctggacacaaagtaaatcatcagggcattgtcatcaatcccactccgcagaaaatagaaatgaatgtcggagggcaggctgcactcgatgtcaccgctggcgtgcgcctgaaggataagacgaaggacaagaaatacgtgctggcgcaggatctcaacttcctcaacctgcaacgcaaaggcgtcaacctcaccgtgagttatgcctcgaaaaagaacaatttgcccaatgtggagggtgcttatgccctgcaaatcgatgccaaaggcattcgtatcacagggcgtgatgacaaaggggtgttctatgccgtacaaacgttgaagcaactcatggaaagtcctgctgcacaaggcggtaaaactctgccatgtctctcgattgtcgattatcctaccttcccttatcgaggggtagtagagggattttatggcactccatggtcgcacaaggcgcgcttgtcgctcctcgatttctatggaaaatataagatgaacacctatctctatggtcctaaggacgacccctatcacagcgcacctaattggcgcaagccttatccagagaaggagcgtcagcagattcaagatttggtgaaggcatcgcagcgcaatcgtgtcgactttgtgtgggctatccaccccggaaaggatattcattggaatgaggaggattatcaaaacttggtgcgtaagttcgagatgatgtacgacctcggtgtgcgctcgtttgctatcttcttcgatgatattgagggagagggaaccaatccgatgaagcaggtagaactgctgaaccgcttgacgcatgaatttgtacagcaaaagaaggatgtgtcgcccctcatcgtctgtcctacagattattccaagttgtgggcgaacccctcaccgcagggtgctttgagcatttatggtagagcgttggacccctctgtgaaagtgttttggacgggtgatgtggtgtgcagtgatgtcacccacgaaacgttagattgggtgaaccagcgcattcagcgtcctgccttcttctggtggaactatgcggtgaccgactatgtgcgccacatcgtacttcagggtcctgtttatggactcgataccacggtgacacccaacgagatgtgcggattagtgagcaaccctatggagcatgccgaagcgtctaagctgtcgctgtatagtgtggcagattatacgtggaacccaaaggcttacaatgccatggatagttgggaacgtggtttgcaggtggttgctcctcgctcgcacgaggcttaccgcacctttgccattcattcggcagatacggagacgggttaccgcagggatgagtcgtgggagacggagacattccgcttcaacaactatacgccccagcagctcgaggctttgtatcaggagttcgaccgcatcgagaaagtgcctgcacagatgcagcaagccaatgacaaccctgccttgctacaggagttgcagccttggctggtggagtttggacgcttaggcacacgaggaaagcgcacgattgatttgatgaaacagtacaaggagggtgatttaaccgatttctggacgggttacgtgcaaaacatcatgacgctcaacgagcgcaaggcttacgaggcgcatcgctcgggaaccatgaagttgcaaccattctatgaggtggcaatgcaagatttgagtgaggcgttttatcaacagatatctgggcgcaagccgttcgtatatcgtgccgtgggttcttatcccaacctcaagaccaccctctcgcaattgatgttcgacacggataccacctcttattatacctctaccgcatcgcagcgaacaggcgagtggattggggtagatttgggctgtgtgaagcctgtccgtgaggtgcatattcttcaggggcgcaactcggtggacgatgtggattatttcgaccatgccactttggaatattctgccgatggcaacaactggcaaccactattgaaagagctgaaaggcgtctacgatgtgcagtgggagggggcagaagtgatgacgcgctatgtgcgcctgcgcaaactgccttctgagaaaaagaattggactgctgtccgtttgtttgaggtcaatcctgttcgtcagcagtatttaggttttaaggtagatgctggttcgcaaaccgaggctgcccttcgtgcatttgatgagcaacccacaactgcgttccacctttcgggtcgtctgtcgttcgacatcaaaccgggtgtttcgcaatatgctctgctgatgcgcttgcctgcaaacggcgaagtgaaggtgagccagttcgacaaacgtgggaaatgtatccacaccgaacaggtagtagccaacttctatccattcactccaatgtctcgcaccgcacgagtagttatcgagggcgatgccgagatttacgaagttgtgatgaaggatgcaccgcgcaaataacgtttgctgctgatgataggctggttctataaattagctttgttagattttgagcttatttttgaggtcaaaatgcaagagcgtgaaggagtgtagcgagctacacgactgaacgaacttacattttgaacccaaaagaagccaaaagataacaaaacgtattcataaaaatttaatgactatatgcggtggtaatttatagaaccagcctataactaacacaaggatggggctcaccgctccatcctttttgctaaatacagtagggagaaagcacatcatggatttcacccgcatgaaaaagacaaccatttttcaaatatagcctaagttttgggctgctatcccattacaataatgccgttgtaaacatgggttagcacccttaagtcatgtagttagcagggttaacccatgtagacagtccgggttaaggcatgtagatagcacgaaggggtgacagttggattagtttaattggttcaatttgtggttgatacaaaagggcatgattgtttttgactctacgggttgaaatattatttcaacaaccgatatatgaaaaaaatatggaacaatttaaattagatttttttagaaaagaccatgaaatggtgaatattaattttatcaccctttcaaaaaaaaagagtgatgatgcttttatttctttttgtttaaaatataaaatacaaaaaaacgagcggacgaatatttttaatattattcagaatgaaggacactatataaattttgtaaatgccgaagacgcagaatttaatttaggtcttttgataaataatttaaatataagaattttacccaccaacttgtatgtatgctgggattctttctacaatattgatgtttttaaatatgatgatgtcattaagtactttgattatatttggtatccgaaagttgatgatataattatttttgattattcgtttaatttttgcctaatgattaggcacgatggaattatttatgcacttaattaaaaatcgtaaattcaatcaagaaatgcaacttttggaaataaacaaaaggggacgaaaaagatagtgtatcattaaaaagatgagtaacaactacccctccgacggaaagttttagtatctttgcaaacgttttataaccttcacgaactaaacgactgcacgagaatgcgtcggcactttgcgctccagagtggaagtgaaaaaatcaagttttcaacaccaaacaagagctttattaaaggattgactaattttgcacttgctggttgactctacgctcaatatgaacaataaaagatatatatattatatgcttataatatgcacattatttctttttagttgcaattaccgccataagcaggaaattactattttttatttttgtggtaatatagaaccatatagacagtttgattgtactgacctcgatagcatatgtaagaccaatgaatacgatgatacaatatttataacctctactatgttcaaacaaattaaagacgatataataaatgctaaaccaactcataattattcaaactcatacacaccaattatatatgtaaatgttggaaatcagaatttgtgtcttaatggaataaataatcagtgttggataaaacagagtgatagaaaatatcacccttctattcttagtaataagacagtgtatcttctaaaatggaaatctttctattacaattatttgccatatgatattttacaattagataaggggatacggcaatttggtattccttctgattataaaaaagatcagataaataaaataattaaaaagaaagaaatgtctaaagtcttagtaagggtaaaataataatgggatataatcattatttagtattatatggtagaataaaaaattgtacaaaggtatatcccaacacctaataagggtaacacacggtaatgcttcaaaccgggagttgtcaaatcaatcacctgattttcaaaagttttccaataataagcataaaggcagggatagattctctgccttttgctatatttgtagtccaaaacaaagaaaaatgaatatacgagaacgcttcggcacattacgtccagattggaagtgaaaaactcaagttttcaaaaccaaacaagagttttataaaatgattgactaattttgcacttgttggttgactctatgcccgttgttaaatgaaattgccgttgaaaaaatatataatagaaaatttgcggtattcaaatccttttcttacctttgcattcgctaagaaaatgggcaagtcttttacggccagctccctttgaatcccccagggtgggaacgcagcaagggtattaggttgtagcggcgcgataagagtagcttgcccacccgcctctttagctcagttggccagagcacgtgatttgtaatctcggggtcgttggttcgaatccgacaagaggctcgaaagtttttagatatgaaagggtggcgtctctatggtaggcgacacctttttgccttttatagacggtgtaccgcatggtatagatgttctcattaaaaggtttatcaaggttcaaaactcattaactcattaactcacaaactcataaactcaaaactcactatggctcatggacatgaagtcctgcacatgatggcaggcaacacatacgaaagtaaagaagcgttggtaaaggcaattatcaacaagtttggcgaagcggaacgttttcacacctgttcggcagaaggcatgacagccgcacaattagttgactttctcgaagctcgtggaaagttcatgcccgcatcctccaatcaattcacggtagatgagaccaagatttgcaagcattagttggaacttattaactttttagctttcgaacttaaaaactcaaaaacttacaaactcataaactcaccccatgattaagatttacggaatgaagtcctgccccgattgtgtggcagtagaccgtcaggtagcgggcgacagtcgttaccaagtaatagacattggcgaacatgtatcgttgttaaaacaattcttgcatttgcgcgacaccaatcccgtttttgatgaggcgaaacgcagtggagcggcaggcattccatgttttgttttggaggatggcactgttacgctccgtcctgaagaggcaggactttcgagcaatgcgtcagatgcacctgcctgcaacattgacggttcaggctgttaagtcatcgcttgctggctccttttgccatatgtaagaacaaaaggaaagaggaagggagcacatttactgactccttttgcgcttacagcgcgccagtttgtttatacatccatacccagagcgttgctctgggctgtattcctattggggcttcgccccgtcttcgctcaaatgtaatctcccaaaaatatttgtagcttcgccccgcccttgctcgtaacatccgctgcacaatatcttggactgtgttattgatacggcttcgccccgtctttgctcaaatataaactcccaaaaatatttgtggcttcgcccgtccttgcttgtaacatctgctacacattatcttggactgtattcttattggggcttcgccccgtccttgctcaaatataaactcccaaattatttgcagcttcgccccgtctttgctcgtaacatttgctgcacattatcttggactatgttcctgttacggcttcgtccagtccttgcccaaatataaactcccaaattatttgcagctttgcccgtccttgcttgtaacatctgctgcacattatcttggacgatgttcctattgcgacttcgccacgctcttgctcgaatgtaatctcccaaattatttgcagctttgtccagtccttgcccattatcgtcgctgttgcacaatgccttgtcgcaggtattatcttcaatcgtgttcattgcttttcagctaagacgggctgaaagcccaaaaagaacttagcccagagcagcgctctgggtacagttgactatctattttgcgctctgaaagagcaaaaggaaggaggaagtgtgccgactacaaacaattttgttgatatacgggtatggattcttttttccttttgcgcttacagcgcgccagtttgtttatacatccatacccagagcgttgctctgggctatattcctattggggcttcgccccgtctttgctcaaatataaactcccaaaaatatttgtagcttagccccgcaattgtatataagcccaactgatatacaatattctgatggaggaattatctgcaatcgtgttcattgcatatcgccccgcctttactcgtaacatctgctgcacattatcttggacgatgttcccgttacggcttcacgccaccttgctcaaatgtaaactcccaaattatttgcagctttgcccgcccttgctcaaatgtaaactcccaaattattttcggctttgcccgtctttgttccccttgaaaaagggcgatatgtggcgatgcaatcaggagtgggagaacattctgcgtacggaccaactgcgatgacctatatgaagagatctttcgactaccgcttctaatcgtgacacaatcatcatcttggcagtgttttcccacattctaaattctacgtcttcagaatgttcgtaggtgaagtctatgagctgactgatatcaaacgtttcggctttgataccagccccttctaatgatgcctcgtgggcattacactcttgttcgatgtgggcaggaaccatgagtacgggtttgcccatgtacatggcttcgcataccgactcaaaccctccagtggtggcatacgccctacaattggctaaatagtgtaaaaatttggtgtcatcaatgcgatgaaatgtaagggtgtcatcgattttggttacctcatctgcatccgctttgtcccaaaagaaatgaagttttacgtgtgggtgggcttggtgccattgtttcaccatctcgctgaagcccgcattgatgatgtagcccgtgatgaagtcattgcgatgacgagagatgtccagcacctcttcacgcaatagtgggggtactacagagagatgctgcttatcacagtcgggcatcttccgaaacgaaagcgccaacttatgcgctgctccccaacatgtggcgcgtgtgaacgccagcatgagccagcgagcagtagtgtggtgatggggaaagcgatactggggatgcataaacatgtattgatgtccaatacatacctctggtacggaggggcgcaaaaacgcataagtgagtccggtcaggatttcgtagaagttcaccaccaaatcggcaccgctccactggatgtgctggtagagctgttgaatgctctgaagatagtcggacgatttcatgaaattatatgccatggagcgtgtcagaccgatgtgctgattcttcttcgaagggagaaagttaggactccaaaaggtgtccacgggtgctttggctctttgaaggaagaaatcgggaagctgtctcgatttacttttgcctaccaatatttcaatcacttgatgtcctttttcttccagtgccttttctaatgccaaagcctgggtgaggtgtccacgaccttctccttgtacaacgaatataactttcattttcttgattttgttagtaatcattagtttgctggcaaaattagtgagtagttgtttcaaattcattgacaagatataacaattctaagtcatcttgttattgaggcggagcgtcatccatcacgtccatgcccacaatttttgctcatcatggaatagagccgttggtgagatgtctgtgttttaggctggttctataaattaccacctcatatagtcattataattttatgaaatacgttttgttatcttttggcttcttcttggttcaaaatgtaagttcgttcagtcgtgtagctcgctacactccttcactctcttgcattttgacctcaaaaataagctcaaaatctaacaaagctaattgatagaaccagcctttaagaaaaatatcgtacctttacactctaattatggatgcgaaacttggttccatctgcgcaatgcgtgggtggcatggaaatatgaagcatcaaaaaaggaggaatgaacaaacaatgagagacaacccaccaacacagagtatttttcaacgtcccatttgggtttcattatttgcgctcacagccgctgtggcatggggctgggcatatccgctcatcaaattaggttttgccgagtttggcatcacgcaagggatgacgggtagcaagatggtgtttgccggcattcggtttagtttgtcaggcgtcatcatcttgcttatggcgcaactcactgggcgcgattttcatttgcgatcggcgagagattcgtggtacattctgctttttgcccttctgaacaccaccttgcattatgcgtttttctatttcggactgtcgtatagcgagggttcgcgagccgctattctcaattcgctcagcgtcttctcggtggttatctttgcctgtcttttctttaagagcgaccgcatgacgctgcgcaaactcacgggttgtgtggtgggctttgcaggtattctgtcgcttaatttggggagtgccgagagtgggcacttcacgtggttaggcgatggcatgattattctcaatgccctctgtggcgctgttacctccttacttatccgtggactgggcaagcgcatcgacgtgtttgtgggtacaggaatggcgttgaccattggcggcttgctcttggtggtgcctggactgttgtggaatggcacattgccacgcatcacgctattgggctgcgtgtacttggtgctgctcatcggcattagcacggtgggttttggcttatacaacaagttgctgacctgcaatcctgtgggaaagatcgccatctataactcgctcatccccgtggtgggcgccgtgacctcttgcatctgtctcaacgagacgtttcatttcaagtatttggtggctggcttgttggcagccgctggtatttatatcatcaataagggaaaataacaacttacaattgtctgagttttgtcctgtttgctactctctgagtagtggttgtcgttagaagctgtacttcagtttaacccacgcctcgctgtttttgccatacatcttgaacattcctctgtcggcatgaaaatagtcgtatccgatagtgattgctgtctggtcgttgagggcataggtggtggacaggcgattgaagatgccgccatctgccacgtctatataggcaaaagatgaaattttcactgtgttttgcagcagatctttggcgagccgtgccgtggctatccctgcatggcgatagataggtagtctttcaagattgcccgatgtgtatttgtggcaatattgcagacttgcattccagtcgttgccagggtaccaatcaatgccgatgagcgtgttgagtgcattgcggcattccacttcgcatcccattgcagcattttgcgcttcgtcaatgtattgggctacctctgctcgaatgacgaattgtccgatgggcaacgaacagtcagctcctaacatcgtcatgcggtgatagcgtccatcgatgtgtagtgactttccgtcggttgtcattcccatgcggagggctggcagtttgttccacgtccgcaaggcactcacagagaaatccacaccgctgaggttgacggtgatgcgtccaccatattccatgttcttcagtcgcttttctggttttccactttccaagtctatagaataggggagggaggtgttcggcaaacgcactgcccacggattgcgcagatcggtaggtatcacagcgaagttagtcacagggttgcacaccgcttctgctgtaatagctcccaaggtgtatttggcacgtaagccattcacaggcatgcgtatgtcgtcatagtcttgggcgagaaattcggtgtagtcgatgggcgacacacagtcggtaaggcgcagtgcgtctgccactccccatatcacgatttgccgtcccacacgcaggtcaaggttgcctttggtgtatgacagatacgcctctcgcagttctatgcctgtgcgttctttcagtattccgttgtaaatagcgttcagtgagacaaagagagctgtcgctcctttttcgagtctcacttcgccccttgcccgagttcttgacgccatccagtctgcattccctgttgttcggagtgcgtgataggtatcaagaaatcccttcacccgaacttgtaatgcgtcatcgctgtctttgtcatgcgtctcctgaagagtatcttcgggtactgtttcaagactgtcaatagttgctgttggcgtttctacttgggctgatgcctgtgccgagaacatcggcacaagcaagagagtggatagttgtatcaggttcatgttagagccctttctccaatttggaaacggtgaaaaggttgggcgccaccttgatgttgaatcgctggttgtccatgcgaatgatggtcttgtgccccgtctgcacattttccatttgcatgaggtgcatcgtccagaagccctgtactttatcgatgttggagatagagagtcggcggtgtagcttgttcagtttgtcgtagtattcagccttgacagccatcaaacagtcctgtcttatccacgttactcgacgtgtatagatttcgtccttgtcattgggaatcgactgtaccacccagcatcggtgtccggctaagttttcttctcgcaggaactggtgtttttcctcgtccacattgcgcatactcatgtcgttgtaggtaaagtcgctacccatgaagtagtcggtcttcgacgacttaccgctgatgcgtcttgtctttttcatcgccggcagatagagccacttgtcgtccactttgcgtggattgtcgtagtcccaagtgaggaatcctgttcccttcacatctccgggataagtgaagaacatgattttctttgtgtccttgcctatgtccattgcccacgattcgagtttgcgcacccgtttgtgcccgcttctctgcacgagcgtcatttcgatggtggcatagcgtgtgtcgccatcggcgcggttccttactttctgcatgatgtctcttcctgtgagacctgcggcgtttgcactgcaaatcgcaaacaaggcgatgagtgtcaatactaattcttttgctttcatttgatactgttttttattgtgaatttgtctttttttctttgccaaacactctgagatacttaaagagaatcggcgtgaggaacaggtctgccagcaatgccgacaccatgcccgccacggcaaggatgccccagttgaccatctgcgtggcgttcgacgacatgaatcctgcgaacgtcgccgacacgaccacggtggacatcacgatggcaagcccctcggtacggaacgtgctcctgatggcgttgccgtagtcgccgcatcggtcgtatgccacgtggctgtgattgatgaagtggatggtgtcatcgacggcgataccgagtatcatcggtatgagcgaggcggtcatcatgtcgagcggatagtcgagccagcccatcataccgcccactatgaccgcgggagcgaggttgggaatcatacccaccaagccgaccttccaactgctgaagacgagcacgaggatcacgccgatgaccagcaccgagagcagcatcgaccacatctgcccacgctccacgtattgctgcatcacggtgaactgcggtatgttgcccaccatcgagatgtgcgcttgagggaagagccgccgtgcctctgcctgcaatgcgtccatttccttctccgcctcgttggagttgtagttcttgatttccacttgaaggcgtagtcgccggtagtcatagtccatccaatactccgactccgtgccgccggcgttctcgtagagcaggaggagctgtgccaccatgtctgcatcgtcgggaatacgatagaattgttgcttgccaccgttgagcgtgcagttcatgtccttgatgatgtccgtcacggagttgtgccgcttggtgagcagatagccttctgtgatggtagccaactgatcgagccgttttaggttctcgggcttctttgcgtcgtctgcgtgcggcagtgtaatcatcaggtcgtaggaatacatcgaccccaattccgtatcgcacaggtcgaggaacttcttcacatactccaccttgcgccccattgtcttctccacgtcgaacgccggctcgatgaagaacagaccgatgccgcagaacagcgtgagcaccgacgacacgacaacgatacgccgatggttgcgcatgacgaacccgccgaaacgctcgaagtggtcgcccacatagccctcgaagctgtgcgacatattcgcgtgtggcttcctgtccctgcccagcgacagcagcactggcgtgaccacgagacacgtgagcagcaccgacagcaggcagagcgaggtgttcagaccaatggctttcatcggcacgatgctcatggagaggaacgtcatcatcgccgccacggtggtcagccccgagagcaatacgccccagcccgtctcgcccacggcatcggtaatggaagccttgcgcctgcccgtttccacaaatcgtgtcttgaagaagttatataggtgaatgttgtaggcaatggaacaggcaaaagtgagtatgacggctatcatagccgtgctcatgtcgatgtaaagccccgtccatcctatgatgccgaagccgattatcaaggcacatattgaggtaatcagcggtgcaatgactccacgcagcgagcgggtgacgacgagcatcaccacgatggagacgaggaaggcgatagcgaacaaccgtcccatctcacccttcagataaacgaacttctcgtagctcatatagggcattcctgcggcattgggcgatagctctgcatactttgctttcgtgatgatgcgtcctgcctccttgcccgtgaccatatcgggagcgatgtcgctcgtcttcttccacacgctgtcagcggggaatgggcgcagcttcaccatgatccatgtcatcgtgccgtccttcgacacgagtttcttcgagaggtagggcttgctgtatgccttgcgcttgatttcattcagtccggctgcgtccgacgggatttgctcgggtacaatctgctcgatggtcatgccctcctccgtgccaacggcaaactcaaggtcggtgagcgacgttaccttgtcggcatacgagaggctgtccttcagttcgttgctcagctcgcggatgagcgtgaggcttcgcttggagaacacgtccttgttcttcaccaataccgccacatagtagtcgttgccgaagatggacttgaactcatctgttttcaagagcatcgggtcgtcgctcataaagtagtcgtcgaacgaggtcttcatcacgatacgcttcgttcccacgaacgagaatgcgacaagcagggcgaacagccctaccacaagcagccggtggcgcagtatccactccgccgtctgcctgaacttacggttgattttttcgattttcattgttgtttttattttatgatttattttcctgttgtaatctcaccatctgggcaaacttgccaccttttgctataagatctttgggcataccctgttcgctgaccgtcccgccgtcaagtaccacgatgtggtcggcacccaatacggtgcgcatgcggtgcgcaatgatgatgacggtcttgttgcgcaccagttcggagataccagcctgaatttttgtctcgttctcggcatcaaggctggcggttgcttcgtccaagagtatcacaggagcatcttttaagagtgcgcgggctatggagatacgttgccgctccccacccgaaagggtttctccattttcgcctatcaccgtgtcgtagccttgtggcatacgattgatgaagtcatcgcactgtgccaatcgtgccacatgccttacctcctcatcggtggcgtcgcgctttcctatgcgtatgttgtcggcaacggaggcattgaagagcatcacgtcttgaaatactacggcgtaatttttgagcaacgtctctggttctatgtcagagatgtcgtgtccgcccagtgttatcttcccgctattgatgtcccaaaaacgtgcagcgagcttggcagtggtactcttaccaccacctgagggaccaacgagtgccgttatctcgccttgtcgggcagtgaatgaaacattgtgaagcacctgcttatctgtttcgtaggaaaagctgacgttgtggaactcaatgtcatagttcgaaacttccacctctgtgtcgcccgtctgtatgggcattgcctccatctctttcattcgcttgatacgcacatcgagaaaagtaagaatggcaaggtgattgcatacttcaagaataggattataaaccattgccgaaacaaggaggaacgccaaatagacgaacaccgatacgtcgccacgctgaagcatccatgcgcctacaacgatgacggtaggcatgcctaatttaagcagtacagcggagatgttgacaaaaacacctgccaagagttcaacggcaacaagtcctttttctaatgtttttaatcgctggtcgaaccgctggttatattcgtcctcgccattgtacgacttgatttcctgcacacattccagtccttcctgtatctgttcgctcactcctcgtttgatgtggtagatacgtgtaaaagccttgtccattcgatttcgtgaaactaatagcaccaccaaggcaaaaggtactacccaaaacagtgcgatagctaatcgccagtcgtaacagaacattcccgctgcgataatgaccatgctcaccacggaagcaaacagttggggaatggcgtgcgaaaacgtcgtttccaattgtgtgcagtcttccataatggtggcagtgaggtcggagagattgcgctcaccaaagaaggcaagaggtagacggcgcagtttctcggctaaagagatacggcgttgcgcactctcattatatacggtggtataggtgctgtcgtattgccgacgaatcacgacgagcatcacgaccattaaccctgctgccacgaggagataaaaccacaacgtatgaggggcattcattggcatattattgagatgctccatcaggaagaaaaacaaataagtgggaggcagcattagcacaaggttgagcagtgtcgaaaagatgatgccttgccgcaagtcttttgcccctttttccgtaagagcgaaacggttttgaaaatatttaatcatgactttatgactttatgactttatgacttttaatagatgatagtttccacgaaacggattgttgatattcattccacatacggtggtattgtttttccctgctcaatagttcttcgtgcgttccctgttcgactatctcgccgttgtccacaactacgatactatcggcatcttgcacagtggtaagtctatgagctatcattagtacggtctttccttgggtgagatgtgccagtgctttacggataagctgttcgttttcggggtcggcaaaggcggttgcctcatcgagtacgacgataggagcatctttcagaatggcacgagcaagaacaattcgctgttgctcacctcccgaaagataagtaccttcggcaccgataacggtatccaatccctgtggcagccggtcgataatctcgcgactttgtgagaggtcgatggcacggttgatctgctcggttgttgcatcaggattgccgtaacgtaggttttcgatgagcgaagtcttgaacagacgggtgttttggaagacgaacgacacgttgcgcatcagttcgtccttgcgcatgtctctcacgtctatgcctcctatggtaacactgccatgacatacgtcccaaaagcggggtatcagtcttgctatggtggtctttccgctgcctgacgctcctacgagtgcaaccgtctttccttcgggaatggtcaggttgatatgactcactgcatctttttccgctccctcatatcggaacgaaacatcgttgaaacgaatgtcatacgcttctgcccgttttggctcatcgtgctgcgagagcggtgcaatatcagtgagctgctctaatcgttccacagcctcatttgccatgaacaggtcctgactgagatacatggctttcatcacgttggaagcgatgagcggtgcaatcaccacataaagtatcacgttggcaataattgtggtggtatctccaccgtgtcctatcaggataatagcagtaggaacgaggatgaaggcaaaggcattgatagccagtatataaaatgacattggcgtgcgccacacaagcgtacacttgatgacgaggtcgcggtagctgataatgctatcgtagaagcgtttgaacgagaagaccgtttgttggaacaccttgaccacgggaatacctctgacatattccactgcctctgcccccatcttctcctgcgcatcaaggtagagcctttgaaattggttgttcttcgggttcatcatatatcccataatacctatcgcaccaacgagaggtattattgcagccgtacccaactgccaatccacagcgaataacagtacgataacacctatcggcgcaacgatgcaacttgccacatcgggtagcaggtgtgccacgaaagtatgtgtctgtcccgaatcctcatcaatgattttgcgcatacgccccgtgttttgttcatcgagatagcccaatggtgcacgcatcagtcgttgcatcgctttgcgcctcatgttagtttcgatacggaatgctgcaagatgagagagcatcagtgccaaaaagtagagcaacacgttcgccaccgatataataaaagcccatagggcatagtctataagaggggtgtttgagaggttgcccttggcgataagtagtgtgcgcaccacgagccacaaaagtatgaatgggacaagcgacagcagtccgttgactgccgacaatgctacggagcaaggcagcaagtatttgcgccctcccatgtaagctcctaaacgtttgagagttttcatcatatattattgtcttttaaaatttagtccttatggtttgagtaatgctttccaacctgccatgctaaagtccatgtactgctccaaggcaactttgatatcctcgtcgctgtaatcttcgtgttctacaatctcgcagaaaacggttatccatgtagagcaagtgatgtgaaccaagaatggcgaaatgttggcgttgagatgtggatagcgttctttcatcagtcgcaggtattccatacccaccttcatctgtctgtccaccatcttgtctttatatccttgtagcgacgtaccctccgagttgaataggagtagtcgaagctctggacgaaagtctttgatgatggcgagcatggcaaagatgtaatctatttggtgttgccgcatgttgaacacgtctatcgacaggaacttttcgtcattgtgcgacaagatgtgtttgttcaatgccttggtgagaggccgcagcacctcgcaaaacagttcgtccttgctcttgaagtaattgtataggtttcctacagcgacacctgacttgcgagccactgtgcggatggaggtgcagcgtacgccatgttcgataaattctgcacgagcggtggcgatgatgcgctgccgaatgtcatctttcagagtttgcataattggggtaaagggttaatagtgaacgttgttcaattttgttcataaaaaaaacgcactgttcttttcttgaacagtgcgcttcgatagtggaggggtgtatatccatatatgctatatggtactttcgtttgatcatactcttgtattttctttgctgcaaagatacgaggtgtgaacaagttttgcaatacctaaaagtgggtatttatcttgccactttctttccacctattatatatataccctttggcaaacgctggagggctttccagcctgtgcctaccttcacaccacgaaggttgtatatgggcagatggtcttgttgagcattctttccgatggggtcgatgccgcttggcaagaattttgcgttgtaggaataagtttgttctacgagggttctcgtattgtttctgtattcccaggcgataatgaaatagctggtgccgtcttcaatgctgttgaaagtgaaaggcagtgtgacggttgtgttgccagcaatctcttggtcaatctgataggtctccacaggatacccatcgttggtccccttttttattttgtacaaaaccaaatcgataccgttggcgtatgttcccgcctcgtcgttgctgactactatcgttcctgtgagtgtgggtgcctcgatagtttcgtctttgccgaggttgggcttgatttcaatcttgggcaagtctttgttggcataatgtcccacctctatggtacctttgtacaacttgcttccgtcgggtcgctgaatgtaataggacagcgttccctctttttgtggtttgatttttatttcaatgctgttggtggcgttggctgcgatataggcgccaacgatggctactatcttgttatcgaggttgaagttccattcttcgttgcaatcgccgcccttgttttctactgtcagtgtgatcgtcagtggtacgccaatctctttgcttcccttcatcttcacctctttcacctctaattgaggacgtttgtcggcagtggtttgcttgagttgcgtgtcagtaatggtgatgtcaattcttttcttgtctccgtcttcgctcactttccattctgtctctccatctacttggtagatagccttcagttgatacgtaccattgtcaaggtctttcccaaacgatactccactaaaggtcggtccactggcagtgtatgggttgttagggaactgctgattcgtttctctcagtaccgaaattagttggttgtccttaaacaatcctacacctatctttccattgaagtctgtgccacagcggttggtaaacatcacggaaagactcatgccattgaagtcactcgtcttattatttcttgtgatgttagatgggttcatcttcaactggtaagcggtgagtacgattggtgtcgtttctacttctgttgctggcttgatgccaatgatggcatcttggttcaaggcgtaggcatcggcgtcgcctcctatgccagcctgattggggcgtaacaccgacaagcggtaatagccatcggacatgccaccccatccccagttgatgtgaaagaagtcgccctccttgtatccgtcacacacgaaggcatgaccgcttcggctctgtgtcgatgcgctgtaatacacgggtcggttgttctttagttcgttgtatatcaagtcgttccactcctcgtacgcaaaatcgcttcgttgtactaacttcattcttttcgagtagccgaagtaattggacaatgccgagacgcaattgccagagttcgtactcgatgcctctgcggaatagtccatctttagcgactgtcccacatatctcatcagttttgccaccgcctcttcactctctttttgcagattgtcttgatagaagggacgcatgatctcccattcaaacgaggtgggttccaatgcctcacattggatttttttcttgttggtggtataagcttcaatgggttttgctaacgtgttttgtggccatctgtggtagaacatgatttgcgccattgcagttgccacgcatcccgtgacgcttctttccttgccatccatgggacagttgttgttgtagggcgctgattgattccattgcgtttccatgagctgttcaatgggggtgcggttgttgccagctcttgtggcaaggtgtgtcgtagtttctccacgttggtcgagcagttgtaactcttttgcataataagagagcaggtcgcacagtccttcaggtaaattcgccttgtcaaactttccattcagcgtgtatccgaaaatgggttcggttctgtcatccgcagaggcaatgacaaaccccttttgacttccaatgctgaagacgtaatagtatggggtgccatccaccgctttcaagacgttcttgccggcacgcgtaggttgataactactcggcagattttctttcaagaagttttccaccaacttttgagccttttgtttgctcacaggtgcgccaaatgcgcttagccacaatagaagggcaaataatagggtagaggttctgtttcgcatcgtttactaaatataagttattgatacaaaattaaataaaattttcgaataataaccctataaaattaaaaaagtatttagaaacaatcgcaagtatcttcccacagcaccaccttgccttgctgaagcgatagtggcacgttgatgaggcgttggttggagctgccacggaagagtaggtcaggatctttgagcttttccacaaacggaccgtctaccaacacgtctaccagttcgagcagttggcgttgttgcggattcttgatgagtgcctcgaaggtaaagcccgtgtagcaccatattgttttgttggtgtgtgtctttatctcgtgtgctaattctgcaaacccttcggcttgaaacatggggtcacctcccgagaaggtgacgttggcaaaggggtcggcttctatcacacgcatgatgtcctctacttgcatccactgtccgttgtggatgtcccatgtctgtgggttgtggcaacccggacaggcgttagggcatcctgcacagtagacggtggtgcgaaagcccggtccgtctaccgtggtgtcttcgagaatggataggatggatagcatagtttacggagcagcctctcccccgacccctccccaaaagggaggggagcggttagcggattactttgaaatttgagctttgaacattaaacttaatggtgagcagattactttgaactttatgattagatgaagtataaacttgttaacttgttactcgtcaactggtcaactaataagccagctatctactcccctccccctcggggaggggttgggggagaggccgctctttttactcgtgcgtcaccctgtcgttgagctctgctaacttgccagcgttccagcggtcggtagtgcctacgaggtagcctgtgatgcgttgcagccggtcgatgtgatgactaccgcacttaggacaggtgtcgaggtgtgcgtcagcgttctcgtatccgcagtccatgcatcggttgcggttgtggttcacgctgccgtagcccatgttgtaacgatccatcatgtctaccacgttcatgatgacttgtgggttgtgtgtggcgtctccgtctatctctacgtagaagatgtgaccaccacgggtcaggtcgtggtagggagcttctacctcagccttgtggcgtgcgctgcacttgtagtacacgggcacatggttagagttggtgtaatagtcacggtcggtgatgcctggcagcgagccaaactccttgcggtccttcttggtgaactttccagccagtccttcggcaggtgtggcgaggatgctgtagttgtgttggtactgctcgcagaagtctttggagcggtcgcgcatgtaggtcacgattttgatgcccaacgcctgtgcttcttccgactctccatggtgctttcctacaagtgccacgagacattctgccaatccgatgaacccaatgcccaaggtgccttggttgatgacgctctctatggtgtcgtttggctccagctgttcacagccaccccacagcttagacatcagcaaggggaactgcttggcgaaagctgtcttttggaactggaaacggtcgtcaagctgcttggcggtgatttccagcatgtcatcgagcttggcaaagaacttggcgatgcgttgctctttgtctttgatgtccatgcactcaatggcgagtcgcacgatgttgatggtggagaacgataggttgcccctgcccacactcgttttcatgccgtatctgttttcaaacacacgagtgcggcatcccatggttgccatttcgtacatatatcgcttggggtcatcggcacgccacagctcatgttgattgaaggtggcatcaaggttcaggaagttggggaagaatctccgtgccgtcaccttgcacgccagacagtacaggtcgtagttgcggtcattgggcagatagctcacgccccgtttcttcttccaaatctgtatggggaagatggcagtctcgccgttgcccacgccttggtaggtgctgttgagcagttcacgtatcacgcaacgcccttcggcagaggtgtctgtaccgtagttgatggacgagaacactacttggtttcctccacgcgagtggatggtgttcatgttgtggatgaaggcttccatcgactggtgtacgcgtgccacggtgcggttgatggcatgttgcttgatgcgtgcatcgcctttcagtccgttgagtgggcggtcgatgtagtcgtctatctcggtttggtacaggtgttcgaagttgtcaccatagagattttccagatttttcacctcttctatatatgaggagcgcacgaagggggcgagatagaagtcgaaggcagggatggcttgtccaccgtgcatctcgttttgtgcgcactccaaggagatgcacgccaacacagcggctgtctcgatgcgcttggctggtctggaagagccgtgtccagcggtgaacccatgttgcaggatgttatccaatgggtgttggcagcaggtgagcgacttggtggggtagtagtctttgtcgtgtacgtgcagcagattgtgtgccaccgcctcacgactttgttctgacagtagatagtcgtctacgaagggtttggtggtttccgaggcgaacttcatcatcatgcctgctggcgtgtcagcgttcatgttggcgttctcgcgtgtcacatcgttgtttttgatgttcacgatgtccaagaacacatcgcgtgtctttgccttgcgtgcaatgctgcgctggttgcgataggcgatgtacttctgtgccacgtctttgcgggcactcttcatgagttccatttctaccgcgtcttggatgtcctctaccgacatttgcggttttccgtgtaccgagatgtggtcggtgatttgctgtatgagtcgttcgtcttcacctttttcggtgtgtagcatggcctttcggatggcagccatgattttttgatcgttgaagcctactatgcgtccgtcgcgcttcactatggtttgaatcatgtgtttagttttttagttgacgagttgacgagttaacgagttttttttagttaacgagttaacgagttgacgagttgacaagttttttttctaagatttctaggatttctagggtttctatgttttcctatgttttctaggtttttctatgtttcctagggattcctagggattcctaggaattcctagtttttcctagtattcctagtttttcctagtatttctactttctaattctcaagaaagctcttttttgaaaaatcttgtgcttgcttgctatctcactgatttctttgcaaagataataattatttcattgaaaaatcattttggaaaacttttaatgagttaataaaagttaagcgccaaacaatcaataagttacaaaatgttttggaaaacttttgttttattttcgttatctttgtttcttcttttgtctatctttgataagatatttgtgcgtcttgttatccaataatgacaacaaaagcgtgccaccaattgtccctccgataccaaaacaagggtggcatcggcagtttacaagaagtggcacgcttatatattgttaagcaattttgcttgtcacaccacttcggtgagttctcctgtcagcgaatctatcatgaatccccgcacgacaaagttgcgtggcatgagcggatgttgcttgatagcctcgaccatgcgttgcacatcagcttcgatgtcgtcgaagccgtggaggaactcgtcgaggttgacaaactgtgctgcttgttctaaagcttcgtctgtcacccctttttctctcatgaggtcctcgaaatggtgcgcctccatgtgacacagtccacaatcggagtgatgcaccaccatgatttcctcgcatcctaattcgtacactgccaccaagagcgaccgcatcaccgagtcgtagtgcgaaatcatagtgccgcctgccaccttgataatcttggcatcgccgtttttcaatcccattgacttgggcaagagttcggtgagacgggtgtccatgcaggtgagcaccgccaacttccgattgggctgcccagatgtgatatactcttcgtatcgcttttctgccacgaactgtttgttaaatgttaaaatgtcgtctatcatattgcttttttcatgagtcgcctcctcaacatcttctaaaggtggtgggggagcagttttctgttgatatgaagacaaatttaacggtttttctgaaataaacaaagtccatgcgcgcaaaaaaatgaaaaatatgtttgcatcaatttttgagattatcaaacaaaagtgaatttcttcacactctttcactataccttggaaatatcagttcaaaaagaaaacagtatgtgattgataacttcttgaaatagggtgcattgtgctttgtgtttcaaagttctgcatgaagtttatgggcgaagtagctgatgagggtagactttgaatattatttaaggtttatcgcacttaatctctgtaaatggaactgatgttgcctttttgctttgtatctttgcgttagtttaattcgaaataaaaataataagaccatggaaattacacagaaagaggcaaaggatgccatgaaaaacacgttttgtaggttgatgctgttacccgcagcaggcgaggtgcgatggttgggtactgtgtcagatttggtagagctggtacacataatgtggtacgacggcttaacaatcgatgaacacggacaggtgctcaacttctccacctcggtcaaccgactttgtgagcgtttgggactgcgtgcaccgcgcaaacccaacacagtgatgaacaacatcagaaaccgcaagaactacgaccgcatgctcattgtgcgttgccagcacctcatggagcagggcgaagaaccgttggcaagatttatcaaggaagaaaggggggaagaagagggaagcctctccaacagcctctcccccgacccctccccaaaagggaggggagtgattagctgaactattaactcgtttacttgttaactcgtcaacttgtcaactaaaaaacttgtcacctcgtgaactcgtcaactaaaaaaactcattaaccagtctatctactctcctcccctttggggaggggcaggggagaggctttttaattaccatgaaagcatatcttaaattagaattgaattttttcgaggcacccgtgtacatggagatgcgtgccatcgaagggtgtaccggtgaaggatgcgtgttggccctgatgcggtacctgcgcacctgtcccaagggaacggggtaccttgctgcgttgaaaaatatcgcacacgactgccgtaagtcaaaaacgtatttgatgcacatcatttccgactataaaatcttcaaaatcgtggatcaaaaattcttttattgtccctacttggagcattcattattcgttcaacattcaacgaacaatcaaattaccccctcgcaagtgcttgttaatcaaggggcacccttatatactaataatactaataatactgataatactaatcatccgacgacgatgcgcgcaagagacgacgccgacgacgagaagaataaaaatcatatccctcagcccacgccacaacaaaccgctgcctccatacctccctcgccaccaaagcaagctgccagcgcaatcgagcaagctgccagcgcaaaagagcaacctgtttcgccaccaaagcaagcggtctcggcaccagagcaacctgcctgcgcatcgaatgtttcgccacgtcctgccgcaccaccaccgtctgcagccgattgtcaacatgagttaaggcgactaaatgcatgtaataagcccgttaaagcaatgactttgaacgcttatccacatgcttcaacctcccacgaattagccgaaaagaaggcgaagttgcaaaaatgtgagcaagatattttgaaccatttgtacggagatgccgctttcatgatgagcttgcagagtctcacgggactttgtgtgtatcgcagtgccaagacccgatattactgtttgcagtggtttcgtatgattcggcattcgcaggggaaacccattgtggatgaggaggatgcaaaaaggcaccttctggcattgctccagaagggccgaaagacgcgcaacgattttcatcgctggcacaacgatcagttgcagccttagctgcgagaggtgttaagcacgcagatgtcgtagtgccatgtgccgattttgcgccttgttgggcttgcaactcacgtgtagccagatgacaccaaacttgctgtgctcgaagagcatttggtcgaagttgcagtgtgtcaggatgaaatcgaagtaagcctgcccctgttgctcactcttcagacggatgtcggcagcctgtccatacatatgttgcgagttgcccacaccgtggagcagctggttgaggagcggacagcgatagccactgttgatgaagataggaccaaactccttgcgcaaaggttctaagacctcatggcacaggatgcgcaggtttcgcatcgtggcaccgtaaggcatgttgttgatgtgatacttgtcggcggttgccgagcttacgagttcgtggagcgagaaatgctcgctcagttgttgtgttttcatggtttctttgagtttttaatatcaactcaaaggtagtgttttcctgatagctgagagaacgaaatcaataggcttcgcagatgaaaagcggcagcagacgtgtacaccgttcttggagaaacacggctctttcatttaaggacattgttgtttaacaacgaatgaaaccaataaaacaaatcaacgaaaaaagacgatgaacgcaagcgttctgcgaatgaaacaaatctttctacatcaacatgttgtgtgtctctgctaaattcgtttcattcggtgaacgccagcgttcattgattccagcaatcggatttgtttcttttgttcaatttgttgttaaaacaaaagaacatgatagtttttgacaacaaacgaccttttaaatgaaagagccgtttgccattcgagatacgaccccattcgagtggcataccctgctgagcgtacaaaaaaaaaagcctcatcagctacgtagagcggatgagacttatggtgtactatcttcggcttgcttaatattcgtctattttcagctttttgcgatagttgtcgagttttcgttgcagttgcttcttcaccttggcatagcgtgggtcgtcaatgaggttgtgatgctccagtgggtcggtttgcaggtcgtacagttcatcgtaattgatgtcggggtcgttgccgatgtatccactgtgcagcatgcccatgtatccgttgtattcgcgtgtgcccggtatgcgctggtatttgttttctgccactgcccgctcgcttccttttccgtagaagtgcaccaatttgtagcgttcggtgcgcacaccgtcgtgcttgcgcaccatgtgccatgcggggtagtcgtaataatggtagtacaggtcgtgccgccaacgagtggagtcggctctgaagagcggtttgagcgagcgtcccggcatttccttcggtttcttcacgccagcataatcgaggaaggtgggagcgtagtcaatgttctgcacgagttgatgcgacacgctaccgggttttatctccttgggatagcgcacaacgagaggtgttcggaaactttcttcgtacatgaagcgtttgtcgaaccagccgtgttcgcccatgtagaaaccttggtcggaggtgtacaccacgatggtgttgtcgagcagtccgttcttgtcaagatagttgagcagctcgcccacactttcgtctacagagtgtatcactgccatgtagtcgcgcaggtaggtttggtatttccattgtctgagggcttcgccttgcagattggcggcagcaaagtctcggcttcgctgtgtgtaatattgttgtatggcaggtttctgttcctcgttcagtcggtaccattctccgaccactctgctaccgtcggggttgtccaagtgcttggtgtctaccttgaggtctgactgtaaggtcatgtctcgtccaatgtccatgcgctgtgttcgggtggcactgcctcgggtactgaagtcatcgttccatgagtgtggcaaagggaaggtgacgttgtcgtacattcccatgttttgtatggcaggcatccagttgcggtggggcgctttatgatgcaccatgagacagaagggtttttgcttgtctcggctgtcgagccattctatggcgtgcttggtgatgagttctgtggtgtatccctgctcgcgaacatatttattatgggtgcgattgctacggaaatcagggttgaagtagggaccttgatcatcgaggatttggtaatagtcaaagcctttcgggttgcatatcatgtgccattttcccactactgcggtctgataaccaacttgttgtagcagttcgctaaagaatgtctttgtggtgtctatgccttctgccaactgtcgttgtccgttttggtggctatagagtccggtgatgaggcaggctctggaaggggtagagatggagttttctacaaatgccctgtcaaagcgcatgccttcacgggcaatacggtcgatgttgggcgttggtgtttgacgaaacaccttgctaccgtaggcgctgatgcattggtaggcatggtcatcgctcatgatgtagaggatgttggggcgttgatgattttgtgcggtggcttgcagtgctaagaggagcagcgagccggagagggagtagttggtgggcattagtttacgagtttacgagtttacgagttgacgaggtttttctagattttctagatttcctagttttcctagtttttctagtttcctaattttcttgatttctaatttaatccagctgcaaatgtacaaaaatcacggtaaacaggtgatatttttttcaaaaacatatacctttgcaaaacgtatattttttagataaatagttatggagaaaaatttgaaacgttcaaccctctgtattcgtgggggttgggaaccaaaaaatggcgagccagtggagccgcctatcgtgcagagtaccacctttaaatatgataatagcgaggagatggcgcagttgtttgacttaaaaaaggagggctatttctacagcaggttgcagaatcctaccaacgatgtggtggcaaagaagattgcacagttggaagggggcgtaggatgcttgctcacttcgagcggacaggctgccaacttctttgctgtcttcaatatctgtgaggcagggagtcatattgtagcgtctaccgagatttatggtggcacgtacaatctgtttggtgtgacgatgaagaagatgggcatcgactgcaccttcgtcaatcctgaggcgtcggacgaggagatacagcaagccttccgtcccaatacgcgtgtgatgtttggcgaaacgatttctaacccgggctgtcatgtcttggatatagagaagtttgcccgcattgcccaccgcaatggggtgccactgattgtggacaatactttcgctacccctgtgaactgtcgtccttttgagtggggatgtgacatcgtgacgcactcaaccaccaaatacttagacggtcatgctgccactgttggcggtgctgtggtagacagcggacagtttgactggatggcgcatgcggagaagtatcccggactttgcacccccgatgcgtcgtatcatggactgacgtacacgaaggcgtttggcaagatggggtatctcacaaaattggtggcacagctgatgcgcgaccttgggtcgataccttcgccacacaactcgtatttgctcaatttaggattggagtcgttgcacctacgcatggcacagcactgtcgcaatgcgcagcagattgccgaatacttggagcaacaggagcaggtggcatggattcactattgcggactgaagaacgatgcacactatgcacggggtcagaaatatctgcccaatggctcgtgtggggtgattgccttcggcttgaagggcgatcgggacactgctattcgcttcatggactcgcttcggctcatcaatattgctacccatgtcgccgatagcaggacgtgcgtgctgcatccagccagtcatacgcaccgacaactcaccgacgagcagttgcgtgcctcgggcatcgaccccacattgattcgattgtcggtgggcatcgaagatgtgaccgatttgttggcagacatccagcaagcattggcgaaatgctaaaaacgtatttcataagcatttgatgacgatgtgcggtggtaatttatagaaccagccaaaataacatagaacaccgaaaaacccagctaaccccttgtatctttcagggttagttgggttctttcgttcttgtcacaaggagttgcaagcatggctccctgtctgtttggtgctacttcttttgttctaccaattggagatacagtccgtgacggaactcggctttcagttgtccgtccactctcaccgcaccaccaacgagttgtgccaagaagcgttttttgcccacatcatacacaccagccgctccacgcacgttgaagtagaataacacctcaatcttgctttgtttgcccttttcctctaccttatattcgagtattttgggttgcatcacaaacgcaacaggcatgagactgtagaatccgatgttgcaattcaagtcttgtggttttgccttcatcagcaagtttttcacatcattatcctgcacgcttggcacgaaagccttggcaggcacttgtttaatgagcagcgtagagtcgctcgttacgtcccatgaaatatcgagcgagtcggttttggtgcttgctgtcaatgggtaactcaaaggaaataccaacttacccgtgtgtgcgcctgccacagtgcgatatgcctgttgcacctcttctttggtaatccttttcgtgttgtcttcgttgtcgttcagacaagctgttaaactgaaagcaagacatcctacaacgaagagtgatgcccatgatgttttgaaatactttttcatttttttgattttaatggattaaatttgaaatattctttgtcttataaacaccaaattcctatgattcttgcatctctccgaagttaaaaaatattaacaacttagagggcgtgttatgtgtgataaattgttacagattgattatcaatcatataaactttttattcttacatttcgggatcatctatcatggagacggataaaattttctttcaaaaaggattgtaatgtattgataatttagttatctttgagaaaataatctaattggcgagaaaagtaccttgatgaaaaacaacatcatttcataaaagcaagcttggaggtattgtgcatcactgtgtttggtcaagttcgtaaggacacttgtcttgttggtgcgcactcgttcgcatctcgcagcaggtcatcgtgcggacagtttcgcatctcgtagcaggttattgtgcggacagtttcgcatctcgcagcaggtcatcgtgtggacagtttagcatctaacagagggtcgcggacagtttcgcatctaacgacaaaccgacaaataagtgctgtgttctacacacctcttttatattgggtatggttattctaacggtaagaagatcgttcaaggtaacacccactcccttcctctctgctccatactcattgcgttatgctgaataaagagaggggggagattttctttttttagtgtttagagattagagtttagagttgagttttatatgttcttgcaataacaaaagttttaatatttaagtcttacaactttaacgataattcttcctttataatcgtgttcaaaaaatgagtaatgttcaaaactaatgaacaagagataattaatgaacattagatttggaattaacaaaaatgttcattatatttgaagcgttcaatacgaatgaacactgttaaatgagtgaactatatgaataaaaacaaagctataatttcagatgccattgaccatttgagaggtttggctaagttaaacaaggttgtttataaaaaatctcctataggaaatgacttctacgatattcagatagaaggacaagactttctttgcattgttcaaaacaatgttataaaggcaaacttatctatagttttgcaggcaatgcagcaggtacgaccacaaactgataagcctttattactaatatcgcaatatgtacaacctaatctttataacttgatacagcaagaaaatatcaacatagtagagcgaagtggtaattgtagaatcattgcccctccgttatttgtccacatcagcggtcaaaaaagatttgagcagaaggaaaaaagaggaaaagcttttcatgaagctggtattaaattgatatttttctttttacaagatgaaactaatgtttccaaaccctatcgccagatttgcgaccagacaggcttatcgctgggaacaataaagaatgttgtggaagaactggttgaggagcattttattgtaacgatggcttctaaacgtgtattgaagaatcgagaacaactgattgacctatggcaagtgtactataacaggacgttgaagccgaaattattgataaaagaatttgaattagtggataagcaagattggaaacaactcaaacttcctaacaatatgtattggggaggagaaagtggagcttatttacatgatggctttcttattcccgaacaatttgaaatatatgcagatgcgcccatcagcaatcttttgctaactcacaaagtaagaatccaagataatggaaacatcaaggtttatcagaaattctggaaagatagtacgaatagcaatttggttcctaattttcttatctacgcagatttaataggaagcgggaacagtcgttgtatcgaagcagcacaaaaactgaaggcgtatggcatataaattgaccaaggaaggattaggaaacgaccttttattctccatcttacaggcattggagacattggtaaatcttccaaatgatgatgcttcagccattaaaataagtctctaacctctgttttttaagtttctcaaaaaaaagtattaaaactcgtgcagtcttttagccataatctgctccttttaataaaaaggaaaagtatatctatgaaagtagatgttgatatagacgcatgcaaacgaggagaaagagaagctctcggaaatttatataaggcatattctgacagattgttgcggatatgcctgcactatgtgacagatgaaagcacggcagaagatattctgcatgatgcttttattattatcttcacctccatcaagtcgctgaaagacaactcaaaattggagggatggatgataactatagtaaggaacctgtgcctaagattcctgcaaagtacagaaaaagacgatattcctctatccagtctgggccttgaactcttgagcgaggaagatgaggaggaaaagaatattgacataaaactattgttggaggcgatagagtcgttaccggatgggaacagggaggtgttcaaactttctgttttggatggtctttctcacaaggaaatcggagaactgcttggtatcaatcctcacagttcttcttcacagttgtttagggcaaagaaaatgctacgcaccatactgattaattattggatgctcttcttgcttcctattcttataccagtctatatctatttcgtaacgaaggacgagtctgccagcacttctgatgacaagccaacagcagtaaacactcataaggaacttccaagacgggctcaaaaaggcacagcccctcaaaagaaagcgcaaccaaactattcaatcccatcaactaccaacttgaatgatgatcatattttggcaaaaatagttgtttctgctgaagagatttcttcacaaataataactgatagtgtaaaatctggacagcagacagtaccaatctgtgtagattccttacaaaaacatctggcagtaaaggatatcagcatagaagactctgtgttccgtattccacaaattccagaagaaagaatgatggcattgaacgaaagaatgtcgcctgatgtccgcaataagaagaaatacccatggacatttaacttcggttattcttccaatgccggagcaaatggagccatgtccaacctgaactacctgtcggtagtagattacgctaacggtggggctgcggcaaaactatatacatgggatgattatgcaaactatctcgcccggaacaatgccttgatggattctgtcgagatggcaaaaatgtcatggatagcactcaacaatgcaacagatggcaacgcatccttaggtgaaaaagcgcatcactaccgcccaaaaacatttggattatcgcttaataagcaattaagttcgcattggacttttagcacgggtttgacctatacaaggttgaagtctgattttgagagcgagtttaatggtgcaaccttgttgaaaacccaaaagattgattatgtgggcattcctttgcgattgacctatcctatctggagcaaggggcgtttaaatgcctatacaaccggtggtgtgacattcgagatgcctgtccacagttcgcttgacaagaagtatatcataacgtctgactcgtcatacacgctgaggggtgacatcaaggcccgctatcagtggtctgtaaacttaggcataggtgtacagtacaagctattcaagccgttcagcctgtatttggaaccaaatatgttctattactttaggaatggtagcgggcttgaaacctatcgcacggagcatccgttcatcataacggtgccattcggcctgaggcttacttggtagatagatgaaaaaaggataagaaagaaaagtcataaatatagtgcagtctttttatagctttccgctctttatagtaaaggcaaaactcaaaagaaagaatgtatagtatttatgactacatctataacggaatagtatttgtcaataatgtagtacgcagccagcacaaggaactcacctctttgatgatatattccactactaactgtcagtcacgttgcaagcactgttccatttggaagaaacctacggaaaatataagtttagaggacatcatcaagataatgaacagcaaatgtgtaacaaagcgcacaatggtcggtttggagggaggcgagtttatccttcatcctgaagcagacaagatattgggatggttcgacattcatcatcccaactatactttgctgtctaattgcctcgcagtggataaggttatttcgtctgtgaagaatcatcaccccaagcatctgtatgtttcactcgacggcaatagggaaacctatcgctatatgcgtggcagggatggatatgataaggttattgaagtcatagaggcgtgcaaagacattgttcccatatccctgatgttctgtctttctccttggaattcttttggagacatggaatatgtgatagatgtagccaaaagatatggcatagacgtgcgtattggcatatacagtacaatgtcattttttgacacgaccaaggacttgatggaagctgatgatgcggatttcatcggtcagataccatcctccatacatcaaacggacgaaaactttgactttgttgccctatatgacgagtggaagaataacaggttgaaacttcggtgtcacagtattttcagcgagttggtcatccattccaatggtgatgttcctttgtgccaaaatttggatgtaatcttgggcaacatccatgagaatacgctcgatgagattttcaactcaaagaaagcagggaagattcagtgccaacactccaaagaatgtaatcaatgttggatcaactatcatcggaagtatgatattatcctgttgaggaatctggaaaaaatactgcccaaacgactgatagagttgttttacgggaaataccaatggacagatgacaggcataccacctataagaagcattttaagaaaataaccgcataacgaatgaacatgggatattatttagataacatcattggtagatacaagaatatgcgcagcatcagggaactgagacatacctacacacagcaatacgctcttgtgggtattggaaatcattgtgtcagcaacctgttgcctgtcatacagtatctgcaactgccactgaaatacatctgctgcacctcggagaaaaaagccaagttgatttctcaaaaatacaaggggattaaaggaactacttccttacagcacatcttgaacgatgatacggtttctggagtctttgtggctgccaatccacatgcacattcgcagattgcaagtgaagtcattaaagccaggaaatctttatttatagagaaaccgccatgcgagaacgaaagggaactgaactccctgatagatacggtcaaattgtatgggtcacaacatatcgttgtcggactgcaaagacgatttgcccctgcaacccaaatcttgcaaaaccgattgagaagtgagggtaaacgacactatcattatcgctatcttacgggattatacccggagggagatgccctgctcgacctcttcatccatcctcttgactatgttacattcctctttggcgaagcaaagataaagttggtagaaacaatgaccagtaaggatggcggacagaccttgtttcttatgttagagcatcaagatataacggggatgctggaactatcaacagattactcttggcaggatgcacaggaacaattaagtatcagtacagataatggacaatatctattggatagaatggaaagacttgattttgctccaagacactctgcgatattgggaatccccttggaaaaaatctttcaaaacaaagcaaccattgtaaatctctacggaaggaatggttttgttccaaccattgggaataatcaaatcatctcacaaggtttcttctccgaaattcaggtgtttactgacatggttgaaaacaagcgtgatgatgatcatgcctttgatctggaaagtgtcaagcatgtttatactctcatgtcaaaaatacataattacacaagcaagaaatagcgaataatcacgtttatataaaacagtattctaaatccatacatttatgaaaaaagtattttactgtctgatttgcctcattgggttatcagcatgctcgtcagagaatgtcgtacttgagacattaagagtttatgatgtggcaaactccacttgcaagttaaatctctctccaacagaaacccgtctagatttctatttggaaaatgatgcaaaacctgcaacccttagcattgaattgggaaaagacggcattgcccaatgcgcactcgaagatgtgaaagccaactgcgccgtgagaaatatttatgtgaacatcgctaataaggataatcagattacccttgttgtgtatcacaatgtccttgatgcgcttgcagattgcatttgcaaatatgatgtcaattttaagatgagcaaagtaatccccgggaattatcaactgaaagtgtactatgccaaaccaaatatgaaatatgaagcttccgatattgcatataatgggcaagtcaatctcgtgcagaataagaaggcatatataactctcaatgctgacaaggtgttgccggaaatggaaagcttacttttgaaagaatcataataacaagataaaaccaactaaaataatattgatatgaaaaaaggtttatatgtactacaagtgctcattttatcgttgttatttattggttgcaacagcgaagatgaacaaacgtcaactcctatagtacaaggagcgaaaacggcattgtttgccgttgggacaactcgcataacaagggctgctgcaaagccctatctttttacgcttgagaatatcaactctttcaatgtgcagactcgtgagattgtcttccaagattttgagcctacaagtcaactctttccgatttaccgtaatatagaagtacattcgtatggcaaggtgctgcttcacatcacaacctttgtatcttcgctcaatagtcaaatatttacagatttatcattggtctcggaatcaggtaagttttatcttagcgactgctacccacgaaacatcgagaacgacagtcactatgccaaagataacaaggttattgcggaatcacgagaaaaacgagcaacagaatggggagagtttctctcaatactcagaaaacatggaaagttgatagaatagtgaataacgcaaacatatctatctaaaggagtatgtctttatcacgacttttagccctttttggtcatcgagatcaaaaagggctaaaatcatatttaagggattgtaatatccttattataacttatttccgcttccttttgcgcgtacctatatttatatccgttgtgtgtgaacatgggataggtgataagtgatagcttttgcaatattgaagcctatcatgaatcattgacatgcggagacaaatgttgtatctttgcatcgtcagtcagagagatgactgatttacatttatcatattaaccttaaaaaacacacaaaattatggcagtaatgtacaagttgtatcagaacaacagaaaagattctaagactaaaggtaagtggtatgcacgcgccattcatacccaaatgacagaaacggatgtgctggcagaacgcattcagcgcaactgtactgtaaaacgcagtgacgtactcgcagtactttctgaactggtagaggtgatgcaagacgaattgcaagccagtcacgtagtgaagttgaacggttttggcttgttcaaaataggtatgcgcaccaaacccgccgataccgcagctaagttcaacgtcagcgagaacgtggtgaacttccgcgtgaactttatccccgagatgaagggtggtggcaagggaatgaaacgcagtcgcaagttcttggacaaacttagtgtacaagaagcaccgaagaacgctgtggacaccaccaaaccagcaactcccgcctctccatcgaccaacggataagcgagtatagagaaaggaaagaaccatgaaaaacaccaactggaaactcatcattaaattggttatcacgattgccacagccgtattaggcattcttagtcaacaagatcacgacgtcacagacgaacgttgaagagcacacgagtctgttagtcctttagccaaacaattggctgtttggaatgtctatttacggttttgtatcaacattcttctcttggcagcagcgatagtagccattctcagctgttcaagaatcctctaaaagcaaagagccaactcacataagggttggctctttttggttgttggggattgtgttgtttcgattgttttcagcgttagcaaacctccttgtaatagcaacggaatatcacggaagaacacggacatgctgccatacacggattttcattgataaagtcatttgttgttacaacaatcatgtttttttgttttaacaacaaattaaaccaatccagcaaatccgattctcggcgttcaatgaacaccagcgttcaccgaatgacacaaatttagcaagacaacaatattttttacaacgaatgaaatttgtgtgtgttcacgacacatccgtgtcgttccgtgcccttctgttgctacgatgagaaatattacttccgttgcctcatttggtttgaaattctgttgttttaccttgaacaaagggtttgcgcgctgcaaagacgggctgaaagcccaataggaaattagcccagggcagcgccctgggtaacagtgaatcaagtaatttgcgctctgaaagagcaacaggaagtaacgaacgagtattttactggctcctgttgcgcttacagcgcgctggatagtaggtacacttgcccttcaatgaaagaaccgtaaccccctcaaaggaatagcgaaaaatttgaattttgcacggattcatcgtatctttgcaaaaacaagatgacggtatgaatgatgaatttgtgttaagacccattgcctattttcattcgccctttgcctctaagtttggtattcccaaacagagtggtgtggtgccacagttggcagggacggtggttttcgagtcagcctttcgtgatgtgcatgcgctgcgaggcattgagggatttgattatttgtggttggtgtggaagtttagtgccaacccacacgatgctacccatttgttggtgcgtcctccgctgttgggcggcaacgagaaggtgggtgtctttgccagtcgttcgcctttcagacccaaccccataggactgtcgtctgtgcgtttgcaacgtgtggagtgggagagcgagtgcggtcctgtgcttcacgtgttaggtggcgacttgatggacggcacccccatttacgacatcaaaccctaccttccctttaccgatagtcatgcagatgcacggagcggatttacagatttgtcgaaactaaaacacttggacgtaaggatgcctgcggaattttcttcagcctttactgccgaagagcgacaaacgctgttagcgatattggcattagatccccgtcctgcttatcatgcagaggacacgaagacgtatggaatgccatttgcagacaaagaggtgaaatttcgtgtcatcggaggaaagaccgttgaagtagtgagtgtggagcgatagaagcgagcaagcgtgggcttgtgtcacctcatgcgcattgaacgttgctttcagcaaatgcttgtttcctcgtattttcttccttgaaaggtgtgcagctcacgcatacgcttgcagagcttttcggtaaactcataattttttagtccccattgtggggcaatgagaagttgtggtggcgactgactgacaaagcgttcgatgaccaagttggggcgtagctgctccaaataacgtatcatcacgtccatgtattcatcgaccgtgtacacatgaaaaggcttttctctatattcacgagccagttgggtgtgctgaatgatttgcaactggtgaatcttcaaaatatcgatgggcagtgccgagatgagcggtgcctgcgcaatggtttctgaagccaattcaccaggaagtccaacaatgatgtgtgctcccgtgcggatgccccgttggtgcgtgcactcaatggcgtgctggctctctgcaaaggtgtgtccacgacggatgcggcgcagggtatcgtcgttggctgtttctacaccatattccaccaacaagaaggttttccgattcagttcttccaaataatcgagcaactcctcactcatgcagtcggggcgcgttccgataacgatgcccaccacgtcttctaccctgagcgcctcttcgtacatcgcccgtaacgatgccatggaaccataggtgttggtgtaggcttgaaaataagccaagtatttcatgtcgggatacttgcgtgcaaaaaatcgcttgccttcttctaattgtgtcgtgatgcgctggtgagggtcgcagtacgaagggttaaaagtgtgattattacagtaggtgcagccgccagtaccaatgctgccgtctcgattgggacaggtaaagcctgcatcaatagaaatcttctgcacccgaaagggaaattgctcgcgaatccacgagccaaagtcacgatatagttgttccatcgtttgcaaaattacgcaaatatcgttatctttgcaatgctaatgatagaagattttttaagccaatgaaaaagatgatgacttgtgcccttatattgttaatggcacttaccacagcgaaagctacagagaagataaccttgaaagatattgccgacggtgcttttgctgccgaacggttgacaggcattcgtcccattccgggtaccgaccagtatgccagtatcagcaaagatgggcagcgtattgtacaatattcgttcaagacaggcaaacaaacggcggtgttgtttgatgtgaagcataccatgggttcgaccatcgattcgtttgacggctacgaactctcgcccgatggcacgatgatgctcatacagaccgctacggagcgcatttatcgccgctcgttcaaagccaactattatatctatacggtggcaagcaccaaactcgagccgctctccgagggtggcaagcagcaagtgccaacgtggtcggcagacgggaagcagattgcctttgtgcgcaataataacctccaccttatcaagctgttgtacgacaatgccgagagtcaggtaaccaaggacggacgcttcaacgaaatcatcaatggcatccccgattgggtgaacgaagaggagtttggcaccaaccgttcgttctgcttcaatgccgatggcaccaagatttgttggattaaatatgacgaatcgaaagtgaagagctattcgctacaactcttcaaaggctcacatcccacacaaatgcagtacgacgaatatccaggactgtacacctataaatatcccaaagcggggcaggacaatgcgcaggtatcggtgtggagttttgatgtgaagagtcatcagacgcgccagctgcaagttcccctggacgctgacggctatatgccacgcatcaagccaaccaatgaccctaatcgcattcttgtctatacgatgaatcggcatcaagacgagctgaacctctttgcggtcaatccgtcgagtacggtggcgacactgctgatcaaagaaaaggtgtccaactatgtcaaagaagaagccatggaaggcatcaagataggagaaaacaccctcctgttaccgagcgacagagacgggtacatgaagggctatctgtacaatatgaacggtcagctgttgcgtaccattggtcacggaaaatacgatattacaaccttttatggctacgacgaaaagacaggagatgtgtattatcaggctgccgcactgaatccacacgaccgacaaatctttgtgtcgcatcgcaacggtaaggaagagcggctcacccttcaagaagggtggaatgaagcactgttctcgggtgactatcaatattttatcaacacttggagcgactacgatcatccgtatgtttacaccgttcgtgaccgaaaagggaaggtactctcgacacgcattgacaaccgagcactcttggcgaagacggcaaaatatggttggacacccaaggaaaaattctctttcaccacctcagaaggcgttacgctcgatggttggatggtgaagcctgccaatttcaacccttctcatcgttatcccgtcatcttgttccaatacagcggtcccggtagtcagcaagtggtgaatgcgtggaaggcaggctcaatgggacaaggcggtgctttcgattattatttggcgcagcagggcttcatcgtggtgtgtgtcgacgggcgaggcacgggcggtcgtggtgctgcttttgaaaaggtggtgtaccagcgtttgggcgacttagagtcgaaagaccaagtggagacagcactttggttgggcaagcaatcctttgtagacaaaggtagaataggcatctggggttggagctatggcggatttaacaccctcatgagcatgagcgaggggcgtggcgtgttcaaagctggtgtggcagtggcaccgcccaccgattggcgtttctatgacaccatttataccgagcggtacatgcgcacgccaaaggagaatccggacggctatgcgctcaatcccattgggcgtgcatcgcagttgcaaggtgcattgttgatgtgtcacggtttggcagacgataacgtgcatccgcaacacacgttcgagtatgccgatgctttggtgcaggcggataaggatttccgtgagatttattacaccaaccgcaatcacagcatttatggcggcaacacccgtcatcacctgatgcgacaaatagcacagttctttcagcatgaacttaaataagtcacgcttaacattgaatatttttttttatatttgttgttaaaaaataattacccttgcaggagttgcattggttgttcaacaatatcaatctttatttattgttgtgcaatcgtgcggaaaatttgcgcatcatccttgctgttggtcgtgtggcaaggacgcataaaagcctaatttataacatttgaagacaaaaagagaggagtgagtactcaggagatgagttctcatcctttttttagcgcatagaaagagcagacgaacgagccacgccaaccgaaagcggcggaggtgggcataggtatgtaaaacgttggaatagcccacgagttctttgcggtattgaaaaagggtgtgcattgcctcttctgtcttggcgagaaagctgcagttcgactcaaacgtgccgaagcctacgggattgtcgatgtgcagaataggaatgcctgccgtgcgcaaggtctttccaaacagcacatcctcatagccataggtctgtatgcgctcgtcaagggggtgcgcttccatgacccactttgccactaaaaagttggaagtgttaaactgctggtaaggttgtttgttgcgttgggtggcatcgtgcgtttgttctgccgctttttcatagcgatatttcagggctccatcgtgcggcagcctgtcacgctgcacgcagttgccaccatgaaccaccgttgcttcggggggtgcttgcaggtatcgttccaagaaatcaggactgacaatctccatgtcgctgtctaagaaaaggagccaccgatagcgtgccatggaagtaagaatgttgcgtattttggcacgtcccacattcgtttctctacgcacgaaccgtgtgtttcttaactcattaatataagcagcttgaagtaatacttcagggcggttagatgcatcatctaacacgattatctcatagcttaaacccgacaagcgcatggcttgttgtgccaagctgttcaccagttctacacaacaatcgttgtaggtgggaatgaggatagagagttcggtgcgattcatgtttcaagtttgcgctgtgctttgggtggttggtgttggctgttgttaggactgtgctttgtgcagctcgcgcttgagatattgccctgtcacgctgtctttgcatttcgctatctcttcgggcgtgccagtagccaccaagttgccccctttgtcacctccgtcgggtccaaggtcgatgacatggtcggcgtactgaatcacatccaagttgtgctcgatgacaagaatggagtgccctcgattgagcagtgcgtcgaatgccgacagcaaacgcttgatgtctaaataatgaagtcctgtggtaggttcgtcgaagatgaacagtgtgggttcctgcttctcacgtccgatgaagtaagccagtttcacacgttggttttcaccgcccgagagggtagaggagctttgtcctaatttgatgtatcctaatcccacatcatagagtggttgcaatcgggtgacaattgacttctgttgtagcgcatcgaaaaactcgatggcttcggcaatggtcatgttcagcacgtcgttgatattctttcctgccacacgaacgtccaacacatctttcttaaaacgctgaccgtgacaagcttcgcattctaattccaaatcagccatgaattgcatctccacggtaatgatgcctgcgcccttgcactcctcgcagcgtccgccttcggtgttgaaggagaagtattgtgccgaaaaacctaattgttttgccaatggctgttcggcaaacagttgtcgaatggcatcatacgctttgacataggtggcaggattgcttcgcgaactcttgccaatggggttttggtcgacaaactccacgtgctggatgtatttccagtcgccttctaaggagatgtattcgccgggctggtctgccacctcgttgagatgacgtttcaatgcagggtagagaatgcccttcacgagtgtagattttcccgaaccactgacgcccgtaacagccgtaagcacgttgagcggaaagctgacatcaatgcctttcaggttgttttggcgtgctcctaccactttgatagcatggttccacgaccgtctggaggtgggcatatcaatggtctcgttgcctgtgaggtattgtatggtgtgcgaacgtggatatttgcgtgccatttccgcaggatgttgcagcacctcttggagcggtccattgaacacaatctcgccccccaatcgtcctgcatcgggacccacgtcgatgagggtgtcggcagcgcacatcatttctttgtcgtgttctaccaccatgacggtattgcctaaggcttgcagctttttcagtatctcgatgagtcgctgcgtgtcacgactgtgcagaccgatgcttggctcgtccaagatgtagagcgagcctacgagcgagctacccaatgaggtggtgaggttgatgcgctgactctcgccgccactgagcgtgttcgactgtcggttgagcgtgagatagcccaagcccacatcgaggaggaattgcaagcgattgttgatttcggtgagcagtcgcttgcctatttgctgctcgtgttcatcgagtgtcagctcattgaaccattgcttgaggttgacaatgggcatttccaccaagtcggtgatagacatgccttgaattttcacccaactggcttcttgcttcaatcgtgtgccgtgacaggtgggacacacggttctgcccctgtatcggctcatcatgacacggtattgtattttgtattggttttccttcaccatttggaagaaggcatcaatgctcacttggtcgtgaatgtccttttgcttttctgagggcagtccgtgccacaacatgtctttctctttgcgcgacagttccagataaggtttgaaaatggggaagttgtcttgagcagcccgtcggcaaaattcgtttttccattcgcccatcttctctccgtgccagcattgcacacaaccatcgtacacgctgagggtggtgttgggaacaactaatttctcgtcaatgccaatgatgctaccaaaaccttcgcaagtagggcaggcgcctaagggcgagttgaaggaaaagaggttgtcgttgggttcctcaaacttcatgccgtcggcttcgaagcgtgtagagaattgataggtgatgttggaagggaagaacacgagcatacattcgccatgcccttcgtagaaggcggtctctgccgaatcggttaatcgtgaaatggtatctttgtcattgttcaccgataggcggtcgatgaggaggaaaatctggtcgagggggatcgccttgagtgccgccttgtcttgcaagaggtcgtcaatgcgcacaaactcgttgttcagccacagtcgggtataaccctcttgtatctccatttcgagttgcttctccagtgtccgcccctcgatgaggtgcaggggtgataccactgcaaacttggtgcctgcggaatattgcagcatgcagtccaccaagtcgtcggtagaatgcttcttcacctcttcaccgctgatgggcgaaaaggttttgccgatgcgtgcaaacagcagtttcaggtattcgtatatctcggtcgaggtgcctaccgtgctgcgcggattgcgtgcaatgacccgttgctcaatggcaatggcagggggcagccctttgataaagtcgcattcgggcttgctcatgcgccccaagaactggcgtgcataggcagagagcgattctacatagcggcgttgaccttcggcatagagtgtgtcgaaggccaacgaggatttgccagagccggaaagtccggcaatgacaatcagttgattgcgtggaatacggatgctgatgtttttcagattgttgacacgagcaccctttatttctatatcttcgttcatgtttacgagttcatcgacaacagaaactcttcgttgttgcgggttctcaccatgcggtcgtgcagcgtgtgcattgcctcgacggggttcatgtcggcaatgtatttgcgcaaaatccacatcctgtcgagtgtggtcttgtcttgcagcaagtcgtcgcgtcgtgtactcgatgccaccaagttaaccgctgggaagatgcgcttgttggagagcgagcgatccagttgtaattccatgtttcctgtgcctttgaactcctcaaaaatcacttcgtccatcttgctacccgtgtcgatgagtgccgtggcaatgatggtgagcgaccctccgccctcaatgtttcgggctgcaccgaagaagcgtttgggcttttgcagtgcgttggcatccacaccaccggttaagaccttgccagaggcaggactcactgtgttgtaggcgcgcgccaatcgagtaatagagtcgaggaatatcaccacatcgtgtccacattctaccatgcgtttggctttctctaagacgatgcctgctatcttcacatgacgctcggcaggttcgtcaaaggtggaggcgatgacttctgcattcaccgtgcgtgccatgtctgttacctcctcgggtcgctcgtcaatgagcaacatcatgagataagcctcggggtggttggcagcaatggcattggcaatgtctttcatcaagatggttttacctgtcttgggttgtgccacgatgagtgcgcgctgccccttaccgataggtgagaagaggtcgacgatgcgggtcgatagatttgtggtttcgcgatcgccgcaaagtgtaaacttctcgtctgggaaaaggggtgtgaggtgttcaaactggatgcggtcacgcacctcgttgggattgcgcccgttgattttgtcaatagtagtgagtgggaagtatttttctccatcgtgaggtggacgtacacggcattgtaccacatctcctgtcttcagaccgtatttcttgatttgcgaactggcaacgtagacatcatcgggcgatgagaggtagttgtaatcactcgagcgcaagaagccatagccgtcgggcatggtttctaacactccgttggcttgtatgaggtctgcaaaatcgtatgcaggctgattggcattggtcatgggggtgggggcttggtatgaagtaggaggattgataggagtagtggggttgtctaacatgtcaaagttaggcactgcaccttgatccataatgggcaggtcttgcacgatgataaagtcggtgccgtcgccggggtcgccttcccatattccctctatgacattctctctgtgttcttgtgcgttctcgttgtgtgcatctactttcgcctgtaattgtgccaagagattgctcatcccttgctctttgtgtggctcttccgatgcggcagtggcgctttcctcgggtatcacttcttcttctttttcttcaggaatggcattgtcctcctctgtgaggggagtgtcagcagacttttcttcttcctctttctcctctttcttctcttcctctggggctgtcgctgccttttctttgtttttggcttcaatcatcgccaagagttcaagttctctctttgtttttctaccacggtgcttgggcatggcagccaactcttcttcgggcgagagtgcaggcgtttcatcatctgcgggggcttcttcctccaactggtccttaaacagggaaataggttcgctgacaggtctgtttttctttaggtcaaagttttcaccctccttgccattcaccgaatacactctgtcgatttcgtgcttagcaatgcggactctcttgcgcttcgttcctgtcgaagcactgttgtcatcgtctgcattttgtttctcgagtatggtatctatgagttgttcgggcgtttgtgttgcatcaagatttgcacccaattcttgtgcgatatccgtcaattctcggacatccttagatgataattcgtctttgctatacattttagtataataagtgttgattgaaatagtgtcgtttcagaacagaaacgagcggtatgttttttatttgatgcaaagatacaaaaaagttgacggctatggagtggggcgaacgtattatttttaacgtttaatctttgttaacatctttgctcctctgctttcagtggttcgccaagttcctcgtggtcttgttggaagtaaaaaccctcgcacaggaattagagttttattcgttttacaaaaatatccttgtttcaacctcacaccctgttacgatgcaacggacgaatatttttatcgtagcaacggaatagcacgaaccgatacggacgtgtcgtgaaaacgcatgaaattttgttgtgtcagacagtacacccaacgaacaaagaaaattatgtgtattgcggcagatatggttacggtcaaaggaggggcgaagccaacaattggaatacagcccagtgcaatgtgcagcagccaatgttacaaccaaagacggggaaaagccccaaaagcacacagcccaaagcaatgtgtagtaaccacaatacaggcaataaggggcgaagcccgcataggaaaataatccagcggaatgtgcagttgccatggttacaagcaaggacggggcgaagccccaaagggaatacagcccagggtaacaccctgggtgtaagttcattaactaattggcgcgctgtaagcgcaacaggagccagtgaaatgctcactcgttctccttccttttgctctttcagagcgcaagtttgttggaatctctttacccagggcgctgccctgggctgtattcttattgggctttcagcccgtctttgctctcagcatcaacaggcgtacgttaccacagttatgcgtctattgggctttcagcccgtctttgctctctgcatcaactgttgtacggtgtcatggttatacgccttatagggttttggcccgtctttgctcgcaacatcaactggtgtatagtgttttgggctatgcgctgttgccccttcgggacgtaaatattgcttactaatttacatttgttaataaaaaatgctttgctaaatttgtgtcattcgttgaacgctggcgttcattgaatttcaaagaaagaaaaattcgtttcttttgtttaattcgttgttaaaaataatgcgccagtgaaatagttgtgacgtggtgtgggagagtggggggaataaaaaaaggccgattcgtgaagaatcgacctctgttatgattgcatcaaacaattatttgtctgaactttccatgtcggctttcagcttagccaagacatccaagtcgcccaagctggtaccagctgccacattgttaatagctgcggcatcgttttgcttcttgttggtgtgctttggtgcagccttcacttcttccttctcatcttcgaacgtacgactgtgagagaggatgatgcgcttggtatctttcacaaactcgataaccttgaagtcgagttcttcaccttgttttgcttgcgaaccgtcttcttttaccaagtgcttaggtgtagcaaagccttcgccaccttcgttcaaggtaatcacggcacccttgtccatcatctctgtaatcttacccttgtggatagaaccgggagtgtagagggtttcgtaagtgtcccaaggattctcctcgagttgtttgtgaccgagtgacagacgacggttctctttgtcgatttcgagaactactacctcaatttctgcgcccacagtagtgaattctgaaggatgttttaccttcttggtccaagagaggtcgctgatgtgaatcaagccgtcaacaccttcttctaattctacgaagataccgaagttggtgaagttgcgtaccttagcggtgtgcttgcttcccacaggatatttggtttcgatatcctcccatgggtctgccttgagttgcttgatacccaagctcatcttgcggtcttctctatccaaggtcaggataacagcttctacctcatcgcctacgtgcatgaagtcttgtgcagagcgcaagtgttgactccaagacatttcgctcacgtgaatcaatccctcaacacccggagcaatctcaacgaatgcaccatagtctgccataacaaccactttgcctttcaccttgtcgccaaccttcaagtttggatccaaagcatcccatggatgtggagtgagttgtttcaagccaagggcaatgcgcttcttctcgtcatcgaagtcgagaattaccacatgaatcttttcgtctaatgaaaccacttcgtgtggatcgctgacacggccccaagacaggtcggtgatatgcaccaatccgtctacaccacctaagtcaacgaatacaccgtaagaggtgatattcttaacagtaccctcgaggatttgtcccttttcgagtttgctgataatttctttcttctgtgcttccaactcagcctcgatgagtgccttgtgtgaaaccactacattgcggaactcttggttaatcttcactaccttgaattccatggtcttgcctacgaagatgtcgtagtcgcgtataggatgaacgtcaatctggcttcccggtaagaaagcttcgataccaaacacgtcaacaatcataccacccttggtacggctcttgatgtaaccctgaatcacctcatcattgtcaagtgcttcattaacacgatcccaactttgtgtaagacgggctttcttgtgagaaagaaccaactggccctttcggtcttcttggttttctacataaacctcaaccttgtctccgattttgagatctgggttgtaacgaaattctgaagcgggaatgataccatcgctcttgtagccgatgttcacaatcacttctttcttgtcaatcgagatgacagttccttcggtgacttgatgttcactaaccttgtttaaggtttcgtcgtacatctttgccaagtcatcacagttggcgtttacgtttgttccattttcgaactcatcccaattgaagtcctctaatggctgaacgttctttaagtttgacataaataataataaatgtttaaaaattaataaagttagactttatgtgaattaaataaatcgggtgcaaaattacgacattattatgagaggtgaagatggaacgaaccgaaacctccgtttcttaatgttttttaacgaaatacgtcgctttgcgtgtcatcatccatggcggcattgatgttttaatgtgcctcaaatgatgccaccaatgcccttgaacttctcaatgaaggcggcaatcttctggaacacactctgcttcttcgtcagatattgcggattgagcggactcatctttggcagaatggcattgaggtctgttccgttttcactggcaaactcacgcttcagcgatgtttggatataccgcttggctgcgtccacattcagtttctcttcctcaatgaggtttgctgcctcttccttctgtcgctgctgtgcataatcgaagaaggcagaaatgatgcctgccttgtcttgaatagggtcaaggtctgtgtcgtgaatgaagtcaaccaccaatccctctttggctctgttgccaatactcgagcggatgattctgcgcacttcgtcaatcaatgcgtctttatcttttgttttctggttgtgttcaaacaccaattcaaggatatagtcgagatctatttcctgcgatttgagcaagtctatctcaaacaccacatcgtcccagtcaatcttggattcctcagcggctttcccctctcgctcctgtctgaaccagtcacgaatatcgttgtaggtggagcgataatcttgctgtcgtctttttcaatattccgtttcagtcctgccgtgctttccgacccattcacgctgtcgggcgagaaccgttggtactctttcatggtttgaaagtccaaatccttgcggtcaaccacaaaaaacaccttatctataaagtcaagctgggttgccaatcgagctgccttgaagctggtgagcgtcttgcccgaaccggtggtgtgccagatgtagcctcctgcttcgggagtgctccacacctttgcttggtacgaacttctgattttccatatcaatcgctcggtggcagcaatctgataggggcgcatgatgagcaacgtgtcgctggtgtcaaacacagcgtaggagagcagcacttgcagtagggtattcttttggaagaaggtggctgtaaagtctttcaggtctttgatgagcatgttgtccgcctttgcccagttcatcgtaaagtcaaaacagttcttgttgcgcttcacggtgttggcgaaatagcgggtgtcggttccgttagagatgacgaatatctgcaaatatttatatagcgagctctcgctgttgaagctctccttactgtagcgatgcacttggttgaatgcttcgcgaattgccacgccacgtttcttcagttccacctgcaccatgggcagtccgttcaccaagatggtcacgtcgtagcggttggcttgtgtgccggtctgttcaaactggttgatgacctgcaccttgtttcgggcaatgttttgcttgtccaccaaatagatgttctgaatatgcccatcatcgaatacgaagtcgtagatataatcgtcctgcaccttgcgtgtcttgtccacaataccgtcgctggctttgtccaaatattcgtccaagaagcgttgccactctttatcggtgaagacggtgttgttgagcgtttgcagctgtttgcgcacgtttaccaacaaagcctgtggcgttctgatctgtggcagatattcatagccttggttcaccaaatcttctatcagctcacgctctaaggctgcctctgtttgatagcctgtgggctgctcgccaacttgtgacagcttggtgtagctgtctaagacaatgaagttttgcaattctgcaatggtgttgtaggtggtcatgatgatgttgttttttttgttgttgttagctgggggtgtatctaggtgtttctatgtgtttataggtatatataggtgttcctatgtttccctagtcattcctagtctctcctagtcttccctagtttctcctagtcatccctattctctccttctaaccgtttgaggcgttctttaagcgcctttagctcggctttcaattgttcattttctctcagcagaagccttctttcctcgtcttgctgctttcggtagcccgtgcgtgccgcatacattcgttctttgatgcccccttgctctacaaactgtttctccaagctcttcaggaaagaacacatgagtttgtctgtaatatggcagagggttagcaatgcgttgcaaaactcttctgccgtccagcgttgggcgtaaggcagataatctttgggctggttgtgcgtcttgcagaatgcgagcatggcgttgtatctgttgtgcttctcgttccatagtgcaaggtggcgtgtatgcaagtagtcagcgtaatcttcgcgcaactcttgcaatgatgcacgagccacgttcagcagttttagttccatctcagaggatgtgttaccgtcttctattccttctacgatattttgttttcccgaccgcgccgcttgcaccatctggtctaccgttctgtcaccgtatttaggtaagaaccttgtgcagaagatgtatgtcagctgatagatggtgtcagttttttgatagaaaaacaattctttgtaatccttgtactttctaataaccgtagtttcattagccatgatatttttcttttatggtgtgaatgacagcagttggttgcggtaatactcatactgccgcttgcggcagtccagctccgcttccagctctgtgaacttatcaagaatctccactatcctatgttgaacggaaagaggaggaagggggatttttatattttctaatactttattatctaaagtaggaatccccgctttccgtacttttgatttgataaatgtttctatgttctgaagccaataatacaaatatttttgatttaactgttcgttatgagaaaaacaaaaacatccatcagaagaccaaaaatcatttgcgctgtaaccaaccgttcctgcagatgcacccacattgataatcattgtagaatttgcctttctgttagattgattataatatccaattggttctatgccgccatgatatacaggataaataccatttatatctaaatctcttttggttaatcttttgcctcttgtcaaactgcacacttcccccagctttttccactccacgttttccccattgagcagttgttctataaagggcattgtttctttattcttcatcgtgctgtgtgttttgggttaatagctgcaagcataaaaaggtttgcggacgaattttttgaccgcaaaagttctacttccttttttgtcatctgagtagttcaagcgaagaagttgctctgtgtcagcaacatcggtcatacgcatcttgccatcagcagcacgcattttcaaagcgtgacaatttgtcacggtttcattgccctctgctttcagacgttgtttgagctttctccaatacgctgtaggatcaacgctgtctgtcagcacagcaataacatctacaatagaaaaataccatttctcttcttctgcgtcccaatgggagcgaacttgcttgttctcaaatttcattaattctttcatgcctctatctccttgatgattttattgatgtccgcccgcagtgcgtcgatgcgctccaccgtttgtgccacttcctcgttcagcttcacaatgtctatcacctcgcgcatgtcctccgcctctacatacgtgccaacggagaggttgtaatcgttctcggcaatcgtgttgttgtccaccgatgtggcaacatgctccacctcgtccttgttgccaaagatgccgacaatgtgttcgatgtgttcgggtagcaggatgttgttgttggtttctttcttaaagaagtcttcaccgctggcattgataaactgggtggtggggttcatcttatgcttggagagcaccaagatgttcacggcgatgctcgtgccgtaaaacagattgggcggcagggcgatgaccgtttccacaaagttgttgtccaccaaatacttccttatcttctgttccgctcttccacggtgtttcccaaacggttgctcgtggtgtcgaagtcggcaaagagtcctttgatgtcatgttccgagtcgtagccgttggcagaactctctatagcatcgaagatagccgccaagtccgtgttcaagttcggattgttgttggctcccttggcgatgttgcaaaacagctgactgggataaataaagtatcctttggttttggtggcatcatcctttatctcgggcgtgatgacgtcatccggtagatgaacataatccacgctctcgtcgccagcctctatgaaggtggtgaaatgctcactgatgaatcgatagaacagtgtacccaatacaaactgcttgaaatcccagccatctacggcgccgcgcacctcgttggcgattctccagatggctgcctgcagttcgtccctttgttttgtgtttgtcattatgctgaatggtttatattatttcatttatctgcaaaaatacaattttatgacgtgaaacacgaatatttttccgttgcatgatgtctatttcataaaagttaccaccatatttaatatcattcactgttgctctccaaaaagtgagaaatatgattatcgtcatatcctcataaatgaggataaagacagcgcaaaatagtatcctcataaatgaggattgcaaaatatgaaaaaataaatcataaaaaataggtattgtagtgttcggaacataccgctaactttgcattcaaaatttatttaattgattatcaaaatgaaaatagtaaggaatttagcattgccagtattggcattttttgtcatggggcttgcctcatgcagcagtgacgatgatgtagttaagtacagcacgaacgccctgaagaacacggagttgatgaacatactgaagcagaaaggctatcagtttgacaaagacggcaagttggagctcaacgacttggcgaacaataccacctcgcttgacctgagcggcaccaagctgaaagatttgagcggccttgacgtcctgcccaacctgaaagaggtgaaattggccaacaacggatatggacctgttttcgactttgccaaacttccggcgcaggttaccggcgtggatttgacaggcaacaacatttatgactttgaaggactggtgaatgtaaagacggaagagaatggtgatgaaaccgtaacacagctgcacaaaatcacgaaattgtacttgccacagacggcaaagtttaatatcaaagaccttgtgcgtttctatcgagagaagaaggctgagattgagtctggcagtatagacgtgaagatggaaacagcaaaaggcgacttgcagaaatacaataccattcgcgagatacctgatgagaatataagggctaatttcaaaaaatacttttccagcatctttgatgaagacggtattcatattgacatcagcaagcggttaagcaacaaagaaaggtcgaatgcctgtgtatttaataagtggtatggagttgccactgctacaacattggaaggggtacaatatattgtgaacaatccttattgggacggcaaacttcttactgtaaacctgacaaacaaagcgaaactcccgtacctaagaccctgtagcggtctcatgaccttgtcattgacagacgtggatgcctctgaaggcatcaattttgaggatgctacaaacatgacaggtttcctatgggtaaaggttagcggtattagcgaaatagatttaagccatagtaccctgtttggtcagagagcaattgaacaggaacaggatggtcccggtggttcctcacttgtttttgtagaatgcccagatttgaaaaagatagctttaccggaaaaaagcgggttgcgttcttatatgataacatttgcaaatatgaagagtatagagcaggtagatttgtccaaatttaagatgatatccaatttggaacttggcggtttatctgcgaattgtcgtgttacctatccggaattgacggaatttcatacctacgataaaaaaacttcttttgcgtgtacgcaagacgtgtttgacagacaggaaacaaaagactttatcaagaagtatctcaaggtcttgtccagtggtggtggcttcatagatggagttgaatggtcatcactaattaataattaacaaaacacaaaaaagatgaaacatctttttatttctaccgtattgacggtaatgagtgtgtttagttttgcagccaacgcaagtgttcaaaactacaagggaacgttgtcaaatgttaccatgaatggaaagcatttcaatgatgtgcctaatcagatatttgtccaggacacttatgcgagctggcaggccataccaacatttcctgcatctgtaacttttgatgggagtttttagttatgatgatgaaaaagtttgttacgaatataagtttattttgccttattgcagttctttttgcgggattttcttcttgtagtagtgatgagaatttagaacagaaagatccgatagaggaatatttcaatgaggcaaaaaacatcttgaatggtgagattattttgtctaccaaagctaccatgagtggggttgacaaaacattattaccaaatggatgtcctactaaatttagttttgtttggttgaacgataaaaccatgaaactttcactcgatggttttaccgtgggcaatatgcctttgacaatttatttcttatgccaatgtaaatttatgcagctcaattcttgggagaaagatgagtataaaggcgatggctggttaaagttcagaggcaaagacggtcaagttactggtgatcctaaagataaaagtgggatagaaaagggtagtggagctaccgttataggatacttgaatgtaaaaactcatgagataaatttcatcgtaaactataacttgatgaatgtgcgttccgaatgtttcttacagactatcgacaagaaccgtatcaacaattacgaagccgagtttgcccaatatgagaaagatttggcagcctacaagaaagaacacggattgtaatgtaactcatgtgatgataataaaggaagtaagggtgtgaacacttttactttctttatttaagaagaaaaaaatgatgcagaagataaggtttttattctttctcctttgtctgtttgcagcgacgagcatgcgagcgcaacgacaagtaagcatgaccattcttgagaaagacacgcagcagccattggtgggagccaccatacaatattccatgtacaaggagatggaggctccgcagtatgcagtgacaaacattgacggcaaggcgatgttaagaacagagaaaggaaaggaattatactataacgttcacgcaacaggtttcgtgtcaatcaaaggaagtgtgccgccacaggaaaacaacataaagattgttatgcgcgaagacgtgctgcacctgaacgatgtcgttgtaacaggttcacgaacagagcgccccgtaaaactgtcgcccatcaccacacaggtattgggcggaaaggcactcgttgatgcaggctacagcgacctgcagcacgccttacagcaagagacaccaggactcaatattcagaaagtgggtttcggcaacgaaatctcaatgcagggactggacgcccgccacgttctctttttgcaagacggcgagcgtatgacgggcgaaatggcaggcaatctcgactacgagcgtttcaacctgcacgccatcgaccgtgtggagatagtaaaaggagccagcagcacgctttatggcagtcgtgcctcgggagcggtcatcaaccttatatcgaagaaaaccaataagccgttggacatacaaacgggattgcgttgggcgcagatgaatgaacgcaattatacaaatccaagtccaaaggattttctctatatgtttgagaagaacagcgaccgtcccaacttgcaggcgtggctctctgctggagtgagacacaacgcctttacctctcaaaccgatgtgttgtacagcgtgagcgatgccttttacatgtatcaggcagaaaatgacaacaaaacttatacaaaagaagctaaccctttcctccctcacgatattacactgacaggcattgctgctcggtctcctatgggaattgaaggaacggaacatgtctcggcagcgcaaaagttgtattacgaacccaataaaaatctgtcggtacaggtctacggttccatgtttttcatgaattcatacgacctcatacaagacatgactttctcacagagccgtgatttcatggctggaattaaagccaaatatacgataaaagattggtttaccgtcaatcttagccttcacaacgatttctatgaccggttcaagcgccatgagcgcatagacatacgtaagaaagtgtatcagagtaagatattccaaccacgtttaacattgacaagtaactatttcagtggacacagcataatatttggaatagaacacaccacggacgaacttaccagcgaccgttttgtaaaccgtaagatgaccacacgagcactgcacgagacagaatacttcttgcaagacgaatggacggcagacaaccattggatgttgtcgacaggcgtgcgtaccaacttctctaaagcattcggatttatgtatatgcctaagatagctgtcaaatattcgcccgatgaacattgggcagtacgtgccaactactccatgggttatcgagcacccagcattaaggagctgttttttaactgggatcacctcggcatgtttcagataaggggaagtgaagacttgaaaccagagaagaatcactattgctctttgggggcggaatataccaacaaaggctttttcatgaacgtcaatgcttatgccaacttctttcgtaaaaagatagaaggcgtatggcgtatttacgatatgcagtacaacttcgagtacaccaatctcaacagtcagcgtctctacggatttgagacaatcctcaaatggcacttcctcgaccgatttaccgtcaacggaacctatagctatgtaaacgtgagcaagcaaaagggcatacaagtaaacaccacatcgccacacgctgcaaccgcaagcatcgactacgtatataacaagcccaactatcgactgaaaactattttcagcacatctctcatgggcgagaaaaacttcgatgtgcaagaccgtgtatgggtggaagaacaccgtaagagttacgatgcctatttccgttgcacattgccaacctatacaatttgtaatctgtcagtggtgcagacgttctacaataaagtgaaggtgacacttggcatcaataacatcttcaattatataccacacaccttgggttcgggcattaccatgtttaatgttcctgccacctgtggtgcaaggggatatatacagatggagtttcttgttgatgacattgtaaaatcattaaaaaggaagaaatgagaagacaaatatccgtgttttttgttttgacaatgacattgtccgcatgtgtgaattatgatgctgaggagtttacaggcaaaacgttgccaagagtgacgggatacaccactggcgttaccaacgattggctgtacatcaatttgcgcactggcactatattcaatcttgataaacccaatagcgacatcaaggaaggagaacagcgcaaccgcaccgattgggacattgccttttgcggctaccgtttgcgaaccaacagtggaacttctggaaaaggcaaaggcggtgctgccgacttaggttacggcagctatgatacatggagaacggtaaaacagctgccaaccaatttacaatgggcggtggacgaccattcggtgagtatcacaatgtcgcaaaatgattggaacaagtatctcatcgccaacaagcttgattttaagcaaaatccttggttcgatcccaatcgtggtcctgcaacgacacaaaccaatgctaatcccatattggcaaaagcaatgacttttactggtccaccgcctgtctatgctccctcgtttcacacctatgtggtgcgcactgccgatggacagcgatatttcaaactacagattatcagttggtacaaagccgatgttgaaataggtgatacgggcggacaaataagttattattgtgatgaactgaaataaatattgaaatggaaaataaaaagaaaatttactggtggcgcaccatcgcctcatttttattggtgctttttgccatgcccttgggtcatgcgctgatgatattgatggagaagttcatggacgaaggagccatgcacgttgcagggtttgcaatgggtttcgtggggcttgtcctcgttatcgtcggcgtgtttgtgaagggtgatacccgacaaacgctgtggggactcttcggtggactgcttttctggacgggttgggtggagttcctcttcctgtattatgcccgacgttatggcgtaccgcctgagatagagaatggcgtggtggtgacaaagcccgaataccttatcatgcctgcctcgtttggcttgtggatgatggtgatgaccatgtatgtgttcagcacaaagaacggctgcgacctgattacatggatacaaaaggtatgtttccgaagcaaacgcaaggttgtggtggtgcaacccatgacgcgccacacgagcatcgtcacgttcatggaactgaacatgattctttgggcaatgtacttgctgctcatgttctgctacgacaagactttccttggtgatcatcaccccgtgacgttccttgtgggagtggggtgtctcgtggggtctatcttcatgtttcgccaccaactgcacatcgctgcatggggcgcaaacatacgaatggcgattgccaccgtcatcatcttttggacacctgtggaaatattgggaaggatgaacttcttccaagagttttgggtagagccggagaaacacgcttggcaaatgcttgtcatcctcatggcttttattttgttgggtgtttatctttggttcaaaggcaaacaacgaaagagagtagagcaatgatgaagggagttggaatgaagaaaacaacatggagacggcagcataaatggttaggaattatcttgactccgttcgtcatactcttttgtctctcgggaatagtactcaatcatgccaagttgtttcaaggcatcgatatcagcaggacactgttaccctcagaatatcgatatagtcagtggaaccaaggattgtttcgtggtacgcagaaatggagaaccaaggtgttgatatacggcaacgctggcatttgggcgaaagagaaggatgccgacacgataaccgactttaaccgcgggttgcccaagggtgccgacctgagaaacattcgtggaatgacggtcatgcccaatggctgtttgtacgccatgagtcaacgtcatttgtatcggttgaacaaccatggcgtatgggaacaagttgatattcttcagggtaagcacgaaaagttgagcgatattacacagaagggcgactcgctcatcatcacgggtcggtcttacgtttatctgtctcgttatccttaccacgacttccaaaaaatcaccttgacgaaaaaagacaatgaccaagggaaggtttcgctcttccgaacgatatggcttcttcatggaggcggactgtttggtatggctggcaagctctttgtcgatgcggtgggactaatcctcttgtttctctccctgtcaggcgtatattattcctttgcgcctcgttcccgttcatcgttagtaaaacgtacgaagcgaggactgataacatggcacaacaagttgggacgaggggcgatgttctttctgttgttgctgaccattacaggctggatgctacgaccgcctgcgctcatagccatagcctctggcaaaataccgcccatacctttttcttccatggatagcgacaacccatggaatggttgtctgcgctcgctgcggtatgataaggataaagccgactggctgttgtgtacttcggacggtttctattctcttcgtcatttgggcagcacaccgcaaagagagaaggtgcaacctcctgtgagcgttatgggcatcaatgtcgagcaacacactcatcagaacacatggctggtaggttcgttcagcggcatgtatgtatgggatagagcgcatcagaccgtcaccgactatttcacgcatcaaaaggtgcagtctgtgagtgggaatccttttggaagtcatgccattgcaggcttttcatcagacttggacgatgcgggcatggtggtggattacaagaaaggaaattctcgccttcgcatgcccgacagcatgacaacgctgcccatgtcattacgcaacgtttgcatagaagtgcacacaggacgcatctttacctttttgggcatggcgtctctattttacatcttcctcatgggcgtggcttgcgtatggtgcctttggagtggttggaagatatggcaaagaaaacctcattgagtttttattcttgcttctttttcttcatccattcctccttaaacagcataatgccgttgattccttgtacgatagtgacattttcttcatcaataacagttgttatactcatagctttatgtttttggtggttgatgattcgctttcagcgcattctttttgaggtttcacacatctaaacaagcaggcagcgcccattgtctcagtcagcacatcttcgccatacatactccgaaggcgtctttcggcttcagcgaaggtgtcatatggagggtggaaaaatccttttctctccatgacttttttaaccaataaatcagccaatcggcgttcacccttgacataaaagcaaccgcagaagaaaccaccgggtttcagcacacggaaaatctcggcaaaggctttctctttatcagggaaagcttgaaagccgttcattgacagtacgcagtcgaagaattcgttggcatagggaagttttccgacatctccttgtttcaaagacaggttggctatctcctccgtttctttccgtaaagccgcaatggctatcatttcttccgaatagtctaaaccaacaatctgggcatctttcatctggcgatacatctccgcagtaaaaacggcagtgccaacaggaacgtcaagcagtcgtccttgaaagtcgttcggtataaaatcaagcactttctgagccaagagattagtgtcctcgtcccaaatcagtcgcatgtatagccttgaccaccattttcgtcctgtcaacagatcatcataatgctccatcattccttggtaggaattactttgtctgtttgtcattatcttcttgtcaaaaatgtttatttcttattttgcaaaaatacaatatgtgcttcgttcttgcaatcgccaaaaatagtgatttttatttcgggtattgggtgtgaggttgcaacaaggatatttttcacaacgaataaagcgaaagcgaatttttcaacaatataaatttgttttttggttttattcgttgttaaaataaaaacttatggtttgtttttgtagtgaggcaaatgctgcttttgtcctataaagttaccaaaaaacagctgtctaaaatcttcaaaatagaaaaaaataataggcaaacgacagacaaaaatgggctgattttaacaaaacaaacaccaaattttgttggaacaatgctccaacgagcttggaaacatgtaacaagggcgttggaaacatgtaataacacccttaatacctgcaaacagtgagcttagaattatgcttcagcgaacaaaaatcgggaaaaacgggaagaaaaagaaaggcaacaatcgtaaggtgtttaataacaacgcattacgaacatcgctcatatttggcgtatttgccaccaacagtgccgctggtggtctacacgcgagttctgagaggtactttgtaaagaaaattcagcatctttttgatgaagagacgcacctaagtttgaccatttcctttgttccactcgtgggttggttttcgtgccttcgattgagaaggagcgagggtacactgccccatgacttatttggagcgcacaaacaccaactccttgggcagcttttgccactttcggttgcgtgcaatcttgatacgactgccgtctatctgcttgagtgtgaaggtgttgtcgctgttcttggtgagcgtcgccaccaagtcctcgctgccatagtcgttgatgatttgcaaggtggcaacgttctttcgaattttggcagaggtaaagagccatttgcgggagtcgatgctgtctcccaagaaccccgacatcgcgcccaataattcttgtcctggcacttcgatgttattgtcgtaaaaattcatttgtatatagattctgtactcggcgttgccaatcctcccctgaaagggctttgcagcctgttgttgtgccatggctccgagcgtgcagagccataaagccagacctgttagtatggttttcatcatcttgaaatgtttggttgttgcaaagttactgttttatatcaataaaagcaggttttttaagatattatgaacatttatgtttggtattcaccttttttatattatctttgttgcaaaatattcaactttaatgacaactaacgagttacttcccgattatctttttgagtcgagttgggaagtttgtaataaagtaggaggcatctatacggtgctctcaacacacacaaaaacattacgagatctgttgcaagatcgtcttatttttatcggtccggattgttggaaacaacgtccatgtccgtatttcctacccgatgattccctttttgccacttggcaacaacaagccaaggaggaaggactccgtgtgcgattggggcgttgggatattccgggaaagcccattgccattttggtggattttgagccgttctatgctcagaagaaccaactctatgcagagttttggaacctttatcaggtggatagtctgcatggctacggcgattatgacgaggcatcgatgttttcatatgctgccggaagggtagtggaaagcttttatcgctcccaactgaatgctacccaacgggtggtgtatcatgggcacgaatggatgacaggacttgggctgctgtatgtgcggcgacatgtgcccgaaatagcgaccgtctttaccacccatgccaccagtatagggcgtagcattgccggaaaccacaaaccgctctatgcctatctctctgcctatcagggagatcagatgtcgagagaactcaatatagagagcaagcactcggtagaaaaacagacggcacaccatgtcgactgcttcaccaccgtgagtgaaatcacggcaagcgagtgtgcagaactcttggacaaaccagtggacgaggtgttgcctaacgggttcgaagactcttttgtaccacaaggagccgcctttacacgtcagcggaaagctgctcgacagcgattgctacaagtggcaaacgctttgatggggcatacgtttggcgatgacaccctcattgtgtccaccagtgggcgctatgagttcagaaacaaaggcattgatgtgtttatcgatgccattcagcgtttgcgacaatcgcagcacctgttgtcgaaagacgtgttggcggtgattgccgtcccgggttgggtgcgcgaagcccgcgccgacttgcagcaacgactcacagaggcaaaatgttacgacacgcctttgtcttatcccatgctcacgcactggttgcacaacatggagcaagatgcggtgctgacgaagctggcacagttgggcttgcaaaatcaggcgaacgacagggtgaaggtgatgttcgtcccttgttatctcacgggcgatgacggcatcattcagcgcacgtattacgactatctgttgggcaacgatttgtgtgcatatccgtcgtactacgagccttggggttatacgccgctcgaagcgatagccttcaaggtgccttgcatcaccaccaatttggcaggctttggcatgtgggcagcccacgaatcgggttccactcgcttagcggagtcgggagttgaggtgattcatcgcaccgatgacaacgctgcagaagtggcacaagacatggcgaacctcttgttgcagtttgccaacctgcccgctgaggaggtaaatcgcattcgaagaaaggcagcagcactgtctaagaaggcgctgtggagcaagttcatcaaatactatctttctgcctatagtgaggcactgaagaaagctgaagagagaaataaaatcaattaaaaccaagataagaaacaaatttatgaagattaaaacaggttatgccaattcgcctcagtggaaagaggtgaccattaagtcaagactgcccgaacaattgaagtgtttggacgaaatggcacacaacatgtggtttggttggaatcacgaggcacgcagcttgttcaagagtttggacgagaaactgcatgaagaagtgaaccaaaatcccgtcttgttgctcgacagactgagctatgaccgcaaggaagagattgtgaacaatgctgccatgatgcagcgtgtgcaggatgtttatcagcagttccgcacgtatatggatgtggaacctgataagagccgcccttctgtggcttatttcagcatggagtatggtatcaatcaggtattgaaaatctactctggcggtttgggaatgttggcaggcgattacctcaaagaggcatcggacagtaacgtagacctttgtgccgttggtttcctataccgctacggctacttcaagcagtcgttgagcatggacggtcagcaagtggcacaatacgaagcacaaaactttaacgccttacccattgaacgcgaggtagacgaacacggcaaccccatcgtggtagatgttccttatctcgactacacggtgcatgcctacgtttggcgtgtcaatgtgggacgcatcaagctctatctcttagataccgataacgacatgaactcgccttacgatcagtcgattacgcacgctctgtacggtggagactgggagaaccgcctgaaacaagagataatgctgggtgtgggcggtatgttagcactgaaaaaattaggcatcaagaagcaaatctaccactgcaacgagggtcatgcggcactttgtaatttggaacgcttgtgcgattatgtgaagagcggacttaccttcaatcaagcaatggagctggtaagagcctcctcattatatacggtgcatactcctgtacctgctggacacgactattttgatgaggctttgttcggaaagtatatgaatggctatcctgcactgttgggtatctcatgggatgagttcatcggcatgggacgagaaaatcctgacgaccacacagaaagattctgtatgagtacctttgcttgcaacacctcgcaggaagtcaacggtgtgagcaagctgcatggatgggtgagccagaaaatgtttgcacctatctggcaaggctattatcctgaagagagtcatgtgggctatgttaccaacggtgtgcacttacctacatggacctctaccgagttccgtcgcatctatgacaagtactttgatgcgtcgttcatgagcgatcagagcaacgaggagatttggcacgacatctatcaggtgccagatgccgaaatatgggaaacgcgtatggcgttgaagaagaagttggtagcctatatccgtgagaagtttaccgagaattggctcaagaatcagggcgacccttcgcgtgtgatgtctctcttggagcgcatcaaccctaatgcactgatgataggtttctgccgtcgctttgcgacttacaagcgcgcccacttgttgtttaccgacatcgagcgactgtctaagattgtcaacaaccccgaacgtcctgtgttgttcttcttctcagggaaggcgcatcctgccgatggtgctggacagggcctcatcaagaagatttatgaaatcagtcagcgccccgagttcttgggtaagattatcttcttggaagactatgacatgcagttggcacgcagattagtatcgggtgtggatatttggatgaacacaccaactcgtcctctcgaggcatcgggtacatcgggcgagaaagccgagatgaacggtgtggtaaacctctctgtgcttgacggctggtgggttgaaggttatcgcgatggtgcaggatgggcattgcctcagaagcgaacctacgagaaccaagcgtaccaagaccagttggatgcttctaccatttactcaatgttagagaatgagataatcccgctgttcttccgacatgaggagcaggattatagcaaggaatgggtgaagaccatcaagaattctattgctaccattgcaccacattacaccatgaagcgtcagttggacgattatttcaataagttctatatcaaattagcgaatcgatttgagcaattggatgccaacaatcaccaaatagccaaagacatcgcgcaatggaaagaaagtttggtagcgcattgggatgccatcaaggtggtttccaaggacacaactttcttggataacggtggcgaaacaggtgtacgctatcaggtgaagtatgttatcgacgagcaaggcttggacgatgccatcggcttagagttggttactctcaattcgctgcccgacagtgacggacgagagttacaccaagtattcccattcaagatggtaaagcatgaaggaaaccaatataccttcgtaacagaattggaacccgacgttgcaggcaccttcaaatcgtgtgtgcgcatgtatccaaagaatgcttacctgcctcaccgtcaggacttctgttatgtgaaatggctcgactaaatcggtcgatacatcactgataaaactttcaaaaaaaagcacttcgcaactcttgatgcgaagtgctttttttgaatggtaagccaaagaattccttatttcatcatgtcatgcgatgcatgcaacagcccattcaactccggaaaggtcaagaaaacgttgctgtgccttgtctaaagatgaatgggctgatgtggatagttattatcgcttaactactttcttgccaccaatgatgtagataccctttggtagcgacttgaactgttgctcgcctttacctaccactacaccttgcaagttgtatatgagcatcggttcgtggctgacgtgaggagtagcgattgctgttggtgcgtcttttgccatgtagaatggtgtcttgagaatgcgctcccatttaggtacgtatttcattccaccttggatgaagtcttcttgttcctcgactttatagccatcaacgtaaatggcatattgtgccccagcggcaacgttgtctatcgagaatggtatttctttcgtgctgttggcgggaatgatgtctgccagcgagatcttgttttcaaggtaagctgcgtccgtattgcctttcttgcaacgcagctcaatgtcgaatccgccgcaatagtcagcattctcgctgttggtcacaatgagttttcccttcatggcgggagcttggaaagcattttcttcacattgttcgattttcacctccaccgaaggaaggttttgcgacttaggttcagtaatggtaatgtttcctttagagctgatagtagcgcccgatttacattcgaaggagtagtcgaactctccaacctcctttggatacagctcaaaaaccacgtctgtcgtctgtcctgctggcaggaaggtggtggtagaagccacatagttatacttgaagagcatgtcgaaggtgtcgtacagctcgtcgcctttgttctctatggtgagggtgacgaacaggggacgtcccgcctccttgctacctttcacgtctactttcttcacctctaaaacaggcttggcagtggtggtcttcagttccgtgtcggtaatctctatctcctgcgccatttctccaatgccgccacaggctttccattcgctttcgccttgtatgcggtaaacgggtagcacggtgtactttccgttggcaagggtgtgtggtatgttgaagttcgcttcgttcctttgtatcttgccgtcggttttgaacgtagcgctgaacagcttgacggcgtttatcaatctacctccctgccaaaagcctaagccgcaatcagcatcaaaggcttcgccgtaattgttcacgcatttcatggtgatgtcaaaatccgtgaagttatcgctactgttcgagcgactttgatcttgtaggggagtcatctccttgacgtccacaacttttggaaatacctcagcaccttcgcttggtctgaatccgatgatagctccttgctcgcgtgtgtagatactgggcagttgcgtaaatccatattcgcgtggcgaaagaaccgacaggcgatagtagccgttgaattgacctccccagccccagttgatgtgaaagtagtcgccttccttatagccatcgcaaacaaaggcgtgaccatagttgtacaccacatcttcggcaaaataataaacgggtcgtttggctttcaactcattgtatatcagattgtaccattcctcgctggtgtaacggtctctgaaaacacggtgcatgtccttagagtatccaaacaatcgggtaaggaacaatatcacgttgtaggaatcggcacccgaatcatcagcggtataatccatgtacaccgcctgtcccacatacctcatcagcttagccacagcgtcttgctgttgctgggtggtgggaatgcggtacgaaggaagtatctcgttccactcgaaggtactctcggcaagttcaggtacttgcagacgagccgacggagccgtgtaggcaggtatggcgggagccttctttggatactggtaatagcccatgatttgggctgctgccgtggcaacgcatcccgtaacacagtgcttgttttggtgcatgggcgtttgttggttgtagggaccgtactggctccatgtggtttttagcagcggttcgatgggttgcagcgttctgttggcacgtgtagtggctggcttcgtggtgacaggcatgttgttcagcatgctcacctcctgtcgatattgtgccaagagcattttgagcgatgcaggacattgctgctcgtcgtacgttccctcttctgcataacctaacacgtcaaccgtgcggtcgtcggcagaggcgatgacaaagccctgtcccttgcctacgttgaaaatgtaataggcattggtacttgccacctcgttgagcgagggcgcggcttgtgacgctcgtgtagcgacttgggagttagtacttgcatggctcttgataaaagccaatgcagcttttcgggcttgttgtctgcccacaggggcggaaaaagccacagttgttgcgcatagcaacgctaaaggtgtaaaaattttcctcatatttaatttattagtataaaaagtaattctttttatggtctgtcgcttaaatatgggtattcgtaaaatgtctttgtggttgcaaaggtatattaaaaaaacaagtgccgcaaatatttttgaggaattgtagtgtgtaatggcaatacacgtaaaaagcgaggtaagcactccaaatagggcggtgcttacctcgctgtaatttgtgggattggtaactccttttgcgctatccgcaacagaagaggacaatcatttgcgccgtgaagatacgcaggaacatgctgagcgggtacacggtagagtagccaatagacggagcttcgtgcgagcaaaccgagttggcgtacgccaatgcgggtgggtcggtgcaagtacctgccaacattcccatgatggtgaaatagttgaacttgtattttaagcgcgcgatggttccgataatcaaaataggaatcacggtgatgagtacacccgtgtacacatatttcaatccatcgccttcaaccactgtctctacgaagctggctcctgctttgataccgacgctggctaagaacaacaccaaacctatttcacgcaacatcatgttggctgaggtggtggtgtaggtcaccaatttcatcttgtagccataccgtccaatgagaatggcgataatcaagggaccacctgcaatacccaacttcaaaggaacgggcatgccagggatagagataggaatacttccaaagatgataccgatgaagacacctataaaaatggtggcgatgttgggcacattgaggtgtttcacagagttacccatgacgtcggcaacacgctctacgttctcctctggaccaaccaccatcacacggtcacccacatgtaggtgcagattctgactggcaaagaggtcaatgccttgacgagtgatgcgagtgatgttaacaccgtaaacgctggcaaagtgcatcttgcccaataccttaccattcatagatgagttggtaatgacaattcgtctggaaatcatgggttgtttggtgtcctcttcttcccatggcaaatcaatggtaggaccgatgaacgcctgtacggcttcggcatctgcctcggcacacacgatgagcagttcgtcgtctttctgaataacggtttcaccgcgtggaatttccaagttgccctcgtgcaacaaacgtgtacacacgaagtcacggttgaggaactccttgatttggtgtaacgagcgacctgcaatatacgcattgctcaccttgagacgaatttgacaaggcttagcattggggttgtctccttcggcttgcgacagttcatcgtcttcgtctttcatattgactctacagatataacgaatggcaatggtcgccccaataatgcccaacacaccgagtgggtaggcacaggcataaccgttggctatctgtggcatgtcttctttggtaaatatcgccgtgagtgcctcattggcagcacccaaacccggcgtattggtgacggcaccgtagagcgttcccaccatcataggaaggttgtgggaatcggaggtgtcgaaaaaaatgaaatagcaggcaaacatcactgcaatgttgagcaggatgagtgctgtggatagcaagttgagggtcacacctcctcgcttgaagctctcaaagaatcccggtccaacctgtaaaccaatacagaagacaaagaggataagaccaaagtcttgcacgaaagtcaggatatttgtaggacctgtaaatcccacatgaccagcgacaatacctgcaaacaatacaaaggtaacgcccaatgacacaccgccaaccttgattttacctaacagaacaccgaccgctatgacgatggcgtagagcaaagcgatgtgagctaccgaatcgttgttcgtaaaaagcgaaataatccagtccattttgagtacttaaacgctgggttctataaatttgtcttgccactctttgtgtttccatgtgttgcaccaaaatggcaagatgtaaccctgctgatatatctttagtataattatataaggtggtaatttatagaacccacctatctatgaagcgttgtttaataactccgtgcaatgatgacccgatatttggcaggtttgcccgataccatgtccacgcccggtgtctgttctacaccaaatggcacgcaacgaatggtggcttgcgtctcctccttaatctttgcttcggtttcttcagtgccgtcccagtggcaaaggaagaagcctccgttcttgattttctgcttaaactcgtcgtaattttcacattcgtagatgtgtgcatctctaaagtctttggctttcttaaggatgttggcttgcatctcctccaaaagtttggggatgtactccaaaatcttttccaacgaaactgtttccttttgcagcgtgtcgcgtcgcatcacctcgatggtgttgttttccaagtcgcgtccacccatcaccaaacgcacgggaacgcccttcagctcatagtctgcaaacttgaaaccgggtcgcttggtgtcgttatcatcaaacttcacagtgatgcccatggctctcaaaccgtcgataatgggcttcagctggtcgtgaatggctttgagttgttcgctcgttttagagataggaacgatgactacttggataggagcgagccgtggaggcaacaccaagccgttatcgtcggagtgggtcatgatgagtgcaccgattaagcgtgtcgaaacgccccaactcgttgcccatacgtattcgggcttgttctctttgttgagataggttacatcaaacgatttggcaaagttctgtcccaagaagtgactggtaccgctctgcaaagccttaccgtcttgcatcatcgcctcaatggtgtaggtgtccaaagcacctgcaaagcgttcggtctcgctcttcacgccctgaaccacgggaacagccatccattgctcggcaaagtcggcatataccttgagcatcttctgtgcttcagcctccgcttcttcacgagtggcatgggcagtgtgtccctcttgccataagaactctgacgttctaaggaatggacgtgtgcgcatttcccagcgcatcacgttgcaccattggttgcacatcaaaggcaggtcgcgccaagacttaatccagttcttgtacgtgttccagataatggtttcagaagtagggcgaataatcaactcttcttcgagttttgccgctggatctacttccacacccgttccctcttcggaggatttcaggcgatagtgggtcactacagcacattctttcgcaaaccctttgacgtgttctgcctccttactaaggaaggacttaggaatcagcagggggaaataggcattctgtgcccccgtttccttaaacattttgtccaactgctgttgcattttctcccatatcgcgtagccgtatggcttgatgaccatacatccgcgtacagccgactgttctgccaaatcggctttgataaccaagtcgttataccattgactatagttctccgagcgcttagtcaactcttttaattcttttgccattttctgtttgatgaataattagccccttacaaaaatagggaaatccataaatatcttaggaatatcccgttgtggaatattcgatgattgcttaattttgtcgcaaaagtacaaaaaaatgttgatatgggtgaatattgacataaaaagaattatctttgcaataaataaacgattaaaaaacgtaacattatgaaaaaattgaaagcaatgacactggcaatgtgtctcatgaccgtatttagttgttctaccaaacaaggcacaggagctttagcaggtgctggaggcggtgctgttttgggagcgattattggtaagatagctggtaatgcaggcgtaggagctgccattggtggcgctgttggtgcaggtactggtgctattattggacgtcatatggataaagtagctgctgaaactgcagcccaagtagagaatgctaaagtagaagaggtaaccgataagaacggcttaaaggctgtgaaagttacttttgatagcggtatcttgtttgcttcgagcaaggctatcttgaaccaagccagcaaaaacgaattggctaagttctctactgtcttgaagaagaacagagactgccacgtagatatcttaggtcataccgactctacaggtaacgatggcatcaacattccattgagcaacgaccgtgctcagagcgtagtgaactacctcaagagctgtggcgtctcttccagtcagttccaaaacgtgtcgggtatgggcagctcacaacctgtagcaaccaacgcaaccaaggctggacgtcagcagaaccgccgtgtggaagtgtatctgtacgcaagtcctgaaatggtagagaaggctaacgacggtaaactcaactaaaattataataaaacattgaggaggggtgctgttactggtgcccctttttgtttgaatgatgagcattataggacgttttttacgaagaatcatcgtgttttttttggtttccaccattttggcagtggtggagtaccgtttcattcctgtgtacatcaccccgttaatggtaattcgatgtgtgcagcatggtgagttaaagattcgacaccactgggttcccctcgaccatatatccaagcacatgcccgtagcggtgatggcaagtgaagaccaacgctttctgttgcaccacggctttgactttcaagccatagagaaagccgccacgcacaacttgaccaacaagtcaggaaagaagcgcggagccagtaccatcacccaacaaactgccaagaatgtatttttgtggccaggtcgctcatgggtgcgcaaaggttttgaggtctattttacctttcttattgaactgatgtggagcaaacagcgcatcatggaggtgtatcttaactcgatagagatgggcgagatgatatatggcgtggatgcggtagctaaatatcatttcgacacgacagccggtgagcttactcgagcagactgtgcactgattgcagctaccctgccaaaccctatcaggtttagcagtaagacgccaagtgcctatatgcgcttgcgacagcggaagatagaacacgaaatgaagtttgttccctcatttccaagagagggagaagatatcaaccccaacaccacaaaggggggtatataccaccgaaagaaatgaaagagctattaggacaattgaacaagagtcagcaagctgccgtgacctacaacgacggtccgcagttggttatcgcaggagcagggtcgggaaagacacgtgtcttgacgtataagatagcctatcagatacaacaaggcatgaaaccttggaacatcttggcactcacctttaccaataaagccgccaacgagatgaaagagcgcattggacaattggtgggacatcagacagcacgctacatcaatatgggcactttccactctatcttcgcaagaatattgcggtcagaggctgcacaggtaggctatcggtcgggctttacgatttacgatgagtccgactctcggtcgttgctcaaagccattatcaaggaaatggagttagatgataaaatctacaagcccgctggcgtacatgccgtgataagcaatgcgaagaaccgtctcatctcaccgcagagttatgcagcgaatgccgaactgatgttgcgtgaccagaagagccgtcgcttcgaactgcatcgcatctatgatgtctatgtgcagcgttgcagaaaggcaaatgccatggattttgatgatttgctggtgttgacgtatcaattgttcaagacgcatgaggatgttcgtcaaaaatatgtggagcgtttccactatgtcttggtagatgagtatcaagataccaattacgcccaacagtgcattgtgtgggagttgaccaaagaccatcaacacatctgtgtggttggcgacgatgcacagagcatttatgggttcagaggagcaaacatcgacaacatgctcgactttgaacagatttacgaaggggcacgcttgtttaagttggaacagaactaccgctccacgcaacacattgtaaaggctgcaaacagtctcatcaaacataacgaacgccaaattccaaaggatgtatatagcgagaacgaccaaggagagaagctccttttcaagcccgtgtattcggataaagaggaagcgttggtggtgtgcaaggatatccagcgcatcatgcgcaccgacggtgcaacctattccgactttgctattctctaccgaaccaatgcgcagagtagaagttttgaggaggagatgttgcgacagcacattccttatcgcatctatgggggcttgagtttctaccagcgcaaagagataaaggacatcttagcctacttccgattagtggtaaatcctgatgatgaagaggcttttaagcgcatcatcaactatcccacacgagggattggcaacaccacgcttcagaagattgctgcttcggcacaagaacacggcatcagtttttggcaagtcattgcgcaagcacccaccttattgcccacggtgaacaagggaacacagacaaagttgctgcgcttcaaagagttgatagagggcttcattgctcaattgcatcaggctgatgcgttcaagttggggcgtgacatcctccagaccagtggcattagtgcagatatttactctaacaacgacccagagggattggcacgacaagagaatgtgaatgaactgttggcaggcttgcaagattataccgagagtaagcgagaggaaggcttggaacaggaggtgtatcttcctgattatctgcaaagtgtcgccctgctcaccgatttggatagcgacgacgggagcgatagtaaagtgtcgctcatgaccgtgcatgccgccaaaggactggagtttcccactgtttttatcgtgggattggaggagaatatctttccaagtcctatggctgtcgattcccctcgcgaattagaggaagaacgccgattgctgtatgtggcaattacacgtgccgaaaaacattgcatcctcacgtcagcaaagaaccgctggcggtatggcaaactggaatttgatacgcccagtagatttatcaaagacattgattcacgttttatccacatcgaagccgaagaggaaacgatcgatgagtccatctttgcgccttacagtgggagtcacttctcgggcgatggcaatcgacgatatagcgaccgcatgcaaaactcccgaccagtggcgagtcagttccaagccgatgtaaaaccgaaaatcacctctgttcagcgccctgaacaggctgttgaccccttctcatcctcctttaagcgccaactccagcaggcaggtggaaactttaagcgagttactgacgccatgaccaacggtggacgggcagcgtcagcttcttcctccagtcctgatacttcaggcttgcaagaggggagcaccattgagcaccagcgttttggcattggcaccgtactccgattggagggtgatggtgagaacagaaaggctacggtggacttcaagcatgcgggtaccaagcagttgctgctcaagtttgctcgcttcaaggtgctgaagtaggtgtgcttatatttttagcacataagtgcaagaagtcgtataaaagtttcgcaaatattttattttcgaaaagataggagccagaagtcttggggtcaaatgaaatttttgcttataatgaggatttataagccacaattgccgtataataactgtaaaaccgattgtttttattagcctttcaaaactttcaacagtcacttgtgaacgtttgatactaaacagttcctgaatagtgtcactttttgttccgctaagagtgagaatggctttataaaggggattaggaagaaggtgtatgaatggaatcttggaaacaaagccatcgctaatttgctgatgcccgccaaatggattttgccatgctgggaaacatacgagaactacgcttctttctgtcatatagtcttttatatgagtcataaagtctttcttataaggaggctctatatgttctatcacgtccctaactattataatatcaaaagtacctatctctccttttgaattatcaagcagaacaaagttttcgcatagaaaggaacctttctgtttttctctcttaaaaaactctgctgcttgttctatgcgagaactgcatatatctattcctgttaccgagcatcccatctgggcaaaaggtaacaagtttcccccctccccacatcctatttcaaggactcttgttcctactcctatacttatatctaaactcctcagtagttcaatatagtattctttggtggtacgagctaattcttgaaagtaccgaaatctatctttgtgtcttttttgcattttcttaatttttacaaagagcgaaagcgttttatcatatcttaaactattggtttaatgatattacaaagatatggtcttacttacacagaaacaatacctaaaaatcggtattttgcttcattattctctgaaacaaaaacgaaaaacggaaataaaacgattattgttttgctttgaattctcagatatttgtattatctttgtggcatcagacaagtggtctttaaaactttgcagaataaagaaagagaagaaacctgctcatttccaagtcgtaacccttttcctttattcattcttagtgtattgattatctgaaaaatacatatttatttaatcttttgcgcgcgatatttgtctccgctgcaagaagattttgctcgccaaggtttgcgggatttcttcttgtagctaaggcagcagaagcaaagagtggtgctgtgcatgtcctttttattttcccctttatggtgttacattataagtgaatagcattgtttaccatgcacttacaccgttattttgaagtaatactgcacttcgatacaggctgtttgtgattgcaataacgggtcagtcgtaaaacccagttgcatccctcctctcttcatgcacataatttcataagtatttgttatctttgcatcatgaagaccgagcaattgttgcgttgtatctttccagagatactcgcagattattttgatgtgatagatatccaagagaacatttcccagatagacttctggttggatgagcgtaactttatggaaaaagcagaccgcaaggccggcacggtaagcagttacggctttaccgccgaacgggttgtccaagactttccccttcgtggcaaacccgtttaccttcatgtccgccgtcgaaaatggcatgacagttccacgggtgagatattcagttattcttacgatgacctgacggctgagggcagcaaactatcccctgagttcgtttcttttttaaaagaatagaattgagtctactgcggagagcattacaggtatcggctctcattatggcgtagacggtaagcagctttccacccaatacaaggagcatttcagcgattatcgccggtgggagcagttgtcgcatgcgggagactggctgctgtttgatgagaacctgggagagagcctgagtatcgatgagacttgtctgagcagcggtgaggtctatacgtttctgaccaacaaggctggcaaaggtggcaggggtactctggtagctgtggtcaggggaacaaaagccgaggatgtaatccgtgttctggaaaagattgacctttccaaaagaaagactgtcaaggagataacgctcgacttgtcttcctctatgatgatcattgcgcgcacggtgttccccaaggcactcatcaccagtgacaggtttcatgtgcagaaactttactatgacgctttggacgacatgcgcatagcctaccggtggatggcaagggacagagaaaatgaggagatgaaggaagccaaagccaagaatgaaacctacaagccattcagatatagcaacggtgacacacgcaagcaactacttgccagggcgaagtttatactgactaaacacaagtccaagtggacggaatcgcaaaggctaagggcgaaaataatctttgaaaactacccggaactcaaaaaagcttatgatctggccatggaacttaccgatatttataatgcaagaagcatcaaggacgcggcaaggctgaaactggctaagtggtttaacgaggtagagaagttgggggtggacaacttctatacggtgattgacacctttaagaaccattatgataccatactcaatttctttgtcaacagagccacaaatgccaatgctgaatccttcaacgcaaaagtcaaagccttcagggcacagttcaggggagtaacggatattcctttcttcctttacaggcttatgaaattatgtgcatgagaggaggggtgcaactgggttttacgactgacccgatatcttcataacggcattccttgtgtttgtcctgtaattttaccaaaaaacgaccatcaaaaatcttcaaaatagaaaaatttaataggcaaacgatggacaaaaatgggttgattttagcaaaatagacgtcccataaagttagaactttgacttagcggtcttgaaagcactcattagaggtgttattcacatactacaaccgcattaaagcatgtaaataacaagcttagagtaatgctttagctgcaaataaatggtaaaaataggaatgaaaagaagtggattttgtataacattctcaacaacaatgaattatgaacatcgctcatttctcgcgtatttgcgaccaattgtgccgttggttgtttacacgcaagttttgagaggcactttgtaaagaaaattcagtatcaattatccttccatgtagggtaatacccaatatgatataagctggtttttggggcgttctttttgctgtaaaaatattactcttccatgaatgagctgaggaagtacaaaaaagttttgcaaaaactttggaaaatatttgtgagtttcataaaaagcatttatctttgcactcgcttactacaaatagtaagggcgtttagctcagctggtttagagcatctgccttacaagcagagggtcggcggttcgaatccgtcaacgcccacttcttagagttctgtcgtttggtaatgacaggacttttttattgccgctcatcttcgactaaacattcttatttgagcttctcgcaacaggtttcggcgaaaattattgtttgataaacattctattaaaatatcaaaaagttgatgatgttatcgattaaaatgtgtaattttgcagaagataggctgcgccttaacaaagaaaataaattttctctgtattcggcttgcgctatctttgcagaagataggctgcgccttaacaaagaaaataaattttctctgtgttcggcttgcgctatctttgcagaagataggctgcgccttaacaaagaaaataaattttctctgtattcggtttgcgctatctttgcagaagatagggtgcaactttgcaaatgaagatagctcaattgttttgggctggtgctaccctttaggaaatatacataataaaatgatgacacttgatgctttaaccgccatttcgcccattgatgggagatatcgcagcaagacagttgcattggcagattacttttcagaatatgcgctcattcgctatcgcatacgcgtggaaatagagtactttattgccctttgcgaacttccgttacctcaactccaaaactttaaccattctttgttcccgcgtcttagggatatttatcaaaagtttgatgaaacttctgcacagcgtgtaaaggatatagaacaggtgaccaatcacgatgtcaaggcggttgaatatttcctcaaagaagagtttgataaaatcggtgggttagaaacgtacaaggagtttattcactttggacttacctcacaagacattaacaacactagtgtgcctttgtctatcaaggaggcattgcacgaagtgttggctccctgtattgaagaattgatagaacagttggaagcctatgccgcccaatggaaggacgtgccaatgttggcaaaaactcatggacagcctgcctcgccaactcgtttgggcaaagaactcatggtgtatgtttatcgacttcgtgagcagttaacgcttctcgagagttgtaagatgagtgctaagtttggcggtgctacaggaaactataatgcacatcatgtggcttatcctgccatcgactggaaggattttggcaatcgcttcgtgcaggagaagttaggtttgcagagagagcaatacaccacccaaatcagtaattatgatcacatgggggctttcttcgatgctttgcgccgtatcaataccattgtgttagatatggatagagacttttggatgtatatttccatggagtactttaaacaaaaaatcaaagcaggagaagttgggtcgagtgctatgccccacaaggtgaatccgatagattttgaaaatagcgagggtaatttggggatgtccaatgccattttacaattcttggctcagaaattgccagtgagtaggttgcaacgtgatttaacagactctactgtgttgcgtaatgtcggtgttccaataggacatacaatgattgcgcttcagagtacattgaagggattacgcaagcttatcttgaacgaagacaaactgtatcaagatttggataagacttgggcagtagtcgcagaggctatccaaaccattttgcgtcgcgaagcttatccgcatccatacgaagcgttgaaagcattgactcgtaccaaccaccagatgaccgaacagaccattcatgagttcattcagaatttggatgtaagtgacgaaataaaaaaagaactgatggcgattacaccacataattacacaggtgtgtaattgagtaaggggacaaagagggacgcctttgaaaggtggacgacacgttaaacgtttcggtttttcagacctacttattacaatattaaaatcagaaaataaaaatatatcaaaatcagccgtgaggctaattatttacaaagaaaagttgattaaaaatgatggattcagaattagaaaagaattttcaggagcaatccttagagcagggcaatcaaagtcgtgagacttaccaaaggccttcgggaaataatgaaagagatgctcgttacggtgagcgaaaacctcgtcgtcgcattcaacgtccttatgacggtgatcggatgagtcgaccaacaagtgagggtggctttcgcccagagggttttgggaataatttagaaaataataatgtagaaagaactccttcgcgtccttatcgacctcgttattcgaataatgagcaaggagaatatcgctctcgttatcgtcgtgactaccaaagtgggtatcagtcacgtcgacaagaaggttatcgccctcgataccataatgatgtagaggaaggttattcatctcgacagtctaatggataccgccctcgatacaacaatgatggcgagaatggatatcagtctcgtcagggtggttatcgcccacgttataataacaatgatagtcagagtggctactctcgtgagggaggttacaatcgaggagggtatcaaccacgtggaaattatcaaaatcgtgggggctataatagaggcggttaccagcaaggtggttatcgtcaacattctccaaactataacccgaatgcaaaatatagtttgaagaagcggattgaatataatgaagaacatatcgacccgacagttcctgttcgattaaataaatacttggcaaatgctggtgtatgcagccggcgtgaagctgacgagtttatccaagctggggtagtgaaggtaaatggcgaagtagtaacagaattgggaacgaaagtcctacgtacggatgaagtggtgttccatgatcaaccagtttctttagagaagaaagtatatgtgctgttgaataagcccaaggattacgtgaccaccagtgatgatccgcaacaaagaaaaacggtcatggacttagtgaaaaatgcttgtccagagcgtatctatcctgtgggtagattagacagaaacaccacaggggtacttttgtttaccaacgacggagatttggcaagcaaattaactcatcctaagtttctaaagaagaaagtatatcatgtgtttttagataaaaatgtaactgcacacgatatgcaacaaattgctgagggaattgagttagaagatggtgaaatccatgcagatgccatagaatatacagatgagacagagaaaaatcaattaggaatagaaatccatagtggtaaaaatcgcattgtgcgtcgcatctttgagagcttgggctaccgagttgtcaaattggatcgagtgcagtttgcgggtttaaccaaaaagaatctgcgccgtggcgattggcgattcctcaccgctcaggaagtagatatgctgagaatgggcgcatttgaatagttgagatatatagttgacaagttgaccagttgaccagttgatggttctataagttgcgccatggtcaattgcgaatgaatgacaaaacttcggtattaacttgtgaacttgtaaactcgtcaactgtaatctcgtaatttgtaaacttgtcaactcgtcaacttgtcaactcgtaaactaaaaataaaatgaaacgtacaaaaattattgatgtccttcagagtacagacttcaatcaagaagtgctggtaaaaggttgggtgcgtactcatcgcagtagtaaagccgtacactttatagcactgaacgatggttcaacgattaagaacgtacaaatagtcgttgacccggaaacaatagaccccgaaacacttaaaaacatcacaacaggcgcatgcttatgtgtctctggtactttggttgaaagtcaaggacaaggacaaaccgtagaaatccaaggaaaagaaattgagatttatggcttgtgtggcaacgattatccgatgcagaaaaaagggcagtcgtttgaatatatgcgacagcatgcacatctgcgtttgcgcaccaacacctttggagcggtgatgcgcatccgccacaatatggcaatcgctatacataagtattttcatgaccatggttacttttatttccatacacctattattactgcctcggatgcagaaggtgcaggtgagatgtttcaagtaactacgcaagatttgaataatctaccgcgcgacgaacaaggaaaggtgaaatgtgatgatgatttctttgggaaaatgacatcgctcaccgtttctggacagctggaaggtgaactgggtgccactgctttaggacagatttatacctttggacctactttccgcgccgaaaactccaatacccctcgccatttggcagagttttggatgattgaacccgaaattgcttttacagatttggacgatctgatgggcattgaagaagaatttatcaagtattgtgtgcaatgggctttggacaattgtaaggacgatcttgagttcttaaacaagatgattgacaaaaccttgttgacacgattgcagagcgttgtaaacggtagctttgtgcgacttgattattccgaaggcatcaagattttggaagaagcggtaaagagcggacaaaagttcgaatatcctgtatcatggggaatggatttggcgagtgaacacgaacgctatttggtggaacaccactttaagaaacctgtcatcatgtacaattatccgaaggaaatcaaggccttctatatgaaaatcaacgaagacggcaaaacggttcaagggacggatgtgctcttcccacagattggtgaaatcatcggaggatcggttcgtgaagaaagttatgaaaagctgctgggtgaaatcgaacgtcgccacatccctatgaaagatatgtggtggtatcttgatactcgtaaatttggttcttgccctcatggtggctttggattaggcttcgaacgtctcatcctctttgttacgggaatgcagaacattcgagatgtaattccattcccacgtacacccaagagtgcagaattctaaacaaatccagctgatgatatttcacaccgataccttattatatagggagaacggcacatatagtgaagaaataacgtgttattttgcgtgtaaatgagagattaaataaaaaaacttgtctaaatattaaaaaaagaagatttttatttgttcgttttaatatttatctctatatttgcaccaagataatttgcctgtaatagggttactatgtacataacgaacaatcattggcgtgaaaaaaacagatggcttagttttctgacgaaaatcaaagcgtctttgaataataagtatatatttaatttttattgttttatttaattttatatcgtatgagaaagaaatttttaagtacgctgctaatgggagctttagtaacagcttctatgagtacgtttacatcttgtaaggactacgatgatgacatcaacaatctgcaaacacagattgatgcattgactccactcaagactgtaaaaacagaattgcagagtgaactcgccaacttgcagaagcagttggaagccaaagatgcacaactgcaagagtctattaccaagctgcagacagctgatgcagatcagacaaagcagattaccaagcttgctgctgatgtatctggcttagaggcacgtgtaaagactgctgaagaagctttagctaaagtaaacgaagctttgaaaggcaaggcaagcgaagctgacctgaaagagctggctggaaaggtagctgctgtagaaagcagtcttgttgagcctttgaaacaaatcaaggaactgaaggctggtcttgatgatgttaaaacagctcaagaaggtatcaagtctgatattcaagagcaaaaggatgctctcgagggttacaagactcgtttagaggctcttgagaagcaaggcttgtcagagtctgacatcaagaagatttatgacaagatcgaagaggctacgaaagctttggataagaaattgtctgaagaaatcgcccagctcaaggctgatgctaagtcattgtctgataagattgatgcggtaagtacaaacgttaacgtgttgaacgtattgctgcctacagagcttcgcagtatcgtcttcgctccggattcatattactggggtatcgaggctgccaagattcaaaccttgaagtttaacgcttacacgctgtctcctgttgcttggaacgtgaaagaaaccaagggttatgacaaggctgagcgttatgaagcaaaggctggttcaagagtgcttgcttttgtagcaaactaccacatgaatccttctacagctgttatagatccagctactgctaaggttaatgttctctctggcgataaggagtatgagaatactcgtgctgctgctgaagctggcctgtctgttgcaagctggaatgttgaaggcggcatgttaaaggttaacttggacgtaacaaatcctgaaaagattaagtctgttaaaggaaacgaaatggttacagtctttgctacacaggtgacacttcctggtatggccttgaataaggatcaaaacttggctgaaagaaccattacctctgattatgctactttatatgctgagtctatttctgacctgaagttggctcaccgtgcaggagacgatattcctttcttaggtgttgaaagtcctaataagtctgtactgggtggtcttgacaaagatcacaaacatcaccagctcttgatgcagcatgcatttgaagcagctgtaagtggcaagttcggtcctcaggattctgttaactacaatgagactttggatcttcgcaagcttgtagaagtacattataagaatgcaaagggtgtcaccagattgatgacagccgatgagctggaagctaatggcatgaagtataagttcgagattaccgcactttacttaggatctaacgagacttctgagtctgctcacgctgctatcaatcctaaagacggttacacattccgtccacagatgcctgaatatgacaaggctcatgtagggaagcaacaagcttacggagctgagcaagctcgtcctaccattggtcgtacaccactggtacgcgtatctttgcttgacaaggatggtaaagtgcttgattatggttatatccgtatcaagattacagagaagaagactcctgctacagttgaaccagataagcatgttgattatcaaggacctgattataactactcatacaatggtgaatgtacagatcctgcaacagagtggaagtacgagacaaagtggatccagacagagtacgatttgtaccacatgttaggtattactcgtgaagaattcgaagctaactatggtacttctcctgtaaaggatttaacgaatggtaatttgcagcagtataagttgagtgacaatggtaagacatttgagatgatggctgagcctatcggacaggcttatacaagaaacgaaacttctcctgaggacggaacactgaccagtatcttaggctggaagttgacagctgctgaggctaagaaactcttcgttacagagaagaaggctaatgtagaaattgccgtgaagtacgagtctaaggacaagtctaagtatcctgatgtattcgttaccttcaagacaggcaagcgcacaggtactgattctactcctgctggtgaagtgaagttggctgacaacatcatctctaactactggtatacagctaatacttctaaacctggaactgctgagattcacagtaatactttgactcctgaggataatcctaaaggaacagccgataagatggtgaccacatttggcgacgtattcaagggcaataagattggtgcaagtttgataaacgttgttaaagaccttactgaaggtaaagagtatgcagctgctaaactgaagctcagtctcgtattcgatgctgcaaacacaggcaaggaatacatgggtattgacggcaagacttatgtaatgtcagtgtctgacgatggtaagaccttgaatgcccagattaagggtaatcaggctaagaatcctgttgcaactcttaccagtcctgaagatccaagtgagacgatgattgcttaccagcacaatgattatgctcatgcgttgctgaactacaaggatcataactcattggctaacgacgtagtgaaggctatcatcggtatcaaggctcagaatggatgtgctaaggaattgccgctgactaagaatacgttcgacgttcgcttcctccgtccattaaacgctaagaatgctgacaagactattgtcgatgcaagctacgtagaaatgcagaagattaaggctgttgacctcttgaagttcacagactggcgtgatgcttggaacaaaaaccaagctgctggtatcggtggtgaatacgagaagtactatggagtaacgggtgtaactattgatggcatcgcagagggacagtctattagtctcaatcctaatgtgttgaccaacttgggtcagagcgatcctactaagttcgttccattaggtgatgttactaagaacattgacttcgtttacaccgcagctgatggtggtacactgacctacaagaacttgagtgctactgttcaggagttcaagattaagattcctgtaactgtgaagtacatctggggttatatcactgagaatgtaactgttacagtgaagaagactgccaataacgcaaaaaagttctaattaacgattagatcatcatattagaaggggaggggtaatttactccttccctttttttcttaaattgactttatgaaattaaagatatttacaatatgcatgctttgcatgacattgacatttgttggatgtaagtctggcaaaaagaaagacccattgcgttcggagtatttacgaccagcctcgatggactattctagcaaagactcatctgagataaagacattagtagataactatgtggagaatttcaagaataagaacttccgagttacagccagcatgctgtatactttacgaaatgatagtatcttgccattgtctgaagaaacgaaacaaaaatatattgatgcctattcgcgcatgcccatctacgattgcgctgtgaagggtattattttacgaagtgataagaacaacgaggtgcaggtgtcagtacaaattatgcctaacggtagtattgaagaagagaaaggtgttacaactttttgtttgaatcctgtgttaaaagacgggaaatggtatcttacattgttggatgaatacgctgatggcgtagaaagcgtttatgacaaatataaagaaaaccagtaacctattcgcatggctgttgcttatagtttgttgcactacactatcgtatgcaacaggtaagcctgagcttcagctcaaaacgcagcaatacgatttaggtaacttggacagcgaacatcgagtgcagactatactcgctccttttacaaataaaggtggaggggaattgataattaatgatattaagaccgattgtgactgcacaactgttcagtatccgaaggaggcatataagcaccgttcgggcgataaaattaaaattagagtggatttaactcctttctttcctggtccaatattaaaaaaagtggctatttataccaatgggcagccacagcctgtggtgatcaccattaaagggcatgttatatgagtaggagtaatagataaatgagtagagcatgagaagattaagattttttgccatgcttgtgttgttgctgtgtatggtgacttcacctactatggcaagtaacgaagatgatgtgctgatggttcagatgaaatcaggtgacttgtataaatttcacttagcagagcggcctgttgttactttctggccagacggaatcaaaattgtttcgtccgactttagtgcagaatacaaagacgttcaaaaaatatattttgaagaatatacaacagatgtgaccttaccgcaagatgttcaagcaaatgagatgacttttacttatcttgatggacacacagttcagattgacggactcaaaggaaacactgcgattcgtgtatttactttggatggtaagatgatgtcgcttaatgttgaaagacaagttaactccatcaaagttgatttagcggcttatccaaagggcatatacattattcgttgtaacaatcattcattcaaagtaaccaaacgatgaaacaaagaatactaactatattattgcttttcgccacatttcttcaggtgcaagcccagcagaaggtttatgtgcacacacttgacaaaaaaacttttgagtggtttacatgggaggtggatagcatcacatttaaagaggctgatcctcttgtcgttcccgcaacagccaagcctgttgacttagggctctccgtgcaatgggcagacttcaatttaggtgccagcagcgaaacagagagaggttatttggtaggttggggtgacgtgacgggtaccaacagatcggccaatctgaaatacttccccgttgagcatccgttgggcaatatcatcatgagtaagtatgacattgccaagcaaaagtggggcgacctatggcgattgccttcaactgacgaaatacaagagctgatagaccactgtacatggacgtggactaccaagaatggggtgacaggctatcaagtatccagccagcagccagagaacaccaattctatttttattccagtttcgggtttccgcacaggttctgtcatggcagaagatgatgttgctggttactattggtcgggtatcttggataccgacaatacaaacgctgtagccttgaagtttacagataccgacaagctgcaaacagccttgaaacgttacgtaggttgtagcgtgcgacccgtttatggaaagtatgtacaagctgtatatgctgtaaccgccccagctgcagaggtaacctatcaaactgctaatgttaacgtttctctttcaggaggtcttgaccaggtaaaagagtacggcgtttgctatgctaagaatcctgttgatttagatcctattaaaggaccaaaggtttcagatacttccatacctgaaggaaataccaaaacgtttgtcctcacagatttatctcagcgtaccacctattattatcaagcttatgctttagttggaagtgattacgtttatggtaaaaagttgcaatttaccacacaacccaaattcccagagcctgagattgtagacttggggttgtcggtcaaatgggcaaagtggaacatgggcgccaagaccgaggccgattttggaggttactttggctggggtgatccaacgggcgagttattctcgaatgatgtcaccgaatacgccaagggattgaccactaaagacattgctggaaccaagtatgacattgcacgtgcgcagtggggtggtaaatggcgactgcctacaaccaaggagttaaaggaattagagaaatgcacttggtcgtatactccaaattacaacgataagggcatcgagggttggattgtttccaacaatggcaaacaaattttcttcccacgtgcaggctggagacgggctgataattcatcacacggcattggtgacgacgcctattattggtcgtcagagttagccgacgatagtccaaactcagccaaatacgctcaattattaggaaagaattatatagaaataaccacgagcttgaagtgtatcctgatacctgtccgtgccgtctatgacgaaccgggggaaaactacacacccgatccgacacctaatccaggtactgatcctacgccaaatccaaatccagaaccaagccctaaccccgagccaccatctcctacggctggaaaagcagttgatttgggcgtgtctgtcatgtggtccgaccgtaacataggtgctgttaaggcttcagatgcaggtaagtatttcgcttgggctgaaatcagtgacaagaccgagtacaccaggaaaagttacactgcaggatatgatactatgaatggagcgttcaccgactccgtttccgtgagccacattgctgggagcaagtttgatgctgcccgtgtattgtggggcggaacatggcgaatgccaaccgatgacgaggtgggtgaactaaagaacaattgcacactggagtggacattccaggatggagtccctggttatctgattacgaacaagaaaaatgtcaagaatcatatcttcctgcctgctggtggttataacaatggaacttcagttgctggtaccgattcgtttggaaaatattggactgaccgaatttttacttacaaggacacgagcaagagcactgcctatgccctgtctttagccagtagcggtttctatgtaagcagtatgcccagggaatatggagccttgatcaggcctgtgatgaattattaattttatctaaatacaataattatgaaaaagtttaagaaaactttcatggctgttgctctgttgtctatgagcgctgccaccgcatttgcacaagctacttacactgatgcaaacaacaacgagtatcagtttaagaaacatgctttcctgaatcttcagggtggtgcacagtacacacttggcgaagctaagtttgacaaattgttgtctccaaatgtacagttgggtcttggttatcagttctcacctgtctttgcattgcgtttgcaagccaatggttggcagagcaagggaggctggaatggttatgagttggctcgtaatggtaatccatacactgctgactataaatttaactatgtggctccaggtttggatttgatgtttaatttatcaaatttattctgtggctggaatcccaaccgtgtattcaatgtaaccgctttcttaggcggtggtgctaacatcgcatggaaaaatgatgaggtgaatggcattgctaagaccttgaagaatttagacaactatcagttgcagaatttatgggatggtactaaagtacagccttatggtcgtggtggtgttgaattggctttccgcttgagcgatgccgttagcttcttggtagagggtaacgccaacatcttgagtgacaagtacaactcaaagaaagctgacaatccagactggtacttcaatgccttggctggattccgtatcaacttgggcaagacttataagaagacagagcccacgccagaacccgctcctgttgttgaagagcatgttgctccggcacctgctccagccccagctcctgaagtaaaggaagaggtagttgaagagaaggtagagcctttccgtcgtgatgtgttcttcttgatcaattctgccaagattcgtgatacagaagcaaacaagatcaaggaaatggttgactatctcaatgccaaccccaatgcaaaggtatctgttacgggttatgccgatgccggtactggtaacaatcgcatcaacgatcgtttaggtagtcttcgtgcacagattgtagtaaagaccttgaaagagaaatataacattgcagccgaccgaatcatctctgattcgaagggtgctcgcgtacagccattcgaacagaacaataagaaccgtgtgaccatctgtattgccgagtaacagcggttatattagtaatatacacatagggagagtctttttcaaggctctcccttttcgttttcaataattatgtgtaaatttgcgtagtaattacttaaaactatcaatcatgaaatctatccattcagaaaaggcacctgccgctgtaggaccgtacagccaggccatcgaggccaatggctttgtttttgcatccggtcaattaccaattgatccttctacaggaaaattccctgagggtgacatcaaggagcaaacccggcaatccatacttaatgcgcaagaggtgttgaaggccgctgggttagacttgtccaacgtaattaagaccacggtgtatctatccgatatggctaacttcggtgctatgaacgaggtgtatgcacaatttttcacagaaccttatccagctcgctctgctgttgctgtccgcacactccctaaggaagctttggtagaagtagagtgcatcgcagtgaaagcataaaaattaattgcaacggaatttcacggatttgcacagtatatttgtgccgttccatgaaattccgttgcaatagtaagatatttcactgaactttaaatttgtggttataccaatgagccttcagtgaaagttttgaaaaaagaagaaagactagttcttttatctctcctttttgattaaatattctgcaatttgcacagcattcagtgcggcacccttgcgaatctgatcgcccgttagccatagcgtgatactgttgtcgtctgccaagtctttgcggatgcgaccaacatagatatcatcgtgtcctgccgattccaaaggcatggggtaaagtcctgcattcgggtcatccttaaccttacaaccgggtgcagcagctattgctttgcgcacctcttcaacatcaagtgacttttcggtttctatccatactgattcagagtgcgaacgaagcgaagacacacgtacgcaagtggcactcgtcttgatgtccgaatgcatgattttttgcgtctcgttaaacattttcatctcttccttggtgtaaccgttctctgtgaacacatctatttgcgggatgacattgtatgccaactgatgtggaaatttctgaatggttttcacctcgcccgtttccactaactctttatactgttgctgtacttctgccatggctgccgctccagcaccacttgcgctttggtaggaggaaatgcgaactcgtttgatgtgacttagttgctcaatgggtttcagtaccaccaccatcataatggtagtgcagttgggattggcaataatgttgcgtggacgattgagcgcatcttcagcgttcacctcgggtactactaacggcacgtccttatccatgcggaatgcactggaattgtcaatcataatggctccatgttttgtgatggtctcggcaaactctttagaaatgccaccaccagcagaggtaaaggcaaaatcgacacctttgaaatcatcgttgtgctgaagacgtttcaccgtgtagtctttacccttaaagttgtaagtcttacctgcgctgcgttcagagccgaacaacactaaatcgtcgatagggaaattacgttcttccaagatgcgtaaaaactcctgacctactgcgccacttgcgcctactattgctactttcattatcgtatctattttttattaaaactgagcaaagctcaaacttctcttatgtacatagtacccgacaaatttacataaaaactgtgatttattagcctgtagaataaagaaaatgcttttttctttaagttatgctggttctttcattgaagaatgatatctttaccatggaaaacatcgaaaatatagtttctgtaagattggtggtacattagaaggaagaaaaattaatgctgaatattctttacaaacagcctctcaaaactcgcgtgaaaacatccaacggcaatgttggtcgcaaatacgcaaattatgaacaactttcataacgcactgttgtttaatgtattacgcttaaactgtttcctttctttcgtattcttaccactttttggcgattgaagcattaagataaggttgctatttgcatgctttaaggtcgttgaagtatgtgaataacacctctaaagagtgtttccaagtgcgttaagtcaatgttccaacttgaaaaggcatcaattttggcaaaatcagcccatttttgcatctcgtttgcttattgattttttctattttgcagattttggatgacctttttttggtaaaataacaggacaaaaatgttttttgacaagtgtttttggtgattgtactctcaaagaaaaagcgctttctttcttccactggcttataattcggaaaatttatctacatttgcataaggtaggctgcgccttaacaaagaaagtaaactttctctgtcttcggcttgcactacctttgcataaggtaggctgcgcctcaacaaagaaaataaattttctctgtcttcggcttgcactacctttgcataaggtaggctgcgcctcaacaaagaaaataaattttctctgtcttcggcttgcgctatctctgatgtgtaaaaaaactaaccgcatgatatcagcatatttccccattacggaccccactttggtgtttttagttgtattatcggtcatactcttggcaccgataatcatgggaaaattgcgtattccccatatcattggcatggtgttggcgggcgttgtgttagggaagtatggactaaatatcttggttcgtgacaactcgttcgaattgtttggcaaagtagggctgtattacatcatgttcttggcatcgctcgaaatggagatggaaggggtgaagaagaacaaatatcgtatgttggcgttcggtctccttacctttgcagtgccccttgtgttggtttatttttcatgtgtttacattttacatttctccgcacaggcttcgttgctgttggggtgcatcatgtcttccaacactcttattgcttatcccatagtaagccgatatggattgcagcgcaaacccagtgtgatgttgagtgttggtgccaccatgctgtcgttattgttagcgttagtgttgttggcaggcattgtctcttctgctgaaagtgggtcggatgtgggattttggttgctgctcacgctgaaatttgccatctattgtgccgccatgattcttttaattcctcgatttacacgttactttctgcgccgctatagtgatgcggtgatgcagtatgtgtttgtaatggcgatgatgttcatgagtgcagccctgagtgaagccgttggttttgaaggtatatttggcgctttttttgcaggtttgatactgaaccgttatataccagccgtttctccactgatgaataggatagagtttataggcaatgcgctgtttatcccttacttcttgataggggtggggatgctcatcaatttgcgaatcctctttgctggcggacaagtagtgttctttctattggtgatcacctttgtgggaaccgttggaaaaatgctggctgcctaccttgcgagccatcgttttcggcttccgttctcttcgggaacaatgatgtttggattgacttccgctcatgccgcaggtgctatcgccatggtgatggtagggatgaggatagaactggcaccaggagagtttcttgtgaatgatgaaattctcaacagtgtggtgctgatgatactgctcacctgtatcgtttcttcgttaatcacagagcgttctgcccagaaaataacattgcgtgatcagcaaattgcatcggatgaagaggcgtctctcgatgatgagcatatccttgttcctataaaatatcccaattatgcagaacaactcattggtttggcaatcttaatgaaaagccgaaagctcaacagacccctcacggctattaacgtggtgtatgaagatgagcaaatgcgagtgaatcaggaaaaaggcaaacatttattagaacaagttacacgatatgcggcagggtcggatgtgcaggtacaatcgcaggtgcgaatagccgtgaatatcgccaatggcatcaagcatgctttccaagagttccatgcaaatgagattattattgggatgcacacgcacgctgaggtttcaaagaagttttgggggcaatttcatcaaagtttgtttaacggattgaattgtcagattatcatggcaagactgatgcaacccctcaacacactccgtcgtattgtggtggcagtaccttcgagagcacaatttgaaccgggtttctaccggtggttggaacgccttttgcgtatggcgacgcatttagattgtcgaatagagtttcatggcagacaagacacgttggcgttgataagtgcgtatatacaagagaaacatcctgtggtgagagcggcatttaaggacatggaacactggaatcagtttccgcagttggcttctacgattgccgacgatcatatgtttgtggtcattacagcgcgcaaaggcacagtttcctataaaaatgcgttagaggaattggcagaagagatacgacagaacttttcaggaaaaacgattctcattgttttccccgatcaatatgaggctgtagagggcgatatgacttactctcaatcccaacatcaagaagaacgttcggcgtatgacgttgttggaggatggataaagaataaaattgaaaaaacaaaaaaaatatgatagatatacaaggcgttacaaaatcgtttggtcatctccaagtattaaaaggcattgatttgcacatcaacaagggagaagttgtgagtattgtgggaccgagtggtgctggcaagacgactttgcttcagataatcgggacattagataaggcagaccaaggacaaatcatggtagatggcgttagagtagaccagttatcttccaagaaactaagtgattttagaaatcaacacattggttttgtattccaattccatcaattattgcccgagtttactgcactcgagaatgtcatgattccttcattgattgcaggtaaaagccaagttgaaacaaagcagcgtgcacaagagctcctccaatatatgggacttttggatcgtgctcgtcataaacccaatgaattgtcaggaggtgaaaagcaacgtgtggcagtagcacgagcattggtgaatcatccagccgtgatattggcagatgaacccagtggtagtttggattctaagaacaagacagagctgcatcagttgttttttgatttgcgtaaagagtttgggcaaacctttgttattgtgacacatgatgagggtttggcgtccatcaccgaccgcaccatccacatgaaagacggtaggcttatccaaaatgtgccatgccaagcagaaaatgatgtgcagtgtcagccttccgctcaatgctctgatgttgaaactcttcatcctcaggagcattcacaagaatcttctatctaaatatccaattacataatgaaatacaatcaacaaaaacagcgtaaagaccatacgggagaagaggcgcttgaacaagctcatgcccccgaacgctcatgggttcgccttggcgatgataatcgtttagtgatattaagagaggtcgagtttggtttatatcttgatggtggggacgaaggtgaaatattgttaccgaaacgttatgtgccagcacattatacaattggcgatgccttggatgtctttgtctatttagatcaagatgaacgattggtagccacgacggagacacctttggctaaggttggcgagtttgcgttcttgtcgtgttcatgggtcaatgagtatggagcgttcttgaactggggtctgatgaaagacttgttttgtccctttcgtgaacagaagaaacgcatggagataggacatcaatacattgtttatgtctatgtggacgaggaaagttatcgaattgtttcttctgcgaaggtggaacattttctctcttctgacaaaccttcgtataaaagtggagaagaggtagatatcttggtgtggcaaaaaacagatttgggttttaaggtgatcatcgacaatcgttatagcggacttatttataacaaccagatatttagacctgtacatactggcgatcggttaaaagcgtacatttctatggtgcgtgaagacggaaagattgatgtaacgttgcaaccgtttgggcagaagcaaacagagagtttagcagaagagttgttgcaatatctccgttctcatggtggatattgtgagttgggggataagagcgatgccgaactcatcaaacaacgttttcaggtgagcaagaagacgtataaaaaggctattggtgacttgtataaacgtcgattgattagtattcaaccagatggtatccgattagttgacgaccgctcttgataggattgcgaacatcttcagcactcccgtctatacaatctaaaaaaacttccgaagtgttgtagattcattgctacagcatttcggaagttttgtggtgcgcccgataggactcgaacctacacgtcgcaaaacactagatcctaagtctagcgcgtctaccaatttcgccacgggcgcaaaaaagattgcggttgcaaagttaatcaataattttataaaataatcttgtttgctcgaaaaatgttgttttattcttcagaagttcctcttttaggagacttcttctcaagttgtaactttttcttcagtctcttccacccttccactccgatgatagtaagcccactatactgacaggttttagctaaaccaaagagtattgtccaccaaacacctttggcagttgcgcttatcggtagtaacatttgtgcaaaggaaagaatgtagaaaggaatgcacatgcccaatacgatgacacctgtccgaaatgtcaagctttttaaccattgatgaaagagagtgaatagtcgtttcatgctgttgatgatacttttgggttagcaatgacagtgaagataatggtatggtatctcgctatttcgttgttgttgaagtgtgagtacttgatagtaactttcgtgcaaactcaataagcgtgtcttcgccttttaaggtgtccgtctttttcatcatgacaacgtggtcggggtctatgccaaattctgtacttttcttgtttgcgtcaaagatagggcatgcagagaatcttactccccacccattcggcagctcgcttgaaaaaggaagtcctgctcctccaccagtcttatctcctacaattgtcacttgtggacaagccttcatgtatttaacaaattcgttggctgcactaaaaacctcccgattggttagcacaatcactttcttttgccacctaacacctttggcagggtgtaatatttgttcacgcatccttgaaaaatcttgatgtcctttgcctgttttgtgttgtatgtagccaactaacaaatcctcattggtaaagcggcttgcgaactgttctgcagaagttaacatcccaccaccatttcctctaatatctataatgagtccattgcaaggtgctaaatagaataaaatgttgtccaagttgcccgatccaatggctccctcaaacgaacgacaggagatgtatcccacatgatcgtctagaatgcaataccgcatgccagccgtgatgcgatagtcggtgccgatatagtggtctataagagtttcatcaaaattctttggatagtcttcatgccatttccaataccgtccatgatcaaagcttgtgtaaagatttacatgtccatctttgagttcggcaagcattttcgccatgatttgaaactgttggtactccgttagctgttgatgcatttggtgagagtatcgttgatagatagcataccagtcgatttctttctcttcaaagaagcaataattctcatctaaaattttccatagggcttctaaattgccttgtggggtgtcttcaaacacttcgtcctgcgtgcaactacatagccccagacttaatacgagtatgcataagagctttttcatggtaggatatgtgtgagtgtaaatttcttcactaagcctattacgagagcgtttgaataggagtgatacttcaagttgttcacgtttgcttgttggtaatctcccaaataacccactctgaaagttgtcttccaaagtgtaaagtcaagtgtaaccaactgtttcaaagcaggtgcgtttcctaaatgggtacaaacgatgttgtggtcgtagtcgccccttgaaaaaatctcgtaataagactgtccgtaattaggcgagaacatcattcctacgataggagtagataattcatagcgtaattgtaatggaactttttgtatttttaatgcgtaggaaaggatgagagcgggagcgatattgattcctaacttggcttgcatcggattattcccgttccttccattatagagtgcgcctgcatgaaggttcatttttccacccgtcatcaactgtaaatgcttttcaaagagctgccattggtaaaagacaccatattcaaactggtacattccttccatttcgtaagcgttctttgcccgatttttggcgtaagtgaagttgccttgatgaattttcagttgcatccagtgactctcttcttttgttcgcatgatgtgtgaaaggtagtcaatgcgataccccgtatatgtttcggcagacagataagtgtccaacaaagacgcttgtccatagcctatcatatcgctttttgtcgtgatacgttggggtattgccctctcttcttgcgctattgtgcttgtcactccgcccatcaagatgaaagcgactgctattcccctcacgcttatcttatttaggagccagttcctcatcgttaaacaaacttagttgccccgttatttcgtcaatcacttgttgctgactctttccagcatcagggtcaagattttcttcttcttcatcatcattggcgtcttcttctggctcgtcatcttgctcaactacaggttggcgtgttggttcgagttcttctatttggtctatttcccaagtagtaagacgctttccttttgccttaaagccttttacggcaataaactcctcaacgtctatctcttggctgggacgtgaggaatcattacctccaaaggtaagtagcaagcgaggataggcaacttcggtaagtaaaaccaatttgttgtttggattctctcctaagtagttttgctttttcttcattgcctccattgtaaagcgctttacatacggatagttttggttgtctgcatcaaacagcacggctgtccataccttcgcatcgtcccatttctctatgatttggatattgtcatcatagtgattgttggcatcgaagtcggtgatgtagaattccccgttgtcaagcaccaccaagatagagtcatcatcgttgaactcacctaaatagcgtccgtgttcctcatagttaatgcgatttacatcagggtcgaaccatacctttctaccgcccagtgtactgtgcccatgactctttagtcctattcggtgaataggcttcttggaaacaatatttcctttggcactgcgcgatttaatcatgatgtcagagaaatctttttcgatgaagatgttttgtcttggcttggaaggatcaggctctaacgttatctttatcacttcagcttctccgtttggattggcagtaaaatatactattctggaattgggcttaccctgagtcaagtcgtactctttgtcacgagtgaaattggtaacattaaaacgcttgatgaaatatattccgcttttgccgtccttgtaaacaacgttgtaagtggtacgcttgtcgtttttcttgaacacctgaacatgaatcacattcttgcccacaaatatcttgtctgctacccttatgattttgtacttaccgtcacgataaaaaataatgatgtcgtcaatgtccgaacagttacatacaaactcgtcctttttcagtcctgttcctacaaacccttcttgtcggttgatgtatagcttttcattggcttctaccaccttcgtggcttcaatggtgtcaaagctgcgtatctctgtaagtcgtggatgctctttgccatatttggtttggataaattcaaaccaattgatggttacatcggtcatgtgtgccaagtcgtggtctatttctttaatttcggctttggtacgtacaatgaaatcatttgctttgtctttgttgaactttaggatgcggtgcatcttgatttccaacagtcgcaagatgtcgtcgcgtgttacctctctgatgaaatgcggcttaaagggttccaatcggtcatccacgtgtgccacagccgcatctatatctttggcttcttcaaatttcttatctttgtagatacgttcttcgataaatatcttctcaagcgaagcaaaaaataattgttctaatagttcgttgcgtctaatttccaattccttgcgcagcaatcccatggtgctatctacgctgtggcgcaacacatcgctcacagttaaaaacacgggcttattatcttctatcacacagcagttgggtgatatattgatttcgcaatcggagaaagcatatagggcatcaattgttttgtcgctactaattcccggcgacagatgaacttgtatctccacttcggcagctgtgttgtcgtctactttcctggcttttatttttcccttgtcaatggctttgagaatagagtcaatgagcgttgtcgttgtcttgctaaatggaatttccttgattaccagcgtcttattgtctaacttttcaatcttggcacgtacttttagcgttcctcctcgttgtccgtcgttgtatttttctacgtcaatgctgccacccgtaggaaagtctggatacaatgtaaagggttcgcctttcaaatagtgaatagcggcttggcagatttcattgagattgtgaggtagtatcttcgaactcaaacctaccgcaatgccctcggcaccctgtgtgaggagcaatggaaacttggctggtagtgtgataggttctttgtttctgccgtcataactgagttgccagtcggtcgttttagggttaaaaacaacatcaagggcaaacttagacagtcgagcttcaatgtaacgtggtgcagcagcacggtcacctgtcaagatatttccccagttaccctgcgtgtcaatgagtaaatccttttgtcccatttgcaccaacgcatcgccaatagaagcatctccatgaggatgaaactgcatggtatgccccacaatgttggcaaccttattgtatcgtccatcatccatgcgcttcatggagtgcagaatgcgtcgctgcacaggttttagaccgtcctctatgtgtggaacggcacgctctaagatgacatacgaggcgtaatccaaaaaccaattcttgtacatcccactcaaatggtgcactgccgaagcatcaaatcggtcggctggttggtagtcagaatgctggtcggtagtcaattcgtcgtcttctaattctatatcgtcttgttggtttgtctctttgctcatgaacttttctgtataggtagatttactcaacttgcaaaagtaggaaaaaaatggcacttttgcaaatcattttccatctttacacgcccatgatgtgatgaaaataaagcaagtaaaaatgttgaaaaattaggacattcgttcaaaatacgcgcgtttttacaaccaagtgcctctttggtcggaaatatgcgagttttatagttggttgacaatcaacgactttactaaaaatagcatctccttttgtttgttgaagcaatgctataatgacgttgaagcatgtagttaaccgcccaatctacatactctaagacccttatctgcgatatataggggtgttatctcaatgctttatgtattttcagcacttaaaatggagattttatgccgttttcatccccattttttctctattttgcaacttgaaaattttgaaattttaggacaaaacaggtgcgatttttgttcgtcagtgtaagataaaaatcatttttcatgcaacaaaaagatgtccacatagtgcaaattagtcaaacgattagaggacaaataccagctcatcgcccttgctctcttgctcattatacacaaatccttcgtattcaaaggctttgagcgcatcgacagtgtgggcatgatgtataatagcatggcgtgctaaaccgccacgacacattttagtgtacactacaatggttttcagcttcccgttttttcgtactttgaaggcaggttctatgatgcgaaccgatttcttgatgcgcttccaatcaaacattttcttcatttccgcactcgccaaattcagcagcacaccgtcatcagcacgaacggcatcaatgaggagttgtgtgaggcgtggcttccaaaaatcaaacatcgtttgattgtcgtactcggggagctgaacgcacccctccagtcgatagttcttaatgccgttgagtggacgtagtagtccatagagaaacgaagtgagccacaaatgctggtcggcatattgaagttgttgaaccgacatcgatgctgcatctatccttttatatacgattccgttgtaagcaagaatagcgggtagggtgggcgaaggttctaaaaaatgggtataacgcagcttgttgagtgaagccaattggggattgatttgtaacatctccgccagttcggtggtgctatatttcatcaagtacaccgacgtttgctcagcttcgtgttgaaattgcggcagcgtggttgataaagccaagtctggcgcagcatcagtcatgtcctttgcgcaagagagtagtatttgcatcttgatagttttggcaacaaaagtacgaaaagtatcggataatttagggaaaacaaatgcaaaatctcacgaccatttttctatgatgatggttttacttcaaaagtcagtaacttgcaatgcgctatgaatgttggcgtatgtgcaggggtgacttctgttcatgtagcaaataatttttgcttgcgcaaaaagtttgtcgcaggaatgagaatctgctcagatgttaaaggctggttctataaattaccaccgcacatagtcatcaaatgtttatgaaatacgttttgttatcttttggcttctttttggttcaaaatgtaagttcgttcagtcgtgtagctcgctacactccttcactctcttgcattttgacctcaaaaataagctcaaaatctaacaaagctaatttatagaaccagcctaaaatgatagttttcgttacaaattttgaaaataaatataaagagtaggctaaaaatctatatatttgcaaaattatagaagagaaatcgccatgttcatgaatcgcactccctatgtaggacgagttgggacaccgtgtttagggtattgatggagagcggcaattttaagaactgtaaacaatattaataattaaaaatgctactatgagaaaatttttgatgattctttttttgatgggaatgatgttccccaatcctacacttgccaagaaaaaagacaagaagaagactgatgcactcaaggtgttgaccgataaacccaaggaaacgggtgggatagaagattataacaaagctatcaaggacgccaaggtgtgcaaaggaatgttcaatacctatcagaaaaaggatgggaagttgtattttgaaatgccagattcggtgttctcgcacttctatatattgtccaatcgtatttcaaagacaagcaacaccagcgactatgtggctggacagatggttacgtaccccatgttgctgcgtttcaccaaggacagcacgcgtgtgtacatgcacttggttcaaaatgataatgtggtggcgaaagacgatccgatagctgtggcatttcgttctaactttgctgatccagtcttaaaggcgttcaagatagttggacgaaaggacaaaaacgtactcattgaggtaacgagtttctttggtggtaatgaaagatgtattagtccgataaagaaggacaaccccctgtctattcttcttggtggaaaaaaatcgctcaaaggaactttcgtcgctgatgcatcgggtatcaccgaagtgaaagcttttcctaaaaatgtggagattaagactgtgctgtcttacaatttgacagacaaggacatgccatacacagtggagatgcaccgctcactgttcttggcacctgataagcccatgcgtatgcgtctaaaagacaaacgcgtaggtttcttcgacacagaaaagaacatttattcttcgaacaaagataatatagagacagagacctatattaataggtggcggttggaacccaaggatggggaatgggaaaaatattataacggtgaacttgttgaacccaaacaacaaattgtttactatgtggatacggctttccccgaaaaatggcgcgccactgttcgacaaggtatcgaggattggaacaaagcttttgaggctgcgggtttcaagaatgtggtaaaggccttagactatcctaaggatgatcccaacttcgaccccgatgacatgcgctacaattgtgtgaaatatgctgttaccgacattgccaatgctatgggtccgagctatgttgacccgcgcacgggagagatattgactgctgatgtgatatggtatcacaatgtggtgtcgttgttgcacgattggcgatttgtccaaactgccgctgtcgacgcacgcacacataaggctgtttttgatgatgacctcatgcaagagtccatgcgttacgttgccgcccacgaagtgggacacacccttggcctaatgcataacatgggtgcaagttacgcatttcctgtggattcattgcgcagcccctcgttcacacaaaaatacggcactacgccaagtatcatggattatgctcgcaacaacttcgttgcacaacccggtgatttggagcgtggtgtaaaacttacgccacccgtattgggcgtggctgatatttatgccatcaactgggggtatcgattgattaaaggcgctgacacgccagaggcggagaaaaaaacattggaggcttggatagatgcgaagaagggaaatcctatgtttgagtttggcgctcagcaatttatgggaactgttgaccctactgcacagtcggaagacttgggtaatgaccatatcaaggctggtaattatgccatcagcaacttaaagattatcgtgaaaaaccttgagaaatggacctttgagaaaggtaagagctatgatgacgtgactgcaatgtacaaagaggtggtgtctcaatactcaagacatcttcatcatgtcataccatatttgggtggtgtttgtttccatgagattagacaaggcgacaaccaaaaaggtgccaagacctatgtggacaaggttacacaacgcaaggctatgaagtggttggtgaatcaagcactcacatacaactcgtggttgtctccgcaatcgttgttagtgaaattggatttgccgtccactgtaaatatgaagctacaaaaatcgttggctggtgggatctatggcgctaccacgttgttcagggtgagcgagggttataaagttaatccgaacaagaattatagtctcggacaatatatgaacgacgctttcaatgagatatttcaaaacacattgaagggtaaggctctttctgaatcggacattaatttgcaggcttccattatctcacttttcaagaagagtgctggattggacagcgacgcttctaaaaagaaaggactgtcattgctccaagagaagttgacggatgacaacatttgcctgccctctctgccatgcagccacacagaagcagaatattctttcatgcgcattaactacggtttaccagccttgtcgcccaacttgctggagccacttatgcttagtcaactgaaaaaagtggtagctctctacaagcagaaaagagcgacgggagatgcgaagacgcgcaattattacgaatatcaaattttgcaaatagataaactgttaaaaaagtaaggctatgagaaaattctttttgttaacattgctgttgtcggttgtgtgtttcatgcctgtattggcacaagacatcaccgtatcagggaaagttgttgactcctcaggcactcctatcataggagcagcggtgaaagcacaaggagaaaaaacaggtgtgattactgataaggacggcaatttcaagattgtgatgcctaagggaaagaacaaccttgtcgtgtcttatttaggttataaagagatgatagtgcaagccattcttggcaaactcttaaacatcaagatgaaagaagacgctcaaaacttggatgagctcgtcgtggtgggttacggaacacagaaaaagtcggcgctgacgagctctatcgagacggtgaagggcgaagacctactgcgcatgcccacccccaacctcgaccaagctttgaatggtcaggtggctggtttgcaagtaatgtcactctctggtgacccaggcgcagcccgagaggctaccattcgtattcgtgccatgtcgggagcggtcagttcgccattgttggtcatagatggtattcctcgtttttcggagaacaccacagagggagaacagcgtctgtctgacctcaatcctgatgatatagagagtatttccatccttaaggacgctgctgccgctgccgtttatggtgtgcgcgccgccaatggcgttatactcgttaaaacaaaacgcgcctctggcgactctaaagtgcgtgtgaactatcgtggacagtttaatatccaagaagctacgcaattccctcatttcctaaagagctacgaatatgccaagctctataacaaagcggtggagggtgtgagaaacgctcagccttatacagaggaagaattggagctaattaggacacaatccatgcccaataaatatgctgataccaatttgctcgactatttgaaatcgcacggaacgtccaccacaaacgctgtatctctctctggtggtaataagtttgtaaggtattacatttctggtgcctataccaatacggtgggattgtatagtggcgtaggacgcgatcgtttcaattacgctgcaaagctcgatgccacgttagccaaaggattgacattatcgcttgacatgagtggcgttcgatcagaatataagaatacaagctacaccactatcgatgcagcatacagttatgccccgactcaaccgtttgtctacgataatggcgatttggcaagtatcagtcatgccaaccctttgatatcggtgcgcggattaggaggttataaacaaatgacaaccaagatgaacaccgttacggctaatctgaagtgggaattgccttgggttaagggactgtcggtttacggaagggtaaccgttgataataatagctcgttaaacaagaactataacaaccccgtaacgttgtatttgtacaatgaaaaaaacaaggagataacggtagacaagactactatttatcctaaagctaaagtaagtgtatatcaagggacccagtttgttgataacgccttgatagagtttggtgccaattacgaccgcacgtttggtggcaaacatcatgtcacaggattgatagtagctaactaccaatcttataagcgcaaatctatggatggaaccaacaacgacttgcctggtttatatcccgaggttcttggttcgaccaatacaggaacgttgcatggagttgacagcgaagtacagcgcgcatcgttgattggacgtgccacttacggattctctaatagatatttcgctgagttcagcttccgtatggacggatctgcaaagtttcatcccgatcatcgttgggcgtttttcccaacggtatctgcatcatggattctctctaatgaagagtttttcaagagttggaggcagaaagtgttgagcaatgttaagtttcgcttgtctactggcttgttagggcgtgatggaagtgtgcaagattactcatacttgcttaaatacatttattcgcccgcttatggctacaatgttggcggcgtattcaaacccgcagttatcgtggccacaggaaactatcccaatacacgcttgtcatgggaaaagaatcgtgattacaatgttggcatagaccttggattttgggataacaggtttgggcttacttacgagtattacgttcgttaccgcacggatatgctgacacctgctcccgactatttgtaccccgcttctacaggtaccaatggtagtgtgccattgatgaattttggcaagttgaaggcttggggatgggatttaacgctcacgcacagaaacagcatcaacaagtttaggtatgacgctgcactcacgttatcattaggacgtgacgaggtgatagactggggagatgaatccaatcaattggagaacatgcgaagaaaggggcaaagtactggaaccacatggatgtacgagtcgttaggtttgttccaaacgcaagaagagatagataattggaaactcaaccaagatggaacgtacaaaggcaaaaacaaaacgataaagcctggtgatatcaaatacaaggatcagaatgatgatggcgttttggatgacaaagacttgaaacctttcagagattcacaatatcctgatttcactggaagtttacgtttgggtgcgagctacaaagggttcttcgtgagtgtcatgttccaaggagtggcaggcttcaagcaatatgtaagcgagatgtactcattagaaaacggtagcttgcccaagttccaggattaccacctcacagattgttggactcccgataaccccaacgcctcgttcccacgtgtcaagttggcaacggcaagagacaacaaccgtaagaagtcatcgttctgggtgcgagacaacagctttgtacgcttaaaatctgtcagtgttggctactcgctgccttcttctgtgttgagcaaactcaaactatcatcgcttagtatatcattgatgggtggcaacctttatacatggagcaaactcaagtacatggatccagaatcgatgcgaggatatcctatccagcgcacttatggtatcaatgcgaatattggtttctaaacaaggaatacataaacttatgattatgaacagaattagtaaatatatattgactggctttgcctctttgtcgcttacttttgtgacaacaggttgtgacgacctatttaacgacgcgcctgttgataaacttgcggagccgagtatttgggcaagccccaaccttttggacgagtacagtttagtatggtaccacaacatctccaacggcttcagcacaatgatgtccacaagttggtttttgcgttatctgtcaaagccgtacacaggctggtttaccgaccaaatcacctactcgcgtacagaatggagccgtactattttcgctgaggaagttgctggcgaagaagaagctatcaatactgcgggcttaaatgagtggggcaaggactatgaaatgatacagcacatcaataggctgttagccaatgcaaacgaaatagccgatggaccacataaaaatcgtgttttgggtgaggctcacttctttagggggtggtattactaccaactcctccgtcgttttggtgcaccaatgcttattcaagaattgtacgacccgttgaatgaccaacgcaaattcccgcgttcctcatacgaggagatggtagcttatatcgcttcggaggcggacaaggctgccagtctgcttgcggtgagaaacgaaccagagaatgtgggacgtgtaacaaaaggtgcagctatcatgctcaaagccaaagcgtacttctgggtggggtcaccagctttccaaaacaagggcaaaaccatctacggcttcaagtctgatcgttccaaagagatgatgcaaaaagccgttaatgcctatgaagaattgatgcgtttgggctgctactcattagtgccagttacaggcaacaccgaaagtgagatagccgagagctacaattcacttttccgactccacaacagttctgagtctatctacgagattcaacacagtgctgacggtattgtagatgatttcggacaccgtctcgacgaagacgctgcctcaccattctttgctggaaccagttgtgcatatgttcccacccagaaccacgtggacgaatatggtatgcgagatggcaagacctatgatgcacaacatccgtacgcaaaccgtgattatcgcttttatgccaacatcacttatgatggctcaacgtataacaaacatgagtttgagatacattatgctgtggacaagggaaaggaggtgcctggcgctgaccttacaaaatacggtaccagtcgtaacgctgccgtaacacgcacgggatactacatgcgtaagtttcttgaccccaaaacagagcttttcggcgatagcaaatatggtagcaaacagcattatatcatttggagatacgctgaggcgctgctcgattatgctgaggctcaattccgtgtgggcaatgctgccaaggctttggaggctgttaacgaggttagacagagagtacacatggacgctttgccctccattacgcttgagcagatacttcatgagcgtcgtgtggagttagctttcgaggagtctatatattgggattatcttcgattgggaacagcgttcgataaattgaacggttccactaaccccttgcagggcatgaagattgtcaagttggcagacggtacaactacctatacagtcagcgacctgaagagtcaggctgccgaacgagtatttagagccaaccaatattactatcccataccttggtcggaggtgcggtatcatgggatagaacaaaatgagggatggcacgagattaaatagtatttcttgttatagcatgctctttaattatttatacgtccgcgacgctctttcttgagggtgtcgcggatgttttttggttgatgctgttttgtcacggatgcgctataaagcagtctttgtaaaggaacaaagtcctttttaattgaagctccgttgcaaaaatctaaagaatttaagccgagatagccaagtactcaaaaatattgcgtatctttgtccgataaaatatactcataggatataagaaatggcacaagaagatgttttcaaaaagattgtgagccactgcaaggaatatggttttgtattccccagtagcgatatatatgatggattggcagccgtttatgattacggtcagaatggcgttgaactgaaaaaaaatatcaaagaatattggtggaaaagcatggttttgctgcacgacaacatcgtgggcattgattcggctatctttatgcaccctactatctggaaagccagtggacatatcgatgcgtttaacgacccattgatagataatcgtgattctaagaagcgctaccgtgctgacgttttgatagaagaccaaatcgccaaatatgaagaaaagattgccaaagaggtggcaaaggctgccaaacggtttggcgatgcttttgatgaggcgcagtttaaggcaaccaacaaacgtgttttggattatcaagccaagcgcgatgctttacatgagcgttatactgcggcgatgcagggacctgatttggatgaattgaaacaaataatagtggacgaggaaatcgtcgaccctattagtggaaccaaaaactggaccgaggtacgacagtttaacctgatgttctccaccgagatggggtcgctatcggatgccacgaacaagatttatttgcgtccagaaacggcacaaggaattttcgtgaattatcttaatgtgcaaaaaacgggtagaatgaagttgccctttggtattgctcagataggtaaagcatttcgcaacgagattgtggcacgtcagttcatcttccgcatgcgtgagtttgaacaaatggaaatgcagttcttcgtgaaacccggcacagaattggagtggtttaagcgatggaaggagctgcgtatggcatggcatcaagctttaggctttggtgcggaaaactatcgtttccatgaccacgagaagttggctcactatgccaatgctgccaccgatattgagtttaagatgccatttggctttaaggaggtagaaggtgtgcactcacgtaccaactttgacctttctcaacatgagaaatttagtggaaagagcatcaaatattttgaccctgaaaccaacgagagttatgtaccttatgtcattgagacttctattggtgtagatagaatgttcctttctgtgatgtgtcacagctatcaagaagaggagttggaaggaggcgacaagcgcattgtgctacgtctgcctgccgctttggctcctgtaaagtgtgcggtgatgcctttggttcgtaaagagggattgccagaaaaagctcgcgaaatagttaatttactcaaattccacttcaataccagctatgacgagaaagattccatcggtaagcgttatcgtcgtcaggatgcagtgggaacaccttattgcgtcactgtcgacttcgatacgttgaaagataacaaggtaactttgcgccatcgtgacacaatgcagcaagagcgcatcgacattagtgagctttgtgcgcatattgaagataaggtaagcattgttagcttgctgaaaaaactacaagcttaagaaattggatatgaaaagaaacaagttgttatatctcatgatgctcttattgggaatgggaatcatggcggcatgtagcgaaaatgatggtgaggtagaagaatttgccgattggcaaaataagaatgagacctattttaatcagctgtatgcttcaacacagcagcgtattgccaagggagaccaaagttggaagattatccgtaagtggtcattgccagaagataaccaacattttcatgcgaacttgggagattatatcattgtacatatattgaatgcagggaacagcacatcaggaagtcctctgtacaccgattcggttaaggtgaattatcgtggacgtttaatcccatctgcgacctatacaggaggttatgtctttgatcgtagttatagtggtaagtacaatccacagacaatgcgtcctgcaaagtttgcagtgaacggtttggtagatggctttaccaccgcattgatgcacatgactattggagatcgctgggaagtgtatataccacatcagttagggtatggtaacaaagagcaatcgaatggaactattccagcttattcaaccctcatttttgatatcggattagcaggcttttatcgtgcagaggctcctacagttcgagccagcgcatccaaaggaaagtggatagagcggtaatttgcaccgttgaaaatgatatttgagcgagcagttttatggtgaaactgttcgctttctttttcttggcaactttgtacagcgcacggtcggggtgggtatgctcaattcggttttgttgatttaggtcaagaatcaatatatttcatcgccttttgtcctattttttctttgttgtgtgcgaaaacagtcgtatctttgcaacgtcaataagacaaaaaggagatgccgagaggcatccattgaatacgattaaagatattatttgagatatatttaggttattagtttttaaggtaaaagcgaatattcaggtatcgtcaggtattagataaggtgaaaagacagtaagggtaacaaaggtattagtcgttaggtaaaaagaggatattagttcaaggtagaagataaaggataaccaataggtagatggtttagaggtaaaatttgggattgttagtaaggaaaaatcttcaatagaggtaggctccatagagaaggagtaaagacaggaaaaagattgtttaggacaagatgaaaagccaagttgcagcattgctgcactggctatgctgggggtgggacaaacagttcgaagaagattccccctttttttgagaaacttcatgattaaatagaatatcattagcgatttcacagacaaagtgagtcgcttttttgttatagcgagtcttttatttaataacggtctgcacatcaaaaacagcaccgacaatgtcgtgtatttcatattggtggaacgctgcatggaaggataaaaaaatcagaaaatactttacaaagtgcctctcaaaactcgcgtgaaaacaaccaacggcaaactgggtcgcaaatacgcgagaaatgagcgatgttcataatttgttgctgttgaagatgttacgcttatatcttttcttttcattttcatttttacgattgtttggcgactaaagcattgagataagcttagaatttgcatactttaaggctgctatggtatgtgaataacacccttaagtggtgtttccaagaccgttaagtcaatgttctaacacgaagaggcctcaattttatcaaaatcagcataattttgttggtcgtttacctattgattttttctatttcgcagattttagatggtcgttttttggtaaatttatgcgacaaaaacctcgttttgaaagtgctttcatcgtttcaagttcactccaaatatcggcagcgatatttttgtttgtcttttgcgattttctttcaaatttcagaatatgtaaattttaatctgtatctttgtgcgagaataaagaggaatgttttcgagtaaaaaaagtgaagctttattagcgaatattcgtgaaaataggacattaacgcgaggcgaaaagctcaatttaattgtagagttgagtattccgtcaattcttgcgcagataaccacagtgttaatgttctttatagatgcctccatggtaggccatttaggcaccgaggcgtcggcttctatcggtttggtggaaagtaccacgtggctattggggagtgttactgccgctgcatcgatgggtttctcggtgcaagtagcccattttatcggagccaatgattttgtgaaagcccgacaagtgtttcggcatggactgatttgtaccctgatgttaagtgtggtaatagccttcattgcactttttatttatcaacccttacccttttggctgggtggtacatcggatattgcacgtgatgcttccctttacttcttagtgtttggattagccatgcctttcatgcaactcgccagcctgacaggagccatgctaaaatgctctggaaatatgcacattccaagtattatcagcgttgggatgtgcgtgatggacgtcgtctttaattattttttcatttatgtgttgcatttgggcgtgttgggtgccgcatttggtacggctactgcctttttaataggatcgttacttcaagcctattttgccatttttcgtaataagatactggcacttggacaagatcacgagccatttcggtggatgagtaactacgttaaaaatgccttgaaaattggtgcacccatggcggctcaatccatattgatgagtggtgcacagattgtgagtactattattgtggcaccgttgggcaaagttgcaattgcagccaatactttcgccataacggcagaaagtttatgctatatgccaggttatggaattggcgaagcagcaactacacttgtaggacaaagtgtgggtgcggggcgctatgacgtgtgtaaaagttttgcccatatgacggtgtctttaggaatggcagtgatgtccgtcatggcagtgttgatgtatatttttgcaccagaaatgataggtattcttacacctgtcgaggaaatccgtgtgttgggcattcagagcttgcgaatagaggcgtttgcagagccattttttgcagctgccattgtgacgtatagtgtatgtgtaggtgctggcgacactttgaaaccagccatcatgaacttgttgtccatgtggtgcgtccgacttacgttagcagcaatgttggcgccacagtatggactgaaaggagtatggatagccatggccatcgaattatgcttgagaggatgtatcttcctatatcgtttgttttctgggaaatggctgcataagctgcatcaaataagtttgtaggcttagaacttgggaaaatcataatatttttataattttgtggctgtcgtttttgttaaacgaggtgtgcaaatagctaatattgcacaaatctaaatctttataataagcaataaataaaaacaattgtatggaaaccgaaaaactaaaccaagtgattagccctttcctcatcgagggaactgttagtaaaatttcacctttaggaaatggacttatcaatgacacttataagattgaaacaaaagaggataattttcccgattatgttttgcaacgtgtgaataatgaagtgttcacagatgttgatttgctacagcacaatattgaagtggtgaccaatcacattcgtgaaaaactacaaaaacaaggtgagtctgagttggacagaaaggtgcttcgattcattcctacgaaggagggaaagacctactttaaggatagtgatggcaagtactggcgaattagtgtatttatcccagatgccaaaacgtatgagttagtagatgcagctcactcgtacgatgcaggcaaggcatttggtcattttcagtcaatgctaacagatgtaccagaacagttaggcgagacgatacctaattttcacaacatggaactgcgtatgaatcagctgagggaagctgttgaggctaatcccgtaggcagagtggcagaagtgcaagatatgttggacgaattagagacgcatgccaacgagatgtgcaaggcagaacagttgtatcgtgagggaaaactgaaaaagcgtatctgtcactgcgataccaaggtgaataatatgttgtttgacgaaaatggcaatgtgctttgcgtcattgatttagatactgtcatgccgagttttatcttctcagattatggagatttcttacgtacaggggctaatacggtagcagaagattcctccgaatttgataaaatagacttcagaatggatatcttcgaggcgtttacaaaaggttatttagagtctgctcatcattttttagagcccattgaaatagaaaatttaccctatgcagccaaattgttcccatttatgcaatgtgtgcgcttcttggcagattatatcaatggtgacacctattataaaattaagtatgacaagcataatttagttcgtgccaaaaaccagctctgtctcttcagaagtgcttgtacacacgagtcagcaatgaggacatttatcaagacatgcttaaatgaaatccaataggaatgaagacattaaatatacaaaaattgcaccaacgtccatccgctgccgctatgatacctgccatcatggattctcagaagattgcgtttgagacaatttcggttgccaattggtgtgagcaatatccatatacgccgcaggtgcggtttcgcatggcttatgatgaggcagctgtctatttacactactgtgtgtctgaagacagtgtgcgagctgtggcgaccgatgataacggacgtgtatgggaagattcatgctgcgaattcttttcacagcctgcagatgatgatacctattataatatagagtgtaattgtgcaggtaccattttagtgggttgcggcaaaggaagagaaggacgtaagttggctccactatcagttcttgaaaagattgaccgttggtcaacctttggacgttgttcttttgaggagcgagtgggagcatacgattggcaattggcactactcatccctttgagtacattcttccaacatcaaataaaacccttgagtgggcgaactattcgtgccaatttctataagtgtggcgatgccttacagaaaccacattttctgtcatggaatcctattgatatagagaagcccgattttcatcgtccagatttctttggcgagctaacatttgagtagacgagtagcaaggcgtttctcattctctccttttcgataagttgtttaggcaagaaatgattaactttgcagcctatgaggaaaatctttagaaagatggcggttgcgccaacttcgttgttagttttgatgggtatcgtgctgctgttcatggcttgtggtgataagcatcggaaagaaacgaaagaaaagcaagtcgatattgctattgacgatagtctgcgttctcggttggcagcattcgcacaagaccccagggtgcagggtaagtttgcctttcatgtgtacgaccttactgcggataagcccgtatatggctaccacgagaccttgacacagccttcggcgtcgtgcttgaagttgctcagtggtgtggcgggtcttcacctcttgggtagtgactacatgtatattacaggcttgtatcaacgaggaaaggtgtctgatggtgtccttcaaggcgacctgaccttcaagggaagccttgatccacagttcaccgaacaagagcttgtgcgatttgggcaggctgcaaagaagagaggaatcaatagagtggatggcaagatctttgtagatctcgtgattcaggaacctgtgaaaagcgaggagcattggtatccttgggatttatctttcagtcgatatggtttgttttacaaaggtgcgcctcgggtgatgaagagtttgaagagtgtgctgcgtactcagggtatcgctttcgctgacagtcatgtggtgttgggtacgatacctgccggttcgaaggttatttacagatacggcacccccattcatcgcattgtaaagcgcatgtggaagaacagttccaacacccagtccaccgcattgctgtacaccattggcaaccgtattaacacgcaagccgacccaacagccacgggggtagcatatcttagaaagtttttaagggaagatctcggcatgaccgacacctcattggttgtacacgatgggtgtggcttgtgtacctacaatcatctttctcctcaagcactgacggcaattctcgtgtatggctataaggataagagtattcataccatgctcatgcagaacttggcgattgcaggcgttgatggttcgttggctcatgagatgacgggaccaaagacacggggcaagatacatgccaagacgggtactctgtctcatccttatggcatcagttcgctggcaggttattgccgtggaagcaacggacacgacttggcatttgccgtaatgagcagcgagatgtctgtcctcgatgctcgcgtgttgcaacgtaggttgtgcgagaaactggtagaatgacatgtgtattcttacgaaaatgccgtgtatcaatatccaatggtgatattgatacacggcatttcgcatgttttgactaccatcctatcaatcgtataagtgcggatatcgatcagctccgtagacacgaactggtattgactttgaagtgtagaatccaaccaagcctgttccacccttgacgttggatggcatcttaatgggaccggtcaaatcgttgtagtcactataatacgtagatttcttcagattcatggctttcagatagtagtaggccgctggtgtgtacgacgagacggttgccactagatcaagtgatgtctttatacctgaatcagatatcttatcaaatgggtacagtttggaatatacactgatggaacattcctgtccgttgaacagaaggtcattgaagacgcccatcttgttcaccacattgttgggcgagacaaagcccatgtctgttgaaggtgtgcagatttttccttccatgatgattgggtcgcccgtggcaatatatgaactacccatgttgcgggcgaaatatcggtaggtagtctctgttctgtgcaacgtgctatactggatgtacttagttgtctggtaccctgccagcgttagacgataataatcggctcgctctccattgtcttgaaatgagagactgatcttatacaggttgtctactcgcgccatttcatattcgtccacatagcttacatccttgacaaactcggtgctgatgcgttcaatcttgtcaataggctgcggtaccgtctcctctatggaagcctgatagaagttgtcaggtgtggatacctcgatgcgcacatggtcgcctgggctaaaacgaccatgaatgatgtattgctccgaacctgctggaagctcgcgaacggtctcgcgcaagctcccgttgactgatattttgatagtggcgtcagtgacaatcgtaggacggtcaatgcccgtgaacgacaccaatagtctgttaacggtgctgtcggcattgatgaatccatttaccgacagttgcttgctggcagtctttgtgtcaagctccaactcgttctcgcatgctgacagaccgaagagcatgacgaagaggcaacagtataggtaagttttcattctgatcattgtcattagaatttataggtgagggtgaatgacggcagacagggtagcaacgtgaatttggtcagtttgttcggctgttcctttgcgtactcgtcagtctttctgagtatgaagtttgggttcattgcattataggcgttgtacacgctgacgttccatatccgctcaacgcctcgtttcagtgtcttgcggaagttgatgcctaagcagagcaggtgcgtaggcggaagtctgtaattgttgcgacttgatacatagctactctcttccgtgccttcgggagtcatctcaaatcctttctgcaaggatatcgttgcggttgctccagagtagaacgaccatgtcgcatccaagtcgatgcgcttggtcatcttccagttcgccaccatattcacgttgtgtcgcctgtcgtaggtgaaggggaatcgctctccaccattcacgccactgtcctcactaaacttgcggtcgctcttggaaagcgtgtacgagagccagccagtcgcgcgtcctgtagtgcgtcgcagcatcaattcgatgccttttgaacgtccctcgcccatgctgaccagacgctcccagttgcccgagaatcccataaagctcatgccgtctttgtattccaacacgttgtcaagctgcttgtaatagccttctgccgacagctcccatcctttccagcctgtgtagtaggcaccaacactgtattgtcttgacctttccggtttgatgttgtcggtgatgggaacccacaagtcggtgggaagggcaatgggcatcgaggtgagcaggtggatatattgcgacatctcgctgtacgatgccttcaaagccacgtcggacagggcttgccaacgcagcgagacacgcggttgaaacgtgaggtacgacttgtttctgacatggaacattgacacagacccaccagcgttgagagtaagtgatggtagaatccgccagtcgtcttcggcataagccaaggcttcgtgagcgtagatgggattgctgggggaagaatactcgcccattctgttgatctttccttcctttccctcttccgtgaagaagcttccggaggtctctgggctgaaggtatgataggtgtaggacgagccgaacttgattctgtgtgagggaagcggctcgtaatcaaagtcgatagctgccgaccagtcccgtatcttcgaccggtagctggcgttgttcttttcaagtacgtcggtgcgccatgagtgatcgtagctgtccagatgcatgttgtaatggttgtaggccgccgtgatgttggcaaagaggttgttactgaagatgtggttccatcgtagtgaggcgatggtgtttccccagttgatgtcgtcaccgtaggcagaattgatttcgtagctggatgagctgtagcgatccttgtagtcttctttcatcatgtcgtgtccccgatacacactcagatacaaacgatccgtatgcgagaagcggtggttgagcttgaagtgaaggtcatagaattgatagccaaacttctcgtcgctcttcataaacggttgcaacacccagttgatgtaggtggtgcgcgcagagaagttgaacgatgtgcgattctttacgataggcccttccaactgcaccctactggtgagcaaacccaacgaagccgttccgtgaaagtggttcatgtcgccatccttcgttctcacatcgatgaccgatgacaaccgcccgttgtagcgtgcagggtaggagcttttgtagaaggtgaccttcttcaaagcctctggcgtgaatacagagaagaacccaaacaggtggtcaatcttgtagatgggcgtgccgtcaagcaaaatcaggttctcgtcgccattgcctcccctgacataaagagccgacccaccatcggatcccggctgcacgccaggcatgagctgtatggttctgatgacatccgtctcaccaagcagtgagggcgtgtgctctatctgactcacacctatgtccatcacgcccatgccggtggcgaggattcccgcattatctttcgccgatgacactaccacttctggcaggttggcggatggtgtcagctggatgttgatgacggtgtctttatccagcacaaatgatttctgcatgcgtgtgtagcctacatacgaatagcccacctgcacctgtccggcggggagcgtcagcgtgtagaatccatacgagttggtcgtcgtccccatgtggctgttagcgtcttggatggttgctccgaggagcgtttcactggagtggatgtccttgacatatccgctgatggtgaaccgcttttgggctgaggccgcaagacacagtaaggcggccaggcataatacacatttcttccaaatattcataaatacaaaaacgtcttgccttcttgctttgaaggcgttactaaacaattagttgtaagaatactggctgcaaaattagtaaaaaagcaggatgcagacactatgacaccatcatattttttcgacgaacgtttttttgacgcttatcaatattgatgataattttttatttacctttgtactccccataagccatgcccgtttgaggctcttggtcgcggaggacagtggtgccagcagttgtagtcttgcttgcacttattaattgataggagaaagaaacatggagcatttaccattacatgatataccgatgttggtgtccgccattaattttttgttgcgtgatgaggagtttgataatctcgaccaaatctgctatcacttcaatgttgatagggaagaactggaaaagcgtctggcagctgcgggatactcttattctacggagcataaaagattttggtaaccgtctatttgttttgtttatggccgaaacttatctattctgcatttgctgattcgtcaacttaaaaacgtatcctcatgattaccaaagatagtatcgagaccgcctactgcttttttcatcagaaatggcaagtatatcgtaattccactatggagtggcagaaagaggacattgaatatgccattagttcgtatgtggagcgtatgaatcaagaattatatgaactgttgtcacaggggagagaggaatatttacagcaacctgaaacctttgcttttgacttggcagatgccgttgataagttagataaaatgaagaatgacaagtaaagcccctactcatcagagtgcaacctttacttgtcattcagcgtggaactatggacagttagttatttaaatccgaaaatgtctttcagtttctgccaaaagccagagcgttctaccttgtcagcagctttatcaacagcctgactgacatcgtcactctttcctttgacaaatttagctgcctcttgaactttctcgttgtctttcatcttttcagcaagttcttctgttttttctttcaccgtttcggaagcctcttttgttttatcacgtatttcttctactacattcttcgtagtgtcttttacatcttctacagcttccttcgttttttctttcacatcttcggctgtgtcttttgctttttctttcaagtcttttgctgtctcttccaccttttctttggccttttcacagttctcgtctttattcgtctcatttagaaccttttcaactttctgtttcgcctcttgaacatgtttgttcttttttaaagagtcgatatctttttttaccttctcttcagctttatccacaacctcctcggctttatctttcgccttgtcagccttttctgcaaccttatcagcagctttttctacttgattttcaactttatcgactttcttttctgccttatctttcaattcatcggcagtctttttcatttcttctttatccatcttttttcaaattaaagggtgatgcttttttacttgtagacaagtattgctttcaaatttatatcttgtatcgcaaatatactgaaaataaatgaattaacaaagcatgcagacaaatatttacaaatgatttctgacaaacttcatacttatgaaacttgatagaatttttcttactttttcttactttcttcctcttctttcatgatgtgctcacgataaatttttagttgttcggtttcctctttgctgagttgtgggtaactcatctgaagttcttccaaacgttcacagataatattgctaacggcatagcgcataaaccatttatggtcagctggtataacataccatggagcataatcagtggatgtcttggtcagcaatttgccataagcgtccatatagcaatcccagtattgacgctcttctaagtctgcggaagagaatttccaattcttttcttccctgttcagtcgttttaagaatcgtttcttttgctcctctttcgacacattgaggaagaacttgatgataactgttcccgtctctgtgagatagcgttcaaagtcattaatgtggctatagcgtttttcccaaaacttttcattgacatcgtctattttgtctatcccaggaatttgtccacctacaaatatttcaggatgaactctacctaccagtacgtcctcgtaatgcgagcggttgaagatgccgatgcgtccccgttcaggtgcattcttttgtatgcgccacaaatatccgtgatccagctccttatccgatggctttttaaaagagaatacctgacatccttgtggattgatgcccgacatcacattcttaatggttccatccttgccggctgcatccatagcttggaacactatcagcacagcatacttgttaaaagcatagagcttgtcttgcagagaagccaacaccttaatattctctttgagcagcttcttagcttggtctttggttaatgtcgccgtatcatcagtttcaaaatctgctacctgatgcttcttccctggttcggctatcagcttttttaataaatctttgtccatggtgttttgtattttatggttaatgttatgacgactctgttatgtgaaatctttagaaatgtcttgacaagaatatacggactttaatttcatgtttatcttacatttttaaatataccctacattgattttcagttgcttatatttatattgtacaaaaaaactattcatcttttgtgttgatcaaatcctttggattgacctgcagaatctcggctatttggaatagcaattccgcgcttggctgtcgacgatggcaaacgtaggagtttacaatcgtaaaactcttgccgagctttttggcaagtcatgattgcttaatccctttttcggtcagcaccttttttatactattagttatactttccatcaatgagatatgattatatgcaaatataataaatattattttataggtagctaataaagaaaagatattttctccatctctgtcaaaagttatatatctacaattctatttgcctttcttattttgtagatatcgaagtatcagactatccacttttgcattcagttacacattgtcattatccgtctactttttggtacttttactgataggtggacactcattttttcgtctgatagctactcagtgcttttagaaatatcttgacaaatgatactaaatgcttcgattattttcaacaactaatacttttgtcgaaaatatcgccgtatttttcgatttcgtataattcaatgtaaatcagcgtgttttgccattatccgcctttatgctacgctctcatcaaagttgaagcatggagataagggcattaactcatacagataagcaggcaatatggtgtgaatagccactctattaccatgacatagcacggtggagagatgaaaaaatgggaaaaagtcattgctttttgcatttttgagttgcggacagtcagttttttgctgcacaatttgtgcttttaccatttttctctaccgattggaacgctattttccggattttgaagtgcttatttttatgatattttattgacaaaataaagcttgaaaggtagtggaatgacgagcgagatgtttttgaatatggcatcaaaaagtaagccatgtacgccatatttctttcgaataaatatttgcgaatatgcagaatcacagtactgtaacatattccaaactttttggcaatttcccaattgagtaacactcttcaatttcaagctgataagtttttatttccgatagttttcttcattcctttcatcgtaaggaatgaagattaagtggttcttgtatatcagctttgctcacacatatcaccccaatgcatctaataattctacgtttagatagaaatgtaagcataggaacgattaagaataacaagattttagaattgttgagaaacaaaaatctcagcaacttgttgcgttactgggattcagttgtatttacttcacttcctcaaagttatcctacactgattatcaatgacttacatttgtgtggtacaaaaatgtttcctcaatttgagtagtatcgattagaaaccaccttgggtgttatcactttctttaatcagttaaactatgctgtcctattaagaagcaatttcttttgaagcttatttttaatcccgctattaatatatgttatattatctatacttttaatcggagaagaataagtttctatttcatccaagttattatattcttcaaagttggaatatatgaaaatttctttgataaaacaatctaaaagttgttgaattcttttgtcatcatatttgtctaatgcacgatattccatgcatttattcgattcttgcctgtttatttggactattaggttcacatcatactcttgtaatatatttatttggattgtatatttactttgtgtatttagataactctttagcctatccttgttctttgactttccgagcaattccatacgaattaaccgatttatgttatcatacagaatattaatacccattcgttctatattatccaaagagccccaccaatctttgaattctaatagctcgaaaggtggtaagtgtttcaaaatatgatatttgtttatgtagctaataaaattacttccataataagtcatagcattataccgtataaaaaacaattcgctatcagttagttgggctcgcataatcttcaaataatttttcttagaagcctcttgcaaatcagaattgtctattaaatcataaatacggtacaatgttcgaaaatatgctccaatctttgtagagttttctatataaaatagcatataataacttactgcagctttccgatttttttcataactttttctattcctatatttcctttgaatatgctctctttctatatcaaaaaaatctttatcattgtatttgatttccttctgtataatatcttcatctttccgcctatgaatactagggtcaagatattctttttgtccacaaagttcacttacttcagattgatataatcgcaacaactcaaaaaacagatcattaaagcgttgaattttcaattgttcttcattctggttcgaaactttttgttgctctttaaaagtcttaattacaagtaaaatacttactaaagtaaagattgaccctaacactccgccaacaaagtctccatatgttccaaagagctcattgtctatggtatgtttgttatcaaatatttgaatagggtgattccatttgaaaaaggcaaaggaaatggaaataaacacactcccagtagttatataaaaccatttatttaaaagcaatacactaaagtatgattttaatttattccaaaggttatccattgtctaattatttataagattacgaaactttgataaatttcactatggttctgcaaccatttgtatgtcttcctcgtgaatttcatatatcttggttgattttattgaataattctcttgttcattatccgtccactgctcacattgtttgatgacagtatccagtgcattggctgcttcctctggtgggtaatgatatttcttaagtaggtgcttaatcattctgcgcatcccagcacgagctgattctttcttttgccagtcgatcgtgcggttcttgcgaagggagtcggtaagctcttttgtcatagctaccaattcttcattactatagaagtcatgaactgcttgcggtttggtcaaggcatcatagaaagacttttcttcaggagtgagcccgagttcattcgctgcggaatcagcagaagtgatgtcttttgccaactgcaatagttcttggataacttcttcattggtgagtaatcctttcaaatagttggataaagagcgattgagcaggtcagagaatttctctgactgcacaatattggtcttttgatagagtgccactttctccgccaatagttttttgagcagttctacagctatattcttttctttcatcttagaaatttcatctaagaaggctgtatcaaagagggaaaattcggctttaacatcagagaaaagattgattacaccttcactttttacactttgtttcagcaattcactgatacgggcattaatttctttcttcgtaacttttcctttacctgtcattcgggagagcaaagtgcgcacagtttcaaagaatgcagctaagaagcgttgctcttcattcagcaggcttcggcaaagagtgatggaattgtgcagcaatgctgcttctttcatatataatggcagttgttcttgtttgtcggttgccaacataaagtttacaccacctttgatcaatttagcacggtcggcatctgtccctgtgtggaacttactataattataaccatgaaataagtcttggcacacttccaacttctctttgaactttgtaaaagccatgcctttgatgtccgggtttccaaagttctttctgtcgcgccccgtataatcacgcatggcttctctcaaggctttggcaataccgatatagtcaacaaccaatccacccactttaccattgaatacacggttcactcgtgcaatggcttgcattaggttatgtccgctcattggtttgtaaacatacatagttgccaatgagggaacgtcgaagcctgtgagccacatatcgactacaatagcaatcttcatcgggtcgttgtcatccttaaatcgtttggcaagttctttcttatactgcttatttccgataatgtcgtgccattcttctgggtcttgattgctgcccgtcatgacaacttttactttatccgtccattttgggcgaagctccagtagtcgatgataaatgctcatggctatgggacgcgaatatgccactatcatagccttacctgtcaattcatattgacggttttcctcatagtgtttgagaatgtcttggcaaagagaatcgatggtagctggtgcaccaagtatctcttccaagtgtgacatctccttcttgcttttttctatctgttctgtcgttgcaccttcttcagccaacagctcgtattcgtcatcaagggcttgcaaggtagcatcgtcaagatttagattgataactctagattcataatatacaggacaagtagcaccgtcgttgaccgcctgcgtcatgtcataaatatcaatataatcaccaaaaacctctacggtatctcggtctttagtagagataggtgtaccagtaaagccaatatatgaagcattgggtagtgaattgtgaatgattcttgccgtgccgatagagattttacctgtagtggcgtcgactttctcctcaaagccatattgtcctctatgcgcctcatcagtcatcacgataatatttcttcgctctgacaaaggttcgtcagattcctcaaacttctgcatggttgtgaagataatgccattagcttctcgtccactcaatagctcttttagattctctcgactattggcttgtattggagtttggcgcaagaactccttacatttagaaaattgggtatagagttgatcgtctaaatcgttgcggtcggtaatcacaacaatagtaggttgtgataactcttgttgcagcaagtgggcgtagaaaaccattgacaatgattttccgctgccttgcgtatgccagaatacaccgattttaccattacttactgtagcatgtttggtacgttcgatggctttcttcactgcaaaatactgatgataccctgctaatatcttagcactccctttttcttctttggaaaaacagataaagttcttgattatgtctaagagtcgttccctttgaaatattccttcaaagaatgtatcataatcgacaaattccgtactttcataattgccatcttttgttttccattccatgtagcgatcttccttgctggtaattgttccagctttggaaagagccatatcgctcattacacagaacatattgaaagcgaacaacgatggtatatccttcatataattgcggagttgaagatatgcttctgaagcatccgtctcttcacgggaaggtgattttaattctacaaccaccaatggtaaaccattcacaaatacaatgatatcggcacgtttctctgcattttcaatgaatgtccattgattgataacttgaaaagtgtttttgtccgtatgctcaaagtctatcaaatagaccatttcattgcgcatttccttgccattgaaataagaaacctctatgccatgctgcaaatagtctgtaaaagtttcattacgctgcgccaaactacccatatcaatattgcgtagtttgataatcgcttcatgaatagctgcatgtggcttctttggattaacagtttgcagactttcttctaattgtgcttcataatatggcacatagtagtctctttcaatatttggaccgtacaaatattgatagcccattccctcaaagagggatatcagtgctttttcgtaattatcttctgtgaagggcattgttttttatttttattgttcattcatttctaaaagaaattctaaataatctatatagttagctttataagcttgataatctaagttgtaaagagcctctgatgctgataagtgtacgcctcctacttctaatggattttcttcatcaaaccaatcattaaagcactcacaatcttgataaattaatctttggttagcgtggtgagcataactgaaataaaaatgtaaaatgaacccacagagaacatctgttgttttgtatatcagtagggatagtgatttgtctatctgaggatgcaatacatccaaaccatgtgaagcaaaccctgcattatttcgtatctctgcaattgattgaatgacagtagaaattctacggcatagttcagatagaccaactatctctttttcagtctgttttataagatgttctaaggtctgctttactaaaccattaactgaaatatcatctttgtatgttgcattttgattagtgagaattgttttgcaaagtgcctccgtcagacttttgcttacttcaacgcacaaagaaggattaatctcaacattgttttctattgttgaaatatgcgtttcaaaagtcctaagacttggttcttttgcaatatattctcttgtccactgcattattaatattaatttaaattatcatttatccgtcgattgagttctatcttgttatcgaacatagatatgaaatcagcaatttgttcttgtaagtttaatgaaggtaggatgattgatattgcacttaaattagcttgattgagtttgggttgtgccgaacctgttatgtaacctgacaaatcaatattattaagaatataacacaagtatctaatgtcacatattccattactctctactatatgagcatgattattaacccaatattttccatgagctaattgagctatatcttgctttttggatttgagattttctccatcttctgctataagtaaatatgttccatcgaagatataatcatcaatataatcaataataccttgtgcaccataataaggaaatcccccttctcgtgttttcctttctgctgaagataaaggaattcttttatagtctaagatattaacaacttctcctaatctatattctttccattcttccataatgagcgttaatcgttttgttcgtaataatatgaataatcaatgcccttcataaacatttctctgtcgtcaatctttgtggtgagagctggcaataccaaagatttgatgtgcgtgctgtcagatacactctcacgcatggcattgagataatcatttttatctatctgactccaatccacacatcttttgagagaacgcttcagcattaggtccagccaaatgcgagtgctacgaccattaccctccataaaaggatgggctacgttcatctctacatacttatccataatctcatcaaaggtagtttcgggcattcgttctattgtttgcagagtttcggggaagtgcatacaattagcaaaggtaaaacctccttttgagatattcttcgtgcggatttgtccagcaaagtcatacaatcctccaaagagataagcatgaatctgttgtaaacattgtatgctgcctggctcaagacttttcagcaaaccactttcatataacagatatgctttctttcgactttgaccatctaatgtattatcactatatgtaaaccaatcaaggaactcatttgctcgattgttaggatagtgctttgctaataaagtcactccttcactatcaaggacatctgcaatacgcatcttgccatctggtgcttcaaatttaaacctgtgagtagtactcacgggttcaatgccttcttgttttaactttcgttttagccaacgccaatagttacctgctttggtgtagtctggctcatcattaatggcacgcacaatgtctgtcgcagaaaaccaccaacaattattttcttcatcccatacggcacgtacttcacggtcgttgaagaagcgaattgatttcttatgttgttctttcttctcttccataaatgggaatttagttgtttatatcattaattttcagctcgccagacatcagtttgggaagaagcgtatcacgaagtgatgttaagcgcttactttcgagaaaaagttgtccttttttctcgaatatagatgttacaatctcattatattctgctattttttcaacaaagacaacattcatgggcagttctgctatatgtttaggataaatatgtggctgcgcagaacctacttgtgcatcaaatatttccttttgtcttttctttagcatgatataccaaaaatatacatttggagttatcgaatcatcaatgtaagaagaatctgaggcccaaacaggaatatgccataaatttatatacccagcattagctcctgatgctgctattgtcaaaacaggagcagtcgtattggctaggttatggtatgttgcaggttctatacccccagcgactactggtatatctccttttattgcattcttggaaaggagtccttttccgcgtttaggcataattagatcccctatcatattttctccttcagtaacatggggaaacatttcgttgaacaacgcctgtgcctgctgctctaaattatcatttatccgcctatttttatgaaatagcggttgatatgagctatatgtgtgatatrmtgtgatcttgtaagtttaatgaaggtaggatgattgatatggcacttaaattagcttgattgagtttgggttgtgccgaacctgttatgtaacctgacaaatcaatattattaagaatataacacaag

SEQ ID NO: 119 - DNA, 127107 bp, Prevotella timonensis
  source 1..127107: mol_type = genomic DNA
tcgttgaatattaccttgctcatttactaaatcttttgagaatagcttgcatatatcaaggatttttacgaaatttgtatataagttgtgcatactgattttataacttaatgtattgagcaacactaagttacaaataaattcttgtatgtacaacttttctttcatataaatttatctattattttaattccgccaacgggttaccaataaactttcatttacgaaagaacagcgagaacgcctcttcgaacagtttacaggtccgattcgagagacactcgacgccatgggtgtcgattatgaaataaaggcgcgcgtcaaaagtccttattcgatatggaataagatgcaaaccaagcacattacttttgacgaaatctatgacatcttggcggttcgtattatcttcacaccacaggtcagagaagacgaaattaacgaatgtttcaaaatatatgtggctatcagtcgcatctataagtcgcatcccgaccgtcttcgcgactggctcaaccatcccaaagccaacggatatcaagcgctgcacgttaccttgatgagcaaacagggacgctggatagaggttcaaatccgaagtgaccgcatgaacgaggtggcagaacaaggatttgcggctcactggaaatacaaggaaaatggcgaatacacagaagatgagggcgaactcaatgagtggttgcgaacgatcaaagagatattagacgatccgcaacctgacgcaatggattttttagatactatcaagctgaatctcttcgcctctgaaatttttgtattcacccctaaaggcgaaatcaagaccatgccagcaggctgtactgcactcgactttgccttccaaatccatactctcctcggcagtcattgtattggcgccaaagtcaatcataaattagttccgctaagtcacaagctccaaagtggagaccaagtagagattctcaccagtaaatcgcagcgtgtacaaccctcatggctcaattttgccacaacagccaaagcaaagggcaagattcaagccatgctcaggcgcgataatcgcgagaaacaaaaagagggagaggttatccttcgggcttggttagagcgaaacgacatggagatgaccacaggtgtactcaacaaactgtgtgaatttcatcatctcaagaaacacgaaagtctcttcttatgcattggtaacaaatcgattatcctaaccgaaaaagatcttgatgagctgcaaaacaaaaagaagggtggaacaccaagcaagtggctcaagtatattcctttcattggacacgacaaaaaaggcgaagagcatcaaacggttgagcctttaaccatcgaagattcctacaataagaaaaagcctatcattattaacgatagcaacatcgattcgctcatcttccctaactgctgtcatcccatacctggcgacgacatcttagggtttattgacaatcaaaaccatgtggaaattcacaagcgcaactgtcctgttgccagcaaactaaagtcgagttatggcaacagattgttggatgcgaagtgggatatgctcaaaacacggttcttcgatgccacgatagaaatcaagggcatcgaccgaaaaggcatgctacacgatgtggtggatgtcatttcggacgagatgaatgtcaatatgcacaagattacactctccagtcatgaaaacattttcacaggagtcattgagataaaagttcacgaccgtcaggaagtgaagaatgttatcaatggactgaaaaaagtagaagggttacaagaactgcaacaaattatgtaaagggcgagtctatcaattagcgttgtcagattgcgaagctatttttgtggtcaatttgtttatgggagaaaggaggatagcgagctatacgactgaacgaacaagcagattgaaccaaaaagagaccgcaagatgacgaaacgtaaaccgaccaacagaaaaaactttacggcggtaatacatagaacagccctaaacgcttagcgggctgatgaacgagaagaagcgtctcctcacacgattacgtccaactgcttacgcaattcctgcaattcatctctaacagaaagcaacgtatccaaaatttcagaactcgtttctacccccttgcggttagaactcaacatcttgcgagcagcggacaacttaaaccctctgaccttgacaagattataaataatccgaatgtcctcaacattggcatcggtgtactgtcttaccttgttagaacccaccgtctttggacgtaaattaggaaactctgtctcccaatatctcaaggtactttcgttgataccaaacatttgggcaacttctttgatagaataatagagttttacgctcttgtttgtattcagtgccatggcgatatatctttttgcaaatgtagataaaattttcgaattataagtcagcaaaataaagaaagcactttttctttatcggaaaaatacgtttgccgaatatgctacgccctcctttcttatttctttcattcttttgttctctgcataagtccacccattgttatccctgtgaaccatcattaagataattcgctaacaattgtgctgtttgcatttcagcaaagacgggctgaaagcccaaaaggcatatagcccagagcaacgctctgggtacaagttgtcaactatttggcgcgctgtaagcgcaaaaggaatggaacaaatgtgccgctcaatcttccgttgtgcattgtcatttttattgacaacagcaccaaaatgctggcgatatttacaaacaacatgcaccgcgggcgaaaatacgccaaaaatggagaacttttataataacttgtaaatcaacatattaacaaaaaccgacaaataaaggctgggattacaccaatgcttcaagtcttaaaacattcattttgtggcgttatctactgtttccaatgccactaagccatgcaaatatcgatgctaaagcatgctaataacagcatcatctcaatgcttcaatcccagcgaagcatgcaatgtgtactttcaaggcatgaaatcatgccttcaaccccttttcgtttctctattttgagaatttctataaccctcttttttgtcattttttaggacaaaatatatccttttccgccctactgtgtaatcaatttccccaaatagatacttgaaattcggttaatctcttcgtgtttttatccaaagcgcctcgtaccaatttcaacagataattttggtgcttcctgcttttttttataattttgctccttaataaagaagtgaaacatttacacattgcacgaacaaaaatataaatgacaatgatgacagcaaacgagatacgtgaatcgttcaagaaattctttgagtcgaaaggacacaccatcgtggcttcggcacccatggttatcaaagacgaccccaccttgatgtttaccaatgcaggcatgaaccaatggaaggacatcattcttggcaacaaacaacccgagccacgccgcagagccgactcgcagaaatgcctccgcgtgagtggaaagcacaacgaccttgaggaagtgggacgagacacttaccaccacacgatgttcgagatgctcggcaactggagctttggcgactactttaaggaaggcgccattgactatgcgtgggaatatttggtggacgtactgcacttggatccaaaagatttgtatgtgacggtgtttgaaggctcacccgaagaaaacatcccacacgacagtgaggcagagaagtattggcgcaagcacctgccagccgaccatatcatcaatggcaacaagcatgacaacttttgggaaatgggagatacgggtccttgcggcccttgttcggagatacatgtagactcgcgttcggacgaagagaaagcccaactacccggacgggaattggtgaacaaagatcacccacaggtcatcgagatttggaacatcgtattcatgcaattcaatcgcaaggccgatggctctttggagccactctccatgaacgttattgataccggaatgggattcgagcgattagtcagaatgctgcaaggaaagaattccaactacgacaccgacatctttcagccattcatccatgagatggaacgcctgtcgggcaagaaatatggcgaacaagaagatgtggatgtggcgatgcgtgtagtggctgaccaccttagagccgtagctttctccatcgctgacgggcaactacccagcaatgccaaagcaggttacgtcattcgtcgcatcctccgacgcgccgttcgctatgcttacacgttcttggggcagcgcgaagcctttgtatataagttgctccccgtactcgtagacgaaatgggaggagcatatcctgaactcgttgcccaacgtgagttgattggcaaggtgatgaaagaagaggaagactcgttcttgcggacactcgaaaaaggtatcaacctgttgagcaacgccatggatgagctgaaaaaagcaggcaagacgcaaatcgacggcgaacaagccttccgccttttcgatacctatggctttccgctcgacctcacagaactgatatgtagagagcacggattcagcgttgacgagcaacagttccatgcagaaatgcagaaacagaaagaccgcgcccgcaatgccgcacaagtggaaaacagcgactggatagaaattagacaaggcgaacagcagtttgtgggctacgactataccgaatacgaatgccacatcttgaagtatcgcaaggtaacccagaaaaaaaacagtttttacgaggtcatcttggacttcacacccttctatggagaaatgggaggacaagtaggcgaccaaggtgtattggtgagtgagcacgagacggtggacgtgatagacaccaaacgcgagaacaaccaaagcattcacatcattaagcaactgccccaacatcccgaggctgacttcatggcttgcgtggatactgacaaacgtgacgcctgtgcggcaaaccatacagccactcacctgctggattacgcactcaagcaggtgcttggcgaccatgtggagcaaaagggatcgtatgtatcgcccgacacgttgcgcttcgatttctcgcatttccaaaaggtgaccgacgaggaaatcagacaggtagaacggttggtgaacgaccttatacgtcaagacatccccttggacgaacatcgtgacacaccaatagaagaggcaaaagaaatgggagccgttgcattgtttggtgaaaaatatggcgacaaggtacgagtagtgcgcttcggaccgtcatgtgagttctgtggaggcattcacgccaagagtacgggacgcatcggactgttcaaaatcctatccgaaagttcggtagctgctggtgttcgtcgcttcgaagccattactggtcgcaagtgcgaagaagcaatgtatgccatagaagacacggtgaaggccatccgcagcttgttcaataatgccaaggacttgaaaggagtcatcgtaaagtacatggacgaacacgacaccatgcgcaaggagatagaacagttccaagcacaagcggtgcaaagaaccaaagacgaactcatcagacgtgctgagactatcaatggcgttaccgttatcaaggcggtattacctatcgatggcaacgctgccaaggacttggtgttcaagattcgtgaggccataccgtcgcatttgctttgcgtcatcggttctacagcacatcaaaagccgctattgagtgtcatgttaagtgacgatatggtgaaagatcatggcttgaacgctggtcaaatggttcgtgaggcagccaaactcattcagggaggcggtggcggacaacctcattttgcatcggctggcggcaaagatgtagacggtatcagcgcggcagtcgacaaagttattgagttgacgcacctataaatattgctcatcatcaaaggcaaatgcctttttcagtagaatattttcacaaaaaccgcatctccataatgttgagatgcggtttttgtttttattttctacatcgcctataccatataaaaaggtatcacaggcaaacaatcttttactaataacctgcaaaatatcaatatcttagtccaaacatccaaaataccactaatgtaaatcgcccgaaaactattacccaaactatattttgaaacaggatagtctcatgcgtacacccacataatgacatttgattcaaatatcgatgttacgctcaatttgcatatcaaaaaggtaatagtatttgaacataatatcatttatttgaagaaaaaggtgtatttttgcaattccttataaaaataattgaacaaaccaattatcatataagaatgtaggaaattactaaccatcattatcataagaacaatattcatgaagtttcaacttttactacttgcatttttatctactgcccttggcacttcagcacaacagtttgagaaagtggacaagagcaaatacaaggattattcacctacttacgtcccagacccttcgctgatgcgtaacatcagtggaaaagctggcaaagcaggcatgcgcactcgagcaacgaacacctcgctgcccgcttatgtcaacaatgccaatgccaaatggtttccacctatcttcggacaaacaggtgggtcgtgtggtgcatcatcacgtattggttacatgatgacatacgaatggaatgcttttaggctctcagatgcatcgaagatagaacatcgattgccgccacactttgagtatccgttttcgtacaatggactcagcaaagaccaaatggcacagtatataggctatcctactggcgatgtgtacggaggttgggacataagcagcatttacggagcatacgaagctgattctaatgatgctggatggatgcaaggctatgacagttggtacaacgccatgttcaaccgtatcactggaacggctaactttcccaaaggctcgaacacccctgagggaatggaagctatcaaacgttggctattcaaccataatggcgacccctcatggcctaccattaccgatgaaaatggtacccatattgtaggtggcattgctggtttgggttgtggtatatcgggctgcgtcatacaaaatgtagccgatgtggacgccaacagaaaggcaggcatcgttggtaaacattacattgagaggtggaggtttgacactgccgaccacgccattaccttagtgggctacgatgaccgtgtggtattcgacttagacaagaatggcgtatatggcgaagaaaagaatcgcttaggtcaagacgagcgaggcgcatggattttcgccaattcatggggcgattgggcagataaaggattgtgctacgtaccctaccccatggcgggaggagtaaccaacagcaagacggacaaacacatcttgaccaatgaaaacggctcaaaagtagaggtatatacgggtggtggctggtggccagaggtgtactacctacgccagaactatgtgccgcaacagaccatgaaagtaactatgcaatacagcaagcggtcggaaatcagcgtgaaggtaggcgtaagtcaagaccccacggctacaaaaccacaaaaagagtctgtgtttaggtatatcaactatactggcgatggagataaagaccctgctgatgccgaaacgccgctacttggtcgatgggcggatggcaaaatgcaccacgagccaatggagtttggtgtagacttgaccgacctttgtgaaggaatagacttttcacgccccgtaaaatatttcctcaccatcaacagtaagggtagcgcaacgggtaaaggaagtgtgaaatcggtaagcatcatcgactatgccatgaacgaaaagggtgtggaaatgcctatatgcaatgaagacgttcctattaagaacggtggacaaagcacttgtgtatcgggtgtggtgacacaagaatcggttaatgcgccctacaacttagcatttgatgacaacaaacagcttgcatgggctgagccaataaacggattatccaagcctgagacatatattgtttaccaaaacggaaataaaatcaccgagacaacatccacccattatacgccaacatcaacagacggctctttctatgtaaaggcttcatacaagataaacggcaagcaaaagctaagcgccgcatccaactcagctgcattgccacaaaatgtagatgccgtttacgacagcgatattcagcaattcaaaagcagcggagggttcattgtgcctaacgtaacagcaacatctcatcagaaattcacaatagagtattggctcaagccttcatccgtgtacgactggaatcaaaaggttggtgctggatggggcacattctggctacatgccaacaacaaccgtacacttacttttggctggaacacacaaaatggcaaccgaagcgactctgaacctattttacagaccaacaaatggacacacatcgcattggtaattgatggtaacaccatgacactgtatgccaatggcgagcgcaaggggcaattcagctcacagttccacagtggcatgccagctatatcggatggacttctttttggagcaaccaacaacgatggattgcatggatgcattgacgacctgcgaatatgggaagtagctcgtactgcacaagagataaaagacaactatcaaacgcctattgccaatccaggaagtgagaaaggattgttggcttatttcaaaatgaacaccatcaaaaagaatggacgcacactcttggttgatgcagcccacggcaaccatgccaaattcttgcccaatggcgcacacaacacagcacaagcaaacaatgagaccattcgtaaacaaaccttatctcctgctgccattcaaggacctacacaggtaaacaagggcgatgtagttacattatcggctacaacatcggtaggtatcatggagagaacatggacagccacaggtgcgacacctgcacaaaccacggcacacgatgcaagcttcaaattcaatgcagcaggtaaccaaaccgttacactgacaacaaccgacatcaatgggcaaacgcagcagacaacccaccaagtcaacgtcaaagccatagaaccttcggctgactttacgataaccaacgaaacagtaaaggcgtccgaacgtgtatcattcttggcaaagaacgagatgtcgggctgtacttacgcttggcaattagatggagccgacataaaaacctctgaccatcgcaacatttctgccgtgttcatgaaagctggcacacatacagttacccttaccgtcacatctgccgaaggcaagaagtacacgcaggagaaacacctcaacgtggctgcttcgactcccaaggctggttataagacaaataaagatgaccaagtagtactgaaaaatgaagaggtgacgctgacagacgcctccaaatatgaaccaacagagttctactggtcattagtaagtcataatcaggtgtacaatggaacaggcaatccatatcgcttcaagccacaacgagcaggcgtgtacaaattatattacaccgttggaaatgcgcaggggagtgacaaattggtcaaaaatcaagctgtcatcgtatgcaatgcagacgcacaacgaggcttgaatttctcgatagtcggcaacaagtcatacaaaacgatgactacaggtcagttggacaatatcagtaccgattggactattgattattggctgaagccaacatttgcctcatcggcatcgaatggcgtctatgcactgagtaccaatggtacggaggtggcaagcctgatagcacaaccaaagggaggtgcgactcttaaggtgggcgaccagactttccaaatcaacgatgatttcatcatttccggacaatggcaccactacgccatcactgcggatagaactacggtgagattgtatcgtgacggaaccttgttcaagtcgttcactctctccagtagcaacaacacagacaacattgcaaaggtacgagtaggaggcgaagcacaagccgacggcatctttgatgagttcagggtttggggaaaaacactcagtcaaaccgacctatgccgttactgcattgctcctctgagtggtacagagctaaccaaagccgttagcgacaaccagttaaagtgctactatcaattcaataccattgaggacgggactaacattcctgaccagtctggacgtggatgtaatgccactcgcaacaattttggtcctggtggagatgcctgggtatcgtcacgaggcgtgtttgccattgacttctcgcctgccgaaggggaaaagatcaacggttacacttcgttggataggtcttcataccgcattgtaaaggtgagtgatgaagagacacagagcgaacaatacggcaacggatttgcagaactggcgctcgatgctgatgaaagcacattttggcatagtcaatattctggtggcgaaaagggatttcctcatagcttcaccatcgacagggcaagccttgacgtcattcacgccttgaagataacgaacaaacgagaaagccgatacagggctgtcagcgtaaccgttgagcaaagtgatgatatgaatcagtgggaaatgcttgacaacaaccatcatttcttagatatgcaaagtcctgccgtcaacctcatgaagccagtgacaaaacgctatatgcgcctaaccttcaatgaaaacgcatggcaaggaagcctcatgacgctgaatacggttgatttttacggaacgaaagctagcgatgccagtcttgagcagcctgtacagctcaccttcaagagctgttcagatgagaatagcaacgcaaagcaaaaggcaagcaacgctgtagatgggaatgaatactcacagtggcggagtaaagacggtgtgccttatccacataccattgatgtgcagaacagctcatctggaagatgtatcgagacattataccttgttcaagccatcataggcaacaaaaagcaatcgcgaaactacaacgcaggcaaggcaaccatttgggtgagtgacaacggaaaggactggacagcgtttgaaaaggtacgtataccttattataacaagagtactatccgcctaaagagtcccattcaccaaccatatatccgctttgaatttaccgaagcacagatgaagggcgccacctcgttggcactcaaagaaatcaaagcatatggaagattgtcaaaggagactggcgtcaatggcgttgagcaagatcacaacagcactgacactcgcatatacaacctgcaaggacagtatgtaggtacttcgatagaaagtttacctgctggcatctacatcagaaatggcaagaagatgattaagcaataagccttcacacgagaaagaatacacacgaggatgtatgcaccacaaagcacatcctcgtttttttatgcttatcactaacaaagattggaaagaaatgtttacttttgtacaacgatttttctgagattgagcaccaaacatcatagtctatagaaaagagcaaatatctgacaatgcaaaaatcactactcatcatcttcttaggaatgtgcatcaaagtcagtattgcacaatctttcaacctacagtggattgcttgcccacaggcagacagtacctcggaagtatggtttaggcaagattggaagctgaaagattatcccacacatgccacgatgactattgccagtacaggaaaggtgagcgcatacatcaacgaacgaaacatatcaacagcgctgtggtttcctgctcgttctaataacgacggcaaaccaatatgtatcacactggatgttactcgttttctacagcctggcaacaacgtcatagctatttggtatgccccctcatggacacatcttgaaaggcaacagatagccattgcattgcatgtacggtatgtaaataatgaatacacatttttacagtctgacgagaattggctcacacgacctgctaccacatccttgaccttggatggaggagaaaaggatgatggttatgagtatggtgcaaaatggaattccgaagattttgacgtcgcaacttggcaatctgcgacagctgttgagggttcttctcttccctattcctattattttgctggatatcccactgtgaaggtgagtaaaattcagacacctcgttattttgatgtcgttggagatagcgtatattaccaatttgataaagcatttaagggacaagttcgtgtgacgctgcgtggcgctaagcgtggacagaaaatacagtttaatggactcacctatacctgcaacggtgaacttgacgaacaagcctaccctcgttttacgataaaagatgtctatcgagttttgatttcgggcgataaagatttcaaacccgaacagattcaacaggtagaaggattagaagttgtcccatatttccatcaaagctatcaatattaacagataaatgtgcggttacattccaaattttcgctacctttgtacggaatataaaagtgtgtttaatgaattttacattcttctaaggaagtgtcattgacaaatatacaaaaccaaaaacaattatggaaagaaatagtatagcgaaactaacgattaaacgcatcaaagaaatcaccaatatatctaccttcattgacgacgatttattattattcgaccgattagaggatcttcctttcccactcgagccacgcaaaatgaattgtgttttggttgggatgtgccttaaagggcgtgcacaatacaccgttgacaccaaagaatgtgtcatttcagagaacgatttacttattttgagtgacggacaggtagtcagtgactatatgatcagtcatgatttcaaaggcattgccatgttggcatccgagaacttcatgcaggatatctcaaggggagtaaacaaaatttcctcactgttcatctacacgaaaacacatcctgttttgcatttagaacaacaaaatgccaattccttcttggacatttatagaatgacgcataagaaggttattgatgtcaatcaccgttttcgaagagaaatcgtttgctcattacttggtgcgcttatctacgatatgggaaactatatttggtacaatcaacaggaccaaacaaactttaagcaaagtcgaggagaaaaaatcttttctgatttcattaaattagttgaacaaaacttccgagagattcgaagagtaggatggtatgccgaacaattaaagattacccctaaatatttgtcggaaacggtgaagaaggtgagccgagaaacaccaaatagttggattgatagttatgtaactacagagctacgagtacaattaaagaactccgcaaagaacatcaaagaaattgcgaaagacatgaacttccccaatcaaagttttttgggcaaatactttaaggaccgaacagggatgtctccttcgagttatagaaaatcttgatgcgccaattgttgtgccaccacacacaattcgtcataccattgctgcccgaaacggcgtatcaaaggctctttgagaaattggtaaagtggcaaattgagctctttacctttctcgactccacattggcaaatcttccaacggtggtaattcaatccaacaagtccatttcccaacgccttttcccgaatggggtataacgcacaggagatgggcttacaaaaatcaatctctgcctttcgataggctctttctaacacacaaaggcaacaaccttcttggtaacaagtaaaaacacaatccttgcgaccgacaatgctggttaccatgtcgccctccctatcaacataagctactccttgctggtcaatgaccgattgagccgaagcagaaagctcgttccacacagcatccacgttctcttctatgcttgcaatttcctcaatagtaacaggagctccagcatcgccttcaatgcaacaagctccatgacacacctctaaatcacaacaaaacttttgcgtgaaaacatctggagacaccaagacgttgcctacttgtataatgggaggatatgaatggttcatacattgaggagtattcaccatttcacaggctcaatgccctgctgtattaagtattcattacagcgtgagaaatgatgattaccaaaccaaccaccttgtttggcagatagcggtgagggatgcatgctttccaaaacacagtgtttgtgcttgtcaataagacgggattttgaacgcgcataaccgccccacaacaagaacaccaagtgctctttatggtcgttcaacaccttaatgacagcatctgtaaatgtctcccaccctcttcgctggtggcttttcgctgcatgcgctctcacggtgagtgtagcattgagcagcatcacgccctgtttcgcccagcgagttaagttacccgtcgtgggaatgggtattcccatatcggcttttatctccttaaagatgttttgcaacgagggtggaaacggcacaccgtcattaactgaaaaactcaaaccgtgcgcctgacctggcccatgataagggtcttgcccgataatcaccactttcacttgattgaacggacagagattaaaggcgttgaagatgagttttccgggaggatagcatgcaaactggctgtactcagcatgcacgaactcgttcagtttggcaaagtaaggcttgtcaaactcttgctgcaaacgcgttttccaactttcttctatctgtacttccatatcatcaatattaatatagcttgactacaatattcaaaagagacgagaattgaaccaacaagtggttcaattctggcgctcttatatgcttaaaaattcgataatcagtcggttatcagattttcacctgtcatggcttccggctgttccaagcccatgatgtgcaatatagacggtgccacgtcagctaatcttccgtccttcacggtggcactgttgttgtctgtcacataaacaaatggtacaggattgagcgagtgtgccgtgttgggcgtaccatcctcattgattgcatgatccgcattaccgtgatcggcaatgatgatcgcctcataatcgttggctttggcagtctctatcacctctttcacacaatggtcaatggcccaaaccgctttggcaatggcgttatacacacccgtatgtcccaccatgtcaccgttggcaaagttcaccacaatgaaatcgtactgctgtgtaccaatggcatccaccaatttttctttcacttcgtaggcactcatctcgggctttaagtcgtaagtagctaccttgggcgagttgactaagatgcgatcctcccccttgtaaggctcctcacgtcctccattgaagaagaatgtaacgtgtgcatacttctctgtctccgctgtatgcaactgtcttttgcccagactgctaagatattcgcccaatgtcatctctacattttccttcgggaacagcacatgaacattcttaaagttagcatcgtagggcgtcatcgtgtaatattgcaagtccttgatggtgtgcattccctcatcgggcatatcggtttgggtcagcacctgtgtgagttctttggcacggtcgttacggaagttgatgaaaatcaccacatcgccctcttctatctgtccttgaacagtggcgttggtgatgggtttgataaattcgtcggtcacctcttcggcataactctcatgcatcgcctgcaccatgtccgttgctttcttacccacaccacttaccaacaagtcgtaagcctcttttactcgattccatcgcttgtcgcgatccatggcataaaagcgccctatgatactggcaatgtgcgcatcgttcgtctcacaaacatgctgcaaagcctcaataaagccaactccactcttcggatctgtgtcgcgtccgtccatgaaacaatgtacatacgtatttttgagaccatatttcttagaaatttccaacaactgatatagatggtccaaagaagagtgaacaccgccatcgctggtcaatcccattaaatggagcttcttccccgttttctgtgcatacgtataggcagaaacgatttcaggattttgcagtattgacccatctttacaggctctgttaatcttcaccaaatcctgatataccacacgtcctgcaccaatattcaagtgtcctacctccgagttgcccatctgtccgtcgggcaatcctacattctcacccgaagcctgcaactgcgaatgcgaacatgtagcattcagataatctaaataaggtgtcggtgtattacttatcacatcacctttacccttgtctcctattccccatccatcgaggatcatcaataaagctttctttgccataattattgttacctgttatataaaaatcttttatgcaaagatagtgcaagccgaagccaaaagaagtttacttgttttggtgaggcgcagcctatcttatgcaaaggtactgcaattttctgacttacgcatcatctacaccttataaatacaagaatacttcacaattttcattcacgcaaaagccccacaatccgtttagattgcggggctttctctgtctaaataccaaagtaatgattactcaacggtgatttgcttgcctaatgtttgtacaatttcctcacgtttcggcaaggtaacggtcaagacaccatccgacatttttgcgcaaattttctctttgtctacgtcatctggcaaaatcagtgtctgctcaaaactcgagtaactgaactctctacgcaagtagtgagccttcttgtcctcttctttattctccactttcttttccatcttgatagtcagatttccatcattatcgatattcacgataaaatcgtctttcttcaagccgggtgcagccaactctacaacatactcaccgtcatgagcaatgacgttgattgcaggtgctgtactgttcaatcttggtgcaagacctgtatcaaaaaaatcatcaaacacacttggtaaccatgaatttctgtttcttactggtaacataatcatttcctcctatttttatattgtttatttttatttgctctttcgagttcactaaccattgttgcaaggagtgtaccaacgaagaaactgcgccattttggcgcacatcctgttatttctcacaaaataaaagacacaatgtcagtatttatcacttttaaggtatctatttgagcaaacaaactcacaagagaaggctcttttattccctttgttttgatgtgagcatctaacattccgccccatcttcaaggagtctcgcactaaaatacaaccgcctaaaggcttcaccaacttacaactaatgccactgcgagctattccccacctgcataaggtaaacatacggtcacagtgagttcatcttactcatgtcacattaagaatttttgaggggtcaaaaacgcctgattttgtccgtttttcttccctaattttaacacttctgaaacctcacaaatagaaaaaatatagggcatttttagggtgttcagaaccctcaatcggactataaacatgactttgaccggttactccattgagttaatgagcctacattaatggaataacgcccttaagtcattattttatcgacccaaaaccatgcttttagctgctatttcgcactgtttttgcggctaaatgatgcccctatttttgtaacatattgattatcaagcattcttatttttcgcgtatttgcgagcaagtctccacttcgttacaaatacgcgagtattctgagagcatttgtcaatatatttcagattctttaacacgatttttcattgcatcggaatgacacggaacgacacggatatgcagtgaaaatccgtgacactccgttacggcagaaatcatatacttacaacgaaacaagctattctaaaaataaaagaagtgtgacgacacgaccttataaaggctggttctataaattaccaccgcacatagtcatcaaatgtttatgaaatacgttttgttatcttttggcttctttttagttcaaaatgtaagttcgctcagtcgtgtagctcgctacactccttcactctcttgcattttgacctcaaaaataagctcaaaatctaacaaagctaatttatagaaccagcctaaaaggaaaaaacttgtacttctgcctaaaaacaagtacttttgtaaccaaattccctgcggatgacagagacactcaaagagaaaacggcaaaaggtatattttggggggcgatgagcaacatcaccctgcaattggtaggtgtggtgtttggcatcatgctgggtcgtatcctgtccgacgaagactatggcatgatggcgatgatagccatttttcagttggttgccattgcccttcaaaacagtgggttcacggttgctattaccaatatgaaatcccctacccacgatgactacaacgctgtgttttggttcaacatcttggttggcggcaccttgtacatccttttgttcctatccgctcccctgatagcctctttctacgacacgccagccctgacatccctatgccggtacagttttttaggcatcctcttcgcctcgttcggtaccgcccaatcggcatggctgttcaagaacttacacgccaagcaacaagccaaagccaacatcgttgccgtattgctgtcgagcatcacgggagtactaatggcgtggggcggttttcgttattggtcattagccactcaaagtttggtgtatatcctgctgtgtaccctactctactggcattattcgccttggcgaccctccgtacatcatatttcgtttgctcccgtgagacgaatgttcaagttctcattcaaaatcctactcaccacgctcattacccaagtcaacaacaacgtgctgaacattctgttgggcaggttatacaccaaacacgacgtgggacaatacaaccaagcctaccaatgggacagcaagggatttcagttggtgcagagcatagtgaaccaagtagcacaacctgtactcgttgaactgaagaacgaggctgaccgacaactgcacgcttttcgcaagatgatgcgcttttcggcatttctcagtttccccctcttgttgggactgggactggtatcgcgcgaattcatcgtgcttaccattaccgagaaatggcttcccagtgcccaactccttcggcttttgtgcgtgagtggggctatttttcccctcatcacattaatgtcgaacctcatcatcagcaaagggaaagccaatgtttaccttggttgcaccgttgccttgggcgtattacaaatcgtcctcatgctattgctgtggccatacggcatccgcaacatggttattgcctatgtatgcctcaacgtgagttggctttttgtgtggttctacttcgtgagaaagtccacgggatacacgcttccgcagttttttaaggatgtgttgccctttgcagtcagtgcatcagtggtcatggttgtgacctactacgccacgttgggcatcactcatctgctcccattattagtcgtcagagtggtaatggcagctgttttgtattacgtcatcatgcgcgttgccaaagcagagatactccgcgaatgccaaacagccattctttctaaatggaagaaaaagcgctaaggacatccacttaatccatatttttatgtatatttgctcattattgaaaatcaaagcagaaatttaacacatgcaagccattatattagccgcaggaatggggcgtcgtttaggaagctacaccaaggaaaacaccaaatgtatggtacccgtgaacggagtaaaactcattgacagggtacttacccaactatcgcagctcaacctgcaacgggttatcattgtagtgggatacaagggacaagaacttataaaatatcttgaccacagatacgacgacaaactgaaaatagagtttgttaacaatcccatttacgaccgcaccaataatatttattcactgtcgttggtaaaggatcagatgcaggaagatgacaccattttaatagagtcagatctcatcttctctgaccgacttttctccatgattcttgccgacgagcgtcccaacattgccctcgttgccaaatatgaaacatggatggacggtaccatggtgcgcattgacggtgatggcaacatcgtgaactttgttcccaaaaaggctttcaactatcaggaggttgactcgtattataaaacggtgaacatttacaagtttagcaaaacgttttcgcaaacacagtacgttccttttctcgatgcttattgtaaagctttgggaaataacgaatattacgaacaggtgttgcgagtgattacactcttggataaaaccaacctcaaggcacttgacattggcaatgagaagtggtacgagatagacgatgtccaagacttggacattgcagaaaccattttcgctaaagacgacgagatgctcaagcggtataactatcgctatggtgggcattggcgttttccaaagatgctggactactgctatttggtaaacccctactttccttgtgaacagatgaaagccgagatgaaagccaactttgacactctgttgactgaatatccgtcgggtatgtatgttaactcgttgttggcaggcaagtgttttggcatcaaacaagaatacatggtggtgggcaacggtgcagcagaactcatcaagagcctcatggagaacgttaaaggtaatgtgggcatggtgttccccacctttgaggaatatccacatcgactgcgaaaagagcagatagtggcgtttgttccgcccttggacacgctgcgatatactgccaacgacttgatgaatttctacaaagacaagtccatagacatgctgttgctcatcaatccagacaatccctcgggtaacttcatacccaaagccgacgttgtgagactggcagcatggtgcaaggagcgaaatatacagttagtggttgacgagtcgtttgtagactttagtgatgactttctacacaactcactcctttgtgatgagacattggaagcctatcccaacctgttggtcatgaaaagtatttcaaaatcgtacggcgtccctggacttcggttgggaattttggctacctcgcaacgagaaaccattgctcgcatcaagaaagacgtgtcaatatggaatatcaactcgtttgccgagttcttcatgcagatatacaataaatatcaagcgcaatatgaaaaggcatgtcagcaatttattgacgagcgcaatcgctttgccctacgcttgaaggagatacattttttgcgtgttctgccaacccaagccaactacttctgttgcgaggtgaaaccgccctataccgcagccgaactgaccaaacagctgttggcacgcttcgacatcatgataaaagattgcaacagcaagacatcgctcaaaggattgaactatattcgcatctctatccgcaaccaagcggacaacgaccaactaatcacagcattgctcaacctacaaaacgaaaccatataaatgaaaatatgtatttgcggaggaggtaacttagggcatgtggtggctggtttcttggctgcacaacccactcatgaggtgagtttgttgacacgacatcccgaacgatggacgcatcatttgctcattgacactcccaatggagaggtgttaaagggggagttatgccacatcagtacgcatgccaaagaagtaataccttctgctgagttggttttactgtgcctccctggatatgcactgcacgacacactggagcaaataagtaagtacctgttgccccacgtacctgtgggaagcatcgtgtcgagtacgggcttcttctttgaggctttggacatcttgcccgataccacacctctctttggctttcaacgcacacctttcattgcccgaaccactcaatatggacatcgagcatcgctgttgggctataagcctcaactcaatttagcaattgaacgagggggcgaggctaccgaagcattaagggaaacattgcaagaaatgttgcatacccccatcagtctgttagataactattacgaagcgagtttgacaaatagcaatccgctgttgcacaccgctcgcttgtacgagctatggcacacttggcacaaggagattatatataaagaggtgccgcttttctacaccgattggaccgatgaagccgcacaattatacatccaaatggatgaagaactgcaaactctactgagcaagttaaaggtaaagcagggcgcaatacccactgttctcgattattacgagagtacggatgcacatagtttaagcaaaaagctgtcatccattgctgcctttcaaggcatacctgcacccatgaaagccgttgagggaggttatcaacctgacttttccagtaggtatttcacagaagacttcccctatggactggctatcattcaccgtttggcgcatcaacacggtgtagaggttccacatatcaacaaggtttatgaatggggaatgcgtcaattgtcaaaataaaacagcactcatgaacacaccactcataccacacgaggaactgcgccaacgatataatcccgacggatcgttgctgcaccgccaacagatgcgcatgctgcacatccttgttgaggttgacaagatatgccaacgccacaacattcagtattggctcagcagtggaacattgataggtgctgttcggcatggcggttttataccctgggacgatgacttggacattgagatgatgcgctcggactacgagcgacttttggaaatactaccctacgaactgcccgatgacttagcattacaagcccatagcaccgacccaaattattgttaccattacgcaaaggtgcgcgaccgttgttcttatatcgaagagaagcccaactacgaccgcttttttaagcatcgtggcatctatatagacatattccctttggagaagcaacatatgtggacacacaaactctcggaactttccttcggtcatgcgtataaactcatgcgtatttacaagggaagcgacgaggagtgcatgaaaagagtgaaacgactctatgcgtggaatgtaagacttatctacccattactgcgcttggtgaatcgcatcacgggtgcaaagaccatcaccagcggacttgggattccgtttcacaatccccgatacgaagaggatatattcccattgacaaccattgtgtttgaaaattgtccgttcatggctccccatgacagcgatcgcatgttgcgacacatttatggcgactatatgaagctgcccgatttaagtcaactaaagcctcatacaggcagcattgaaatatacaataacgaaaccaacaaacattgataggacatgaaacagcctgcaaaaacagacgtggcggtactgatactcttctttaaccgtcccaaggaactgggcaacctgtttgaacaaatcaaactggctcgccccagcaagttgtatctgtatcaagacggaccacgcaacgacagcgacttgccacgcatggaagcgtgccgaaagctgctcgaggatgagcacattgactgggaatgtgaggtacatcgcaactaccaagaagtgaacaggggctgtgacccttccgaatatctctcccaaaagtgggcattcagccatgaagacaagtgcattgtcttggaagatgacaacgtgcctgccctctcgttcttccctttttgcaaagaattgcttgacagatatgctcatgatgagcgcatcggcatgattgcgggcatgaactacgatgaagaaacacaggggattcccgatgattatttcttcaccactacctttagcatcagtggttgggcatcgtggaaacgggtagttgacaaatgggacgctacttattcgttccttgacgacaagtacaatcggcagcagttggaagctcttattaaagaaaggaaataccaaagcgactttattgagttttgcgagtatcaccgttcggtggggaaagcgtattacgaaacgatttttcatgcagccatcttcttccattcacaactctgcatcgttccccgagtgaacatgatcagcaatgctggagctaccgaagacggtgttcacctcagtgggagcaacgacgatttgcccaaagccattcgaggaatcttcaccatgcaacgccacgaactgtcgtttccgctgaaacacccactatatgtcattgaaaatgtgggctataagcaccgcatgttccgcatcatgggctggggacatccttggcttaaaataggacgatcggtagaagagctgttcatcaacttgcgtaaaggaaatttcaaacgcatcaaagaggcgatggtcaatcggatgcgcaaactatgtggcaaatccaaatgggactaacaatagctttaaagaataaacatcttaaataataaaaacctacatttatgaaaaaaacactcatttttgctgccctcacactatctctatctgtggcagctcaaaccaatccgttgtggatgagacacacttcgatctctcccgatgggcaaactattgcgttttcgtacaagggcgacgttttcaccgtacccgcttcgggcggtcaggcacgacagcttacctcgaatgcagcatacgattcctaccccatttggagcccagatggctcgaaaatcgccttcgcatcgagccgtgaaggtagcttggatatcttcgtaatggacaaattcggtggcgaacccaaacggcttaccacccgaagcaccaacgaaactcccattgcatggcgtgacaacgaacacattctgttcagtgcagctatcatgccaacagcaaaatccatcttttttgctagcagtcagtttccacaagtgtacgaggtaaacttgaaaggcgaccgtccaaaactcttctctgttgtgaacatggaggacttgagcatcaaccaaaagggtgagatattgtatcatgacaagaaaggatacgaagatcccttccgtaaacatcaccgttcgcctatcacaagagatatatggctcaaccaaaatggcaagtttaccaaacttaccaccttcaacggtgaggatcgtacgccacgctgggcacccgatggcgaatctttttactacctaagtgaggaagacggaaccttcaatgtgtacaagcgaggggtgaaaagcgcaaacaagacgcaaatcactcaccataccaaacaccccgtgcgctatctttcagtggcacaaaatgggcgaatttgttacagttacgacggtgagatatacacgcaaatggggtctgctgcaccgcaaaaagtaaacgtgagcatcactgccgaccgcaatgacatcgacctaagacgccaaatcaactcgtggggagctacagagattgctctttcacccaacggaaaggaaataggattcgtgttacacggtgacgtgtatgtaaccaacatcgaatacaaaaccaccaaacagattaccgatacgcccgaacaagagcgttcaattgggttctcaccagacggtctcgctattgtatacgcgtcggaacgggaagggttgtggcaaatttaccaaacaaccatgaagaataaagcggagaaacagtttgcgtatgctaccgacttacaggaagaacgcctcatccattcggcttatacctctttccaaccgcaatacagtcctgatgggaaaagcattgctttctttgagaacaggggtacactcaaggtgcttgatgtgaagagcaagaaagtaagaaccgtgatggatggcaaatatgtgtactcttatagcgacggggatatttggtttgaatggagtccagacagcaaatggctcatctccaattatatcggaacaggaggatggaacaaccgagacatcgccctgattgacgcagaaggtaaaaagcccatttacaacctcacgcaaagtggctacaacgacggcaatggaaaatgggtattgggcggaaaggccatcattttccaaagcgaccgggctggctatcgcagtcatggaagttggggagcggaggacgatgtgtacatcatgttcttcgacttggacgaatatgagaagttcaaaatgacgaaagaggaaaagagtctcctcgacgaagcagagaaagaaaagaaaaaagccgaagagccaaagacggtagacgtgactgtgaagaagaaagaaaagaaggaagagcctatcaaactggacttggacaactgtcgcgaccgtgtgcttaggctcactgtcaactcatgccgattgggcgatgctgtgctaagcaacgacggaaacgccctctattatcaagctgccttcgaaggtggttacgacttatggaaacatgatctacaagataagagtacaaaaattgtattgaaaggtgttggcggcggcggtatgctggcggacaaagacttcaagaacttgtacctgtgctctggaggaggcatcaagaagatagatataggcagtaactcgtcgaaaaatgtcgattttgaagcacgtttcaactacaagccttatcaggaaagggagtacatgttcaaccacatttggcaacaggtgaaggataaattttataaggttgatttgcacggtgtcgattgggacggctacaaaaagagttatgcacggttcttaccttatatcaataacaactatgacttcagtgaaatgctgagcgaaatattaggcgaactgaacgcatcacacacaggtgcgcgctattttggcggtggcgccaaccttagcactgctaccttgggtttgttctacgaccaaacgtacgatggagatggactgaaagtcgaggaagttatcaatcgcggacctttctcggtgaagaaaacaggagttacgaaaggctgcatcattgagaagatagacggtgaaccgatattgaaagacaaagactactactatatgttggacggaaagtcgggtcgcaatgtcagggtatcggtgtacaatcccgccaccaaaaagcgtttcgatgtaacggttaaggccattagcaagggctatcaagacgaattgctgtacagacgatgggtggacaggaaccgccaattggtagatagtctgtcgcatggacggttagcatacgtacacgtaaaggccatggatagcgagagtttccgcactgtattccatgaattgctgagcgataagaacagaaatcgcgaggctgtgattgtagatgagcgtcacaatggtggcggctggctgcacgatgacttatgtacgctactctcaggcaagcaatatcagagctttgtcccacgtggacagttcattggcaaagacccttggaacaaatggactaagccttcgtgcgtcatggtgtgcgaagacgattacagcaatggacatggattcccgttcgtgtacaaggagttgggtattggaaaactgattggtacgccagttgctggtactatgaccgccgtttggtgggagacactcattgacaataccatggtctttggaatcccacaggtaggttgccgagacatgcgaggcaactttggagagaacacacaactcaatcctgacattgaagtgtataacactccaaaggattatatcaatggcaacgaccaacagttgaaacgagctgttgaggagatgctaaagaaataatgttgcaaccaacattgcctaaacgatttagacaatggagtaacacaaatgaaaacctatctgaagctgtccaaagcctgacactttcagataggttttatcatgagatatcctaaagaagcatggacaccatgtccaaagcctatttggaaatctacaaactattcttggttaattcggcataaacctgttggaactgatgctctatatttatataatcttgccatttctcatagattttatcgacctccgtataataatccaataatgacatctcgccaatttcaacaatctttcgaagagtttgtagcgattgacgtaagaaacttaaatcataggtgctcaaagaagtgcgcaattgttcgagttcattctggcgtgccctccattcattacttactttcatttgcacattggcttttcttagcaacgctccttctaaagcagcctgcgctgctttctttttgtgttggtttgtgtaaagcggcaaagaaaatcctatttgcactccattactaattaaatctccttctgtattgcgtcgatatccaatggtaaggcgtggcaaccaactatttttattgattttcagttgctgttgagccgcttccccataacctttagcagcgagaacttccgcatctgtttgcaataagtgagtgcgtaacgaatccgcattaaacttggtcatgaccaaaggataagccaaatgttctaagagaaggggttgatttccattaagtatcagtaactcttggtatactcgctgtcgggatgcctcattctttgcaatatcagcatgtagagacatttgttccatttttagtttgttcagttcaaggatagtagcctctccatgctcaaaccgcttttgatacaattccaaaagccgctgcgctttctctaaacgatcagccaaaacgttcttcaattgattcaactgaatccaatccaaacatttaattttcgcctccagtagcaggtctcttcgctttgtctgatactccaagttcaatacacggtgctgtttctttgctaataatcgcctggcgccatacaatgtagggaaatcaaactcttgcgcgacgatgagttcggaactggaaatgccaggaatgccactcctcataaatggactatactccacagaaaggccttcaacggtattgttttgttttatttcttcgacctcgctcgctacatctttttgtgccgcctgcaattctatattgttcttttcaatgcttttaagcacatcgtcaatgccttgcgcttggctatacaaaacgcaaggtaggattgcccacaaaatagttattctttttatcatgaccattttatataaattcattacttatttctttccgacaaatccactcataaacaatcggtataataaaggcatttaagaaagtagagcttaagagtccgcccaagatgactgttgccataggactttgaatctcattaccgggcaaatcaccacgaaaaacaagaggaacaagcgccaacgccgaggttagggcagtcatcaagatgggattaagacggtcggaagaaccttttaatacgctctctcgcaccgacagtccctcatcttcccttaacgagttgtaacgagtaatgagcaacatcccatttcgtgtggcaattccaaataaagagataaaaccaataatggcaggaatgctcacttcgccagatgtcatccaaagaaccaatacgcctccaatgagtgcaaaaggcaagttcagaagaatgacaccactttctacggcattcttaaactgcatatacaaaagcaaaaagatgacgacaatgctcagcaaagaggtgagcagtaaggtcttactggcagatttctcgctttcaaactgtccaccatattcaatatgatacccttcaggaagattcacttttgcgttgatttctttttgaatatcgttcacaacacttcccaaatctcgcccattggcattggctgaaatcactattttacgagccacattttcacgatgaatggtattgggacctgtggaagagataatatctgcaatattactcaatggaatcttattgccattagaggtatccaccattaggtttcgtatatccgccatcgtacggcggctctcttcatccgatcgtacgatgaggttaaaacttttgtttccttcgtacacctgtgacacctgctcgccttttaagaacaccgcaatataatcattgaactctggttctgtgattccatagcgcgccaacatttcaggtcgaggcactattttcagctcaggacgctccacttgctgctctaaattaagatcttctatgccatctacatcttcaatagcagattttatttgaccaccaagcatatacatcttattgaggtcttcaccaaacaattttatggcaatgctcgcttttgttccactgagcatcgcatcaatacggtgagtaataggttgccctatctcaatgttagcccccactatggtagacagcttttctcttacatcatttaagagcgcctgatgtgaacgatttgtcaactcaaagggtgcttctatctccgacatattcacacccaatgcatgctcatccaactctgcgcgtcccgttttacgtgctaccgcctttatctctggaatagaaagtaaaatcttttctgcctgctgaccaatcttattggattcctctaaggatatgcctggcatggaactcacattgatggtaaacgacccctcgttgaaaggtggtaaaaaactgtgtcctaaggaaaagaaaatacacaaggttgccaatagcacaccgcaagcactccatagcactactcgtttatggtagagtacccaagacaatctagttgcgtaatgtcgcttcaaccaatctacaactttcggctctttccatttcacattgttttgattcatgtgtacattaagtaaataactgcacagcacgggagtgagggtaagtgccacaacggttgatgcaaacaatgccactataaaggcgatgcctaagggtattaacattctgccttccataccgctaagaaagaacaaaggcacaaaactggcaacgataatcagtgtagagttcaagatgggcaaacgtacctctctggaagcatggtaaaccacattcaagatacccaaccgctcggctttgggcaagagatgattctctcgcaacttgcgccaaacattttcaacatcgacgatagcatcgtccaccaacgaccctatggcaatagccataccacctaaactcatggtattgacactctctcctaactggtgtaacactaacaaggagaccaaaagcgataacggaatggtaaccaaagaaatgatggtggtacgtacattggctaaaaacaagaacagtacaatcaccacaaaaagcgcaccttcaaggagcgaatcctttacattgtcaatagagctttggataaagctcgactgtctaaacacatctgtagacacatggacattagcaggtaaatctttctgcaaatcttcaatcgccttatccaagacttccgtcaattctatggttcccgtattaggttgtttagttacggtgagcaacactgctggcttccccttttcggaggcaacacctaatttgggactttccgaaccaatttttatctctgcaacatcagacaaagtcacgggataatcgcctgttttcttcaccacagtcttgccgatgcgctcaagagcaggagtcggcatcatccctcgaattacatattcattcccaaattcgtagagtacaccgccattcgtattcttattcatgcctcgagtggctgccatcacatctgccaaattcaccccatagtgtttcatcttgcggggattcacctgtatttggtattctttctgatcacctccaatgactgcaacttgtgcaacaccaccaatggagagcagtcgtggacgtatcgtccagtcggctaaagtacggagatctaacatggaagtgctatccgatgtcaggcttactatcatcacctcgcccaagatagacgattgcggtcccaaggtgggtcggcgcactgtgctgggtaatgattctgaaacggtcaaaagcttttctgaaacaatttggcgtgcacgataaatatccgtcccccaatcaaactcaacccatactaccgaaaatcctgttgttgatgaagagcgtaccctgcgcacgcctgtggcgccattcacggaagtctcaatgggaaaagtaaccaactgctccacttcctctgccgccattccctctgcctccgtcattaccaccacagtgggtgcattgaggtcaggaaatacgtccacctctgttcggtggacgctgtacaagcccatgaggacgagtaccacagcacacaccaatatcagaagacgattgtgtaatgaaaatttgataattttatctaacataacgttcctctcccccttttaatgcgaatgacctggtatctccattgtcgatgcggcgagctttacatgaattgctccttgtatcactaccttctctccactctttaatcccgacaggatttctactcgtgtaccatccgactcacctaacttcacttcctgctttcgatagtgagtcgcttcttcttggatataaataaaatagactccttgctcttctgtaatggcagatataggaacactcaacacattggggcgttgcgttgtcaataaataaatctcggcaaacgcaccaggaacaaccccattgcgattatcaaattcgaacgtgacaggtatgaaagccgactctatgctggagccctttccataagtcaatagtttcccacccattgaagaaagctgatacacctgttgactataagaggtcttgaagttagcagatgtaatttggctcaacataccataactactttctggcacttctgctcgcaaataaagatgcttgttttgagaaatcgtcataagcggctgacctacttccacatagtcgccttgttttaccaagcactctttgataaacccagacatctgtgcaaccacagccacgccactcgaattacttcttcccaacgccttataagcgagtgcggctcgttccatgttggctttggcatctaaatattctttctgcgtcacaattttatctgctaccaagtctttctttcgcttataatctgctaaagccgtctcataagcaattcgagcccgttgtgtaacatctccttcagggagttgatcagaggaaatgcggaacacactcgtacctttacccaccgacattccctcggtcagagggtgcagcattgacacaatacctgccaccgtagccactacagtcttttctgaaccagaagctggcaacaccttgccactcactttcagtacgccatgaaaggcagctggctttatctctcgtaccacaactccagcagcttgcgctttcttctggtctaactctatcaagttagcatgctcatgcgacgcctcctctgctttctccgttggtgaatttgaatgctgttggggattgctttgacaagctgaaagaaacatcccccctaaaataatcttaaaaataaatggtctaaacatacatctaattgttttgtatgcaaaggtaaccatacggggatgcaactcggtgtcaaaccctcatcgtgttcgaaggggcggaaattcaaatgttgtgctatctgtgagagactttcttcgcttgacagtctggacacaagcctttcaacatataattaactgcatgaacctgaaaaccttcaggcaactcaagaattggtgcatgtagcgtcttaaaacaaaaaactttctcgcaggcttcacaataaaaatggacgtgcatgtcgtcatctacatgcgtgttatcggtcgtgcagatttcataccgcaccaagcccttaccgtcttctatggagtgaatgactccttttcttaaaaagagtcgcaacacacggaagatacttgatttctctaaggtcaacaggttgttctctaagtcggagagactcacaggtcgattcatttcaatgatggtgcgcaacaccaatatgcgattggaagtaggcttgacgcccgctttatttagaatgtgaataataagatcaatgtctgctttcatagctgaaaaatatttagaaaagataaaaaaccatgtattacatgttgctcaaagagcgacgaatagttcgtttacaatagcaggtctgcaaagaatcaccatgttcagaaagaactttctggtattgttgcacaaattagtgttccgcatttttactcccattgagaggaaattcctgttgtgaaaccgttgtcatcatacagtaatctcccccgaaccaatacaacaatggtgctgttcatcatacaccacacagaattgtcctggtgcaacaccatgtattgctgtctctgcatgaacggtataactatctggtgctgtttgttcgatgatacctgagtgaaattctggggtgtgtcgaatcttaaaggtaacatgatgcatgtctacaggcattgtcaaaaaatggaagtcatgtatcttgaagtccttttgataggcggtttgtgggtcgtaacccttactaatatataatacattgttggcgacatctttcttcaccacaaaccaaggaccgcctccaaagcctaacccgtgacgctgacctatggtgtggaaccacagtccccgatgctcgcctatcagttttcccgtttctaattcaatgacctttccaggattttcaccgatatacctccgcaaatattcgttgtaattgatttgccccaagaagcaaataccctgactatccttccgtttggcattgatgaggtgctcacgttcagcgattttacgcacctcgcccttctgataatgccctatggggaacagggctttcttgagttgccaatcatagatttgcgccaagaaatctgtttgatctttcacagggtcaggacttgtagtaagccacttcctaccctctattatctcggtttgagcataatgtcccgtcgctatcaaatcgtattgataccccatcttttcatgaaaggcgccaaacttaataagtcgattgcacatcacatcgggattaggcgtgtaccctgccttcactttctccatagtgtagcgagtcacctcattccaatactctttgtgacagtctaccacctgcaacttacaaccgtatttggctgctacatgggtcgccatctctaaatcttcttccgatgtgcaatcccattcttcttgctcttcgggtccgattttgatgtaaaaacagtcgggttgtacacccatacgtaccaactcgtacacgaccaccgaactgtcaacgcccccagagagcaacaccgcaatacgcttatcctttatttcatctatgttcatcaatgcaatagccctttcatctatgttgtggttgatagtgcaaagataatgatttatttcaggttatgcgatgattgcaaggcgattttatggtctacgaggagagaaccactgtgttcactcaaaatatcgcatactgttgaaacatcactattttttacttccatgcacagctctttcagtgaagactcatatttatacaacgaagagcaccaacgaagcaacgtaagtcatattgatgttatgccacatggaaggctcattaattctgaattttctttacaaagtgcctctcaaaactcgcgtgaaatcatccaacagcaaagtgggtcgcaaatacgcgaattttggacaaggtttgtaatctattgtcattaaagacgttacgtctatgacgacgctcttcttagctatttttaccacattttggtgactaacccattgagataaacctcctatttgcatgctttaatgcctctatgttatgtaaataacacccttaaagagtgtttccaagggcgttaagtcaatgtttcagcttaaaaatgcgcttattttgtgaaaatcagcccatttttgtggtacgtttgcctattcattttttctattttgaagattttagatggccgttttttggtaaaataataggacaaaagcaactcctgcctttaccaagtagcagcagccgtttcatcgcattagcattgttgctgaaacaagagaaaaaagatgatctttcatcacaaaccacctttcttcatgtaagccctgtgaccttcatgagtaattttatgacttttaacttggatatataaaatatagttcgtacttttgagttattatatcattattaaactaacgaagataaaaatgaaaaaattagctattatgtttgcagctggcttgatgcttgctgcatgtcaatcaaacggaaagaagtcaaccgcaggagattctcaagatgcagcattagattctgcaacggtagtaaacacagataccatggcttatgctggtgaaggtcctgctgctgacggtacatacaagtacagtctgaaactttatggagattctatcacagagtttgcttacgaacaagtagccgttacccctaaaggtacagaaacgatggctcgaaccacgggtattgcacacctcattcagcacaatggtaaagagtatgttcgtgttcaggagcacaaggaagactcggttacattcctcaaactcgatgacacaaccctgcgcttagtatctaaagattttgaagaagcaggtgaaggaactaacacagacttaaagttggttcagtaagactgcgcttaccaagagtgtaaaacacaaaaatgccaagagagatatttgtctttcttggcatttttatagttggtgatagtgttcaacgtatgattctacacttactacttcaaagagataggtgctgtagaaagcattaaacagcaccttccaccttagctaactatcttaatttccagtatttacaactggatgaactgtatcatcactacacaaaaccaccattaaattacttaccatggcagctttcttgtcatcatctaagtgaacaacttgatctgacgagagtctatcgactgccatttttaccatagataccgcaccctctacaatcttttcacgcgccataatcaccgcatcagcttgctgacgtcgtagcatcacagctgctatctcgggcgcataagccaggtaattgatacgtgcctctatcacttcgatacctgccatctgcaaacgttcggctaacttcgtttccaattccttattgacagattcgtcaccatcgcgcaaagtgatttcatccttatctacttcattcgaatcataagcatattgaccagcgacttgtcgaagtgctgcttcactttgaatcataacaaaattttcaaaggcacgcataattgaattcacatttttgagcgtttctccctgcataccgttagccatagtttgcgaatctatttcaaaaaccgctttgtaggtatctctcaggcgccacaccaacaccaaaccaatcatcactggattgcccactttatcattaaccttaatgggggcggcattcagattgcgtgcgcgtagcgatagtttctttgtggtgataaaaggattcacccaatggaatccgactttcttaaaggtgcctttatactttccaaagaacatcattactctggcttcattgggctctatctgtacaaaaccagccaagaggattaagtctaaaacaaaaagcacgctgcctatcacggagagggcgacgctggtatcgatgcccatgacaaacaaacagatactaatggctaaaagcacaaaaaagacaagcaacatcacaaaaccgttgatgctcatcccaacaaaatttatttccttattttccataatcatcattaaattagtaggtgaaggatgacccaaatatacaaaaaatcattgaacgtgccaagtctacaaagcatttttagcaaaagcttaatggctgaaactaaaaattcatacgtgtgaaaagaaggtgaaaaaagacagctcatcgactctcagactgtcttgccgaaggaggtaaagggcatatgattgttgatacggactccctctcgtgatagaaggaaaaataaagaacgagggattgaaaaccgaacgctatcactttagagccatagccctttggaatagttaggtgagagcaatacattagattgcaaagggcacagaggtaagaaaaattgcagagagcctttgtctaataaggctcacgatatttgttctcttccttgtcgtccagcatgctaaggtagctctggtagcgactttcggagatataatggttttcaacagccgtgcgcaccgcacaccctggttcatgcgtatgggtacaattattgaacttgcaatctttcgaaaaggcaaagatttccttaaaataactggtcagttcttccggctctatgtcaaaagttccaaagcctttgatacctggcgtgtcaatcacataaccaccatgcggaagggctatcatctcactaaaggtggtggtgtgtatgcctgtgccatgcgcatcactaatttcagcggtgcgttgttcggcatgagggatgagtacattgatgagtgtcgactttcctaccccactgtttccactcaatagggttactttttgagccaacagtgcatcaataacctccattccttgacctgtctctgcggagatttcaacacaatgataaccgacggtttcatagagattcatcatcatttgttgataatggtgctcctcttcattcagcaaatcggtcttgttaaaaaccaacaccacgggtatgcgataagcctctgccccagccaagaagcggtcgataaaaatggtagatgtttcgggatatttaatggtgaccaataaaaaagcttggtcaagattggcagcaataatttggctttgttttgacagattgggggatttgcgaatgatgtagttttttcggtcatctattgccgtaatcattgccgtaccctcagcgttggtaactatttgcacatagtcaccaacggcaacgggcgaagtgctgcgtatgcctttgagacgaaagttaccttttaacttacaatctatcagttgtccactgtctgtctttacggtgtaccaactacccgtattcttaacaaccaatccgtgcatgaatgtgattcaagttgatgtgtaaaaagaaagcaaataagttgacgaatgaacaagcggtttgtttgcttttccattcgccaacacattgcttttagacggtcattatttcttttgttttctcctcaagcagacggtctacgttcttgatatatttatcgtgaacgttctgcaattcattctcggcatcctttccagcatcttctgaaagcccgtctttaacggctttcttcagtctgtctttaatctcggaacgcacgttacgcacttcaatcttggctttctcaccaattttattgcattgcttcactaagtcacgacgtcgctcttcggtgggttgtggaatacctaagcgaataatctctccgttattctcgggagtaatacccacatcagagtccataatcgccttttcaatgtccttgatggcttttttgtcccatggcttaatggcgatggtacgtgcatcgggtaccgaaacgtttgcaacttggttaagtggcaccatggaaccatacgagtttaccatgactccgtccaagatagctacgtttgctcgtcctgcacggacgcggctcaaagactcttctaagtacgtggcagccatttgcatacgctcttctgcctctttcaatgtagcatttacgtctatcatattctgtattgtattagttttattgttttcaaaaatggaggctgttcaagacaaattcatccataaaaaggacgtttcaacaacctgtatatgcaaagatagtgcaagccgaaaccaaaaaaagtttacttattttggtgaggcgcagcctatcttatgcaaaaagaatacgagccgaacgcaatcaggcttgcctgaaattgctaaggcgaagtctcttttatgcaaaaatagggatttattccgaattatacaactgttttgtagaaataattatgggagcagaaaaaggcggggcagctggatgaacagcttacaatcgtcctatcgaatcagctctaaagaagagagggaactacgaaatctctatcacgagcacactcgccatagtttctactgacagagttgtgtgttcgcacatcccacctacagcgagcagttcagatgacagcagctgagccttcttcgctttctaccttccgttccttggtgttgatttgaaggaagattactggttagatgcctgaactcgttgcaattctacctctacccgattggtcaggtcaacaaactgttggatagaaagttgctctgggcgcatagtcatcaactctcccgcataaaactcggcagaagcattgttgcccgtaaatagctgtcgcaggcttacacggagcatttttcgacgttgattgaagactgctttcactaatcgtttgaacaattgctcattacatcccaaatcagtggttgcattgcgagtcattcggataactgcactttttactttggggggcggattgaacacatcttcatcaacagtgaaaagatattctacatcgtaccaagcctgtatcaatactgataaaatgccgtaagctttatgccctggctccgaagcaatgcgcaaagccacttctcgttgtatcattcctgtgcaacaaggaatgagctctttgttttcaagcatcttgaaaaagatttgggaggagatatcataaggataattccccgttaagacaaaaggacgtcccccaaagacttcttgcaaatccatgcgaagaaaatcctgacctataatattaccctgcagttttggaaagtgggtatgcaggaacgctaccgactctctatcaatttcaacggctttgatttcacgaggcttctccaccaaatactgggtcatcacgcccatccctggtcctacttcaagaacgggtatatctggacaagcatctaccgtgtcggcaattcgctttgcaatattcaaatcggtcaagaagtgttggcctaaatttttcttgggtctgactaacttcatgtgatgttattttagtgaagctcgcacaactaaaagcatcaagccttcttcaatacgcaaacttctatattctaaaagcaaaggtaaacattaaatctgatttgctacgcattaagaaacagaatcctacaaaaagcccttgtttttatcattctacaaagtaagccctcgcaattcaaaagatttctccttgccttacatttctctcttttccaccacgaactacctttcaaatggaagaagtaagttgctgattacatccaagtgaatgctttagcttctcatcatgtgcgaaaacacgataattttttcatgccacacctgacatcacatcactcatcaggcaatcaaaaaaaacattcctcacaaaatttttctttcttgcaaatgaacaatcttgtgaggtacgttaaatgatgattaatttctgtccttagttggcaaagaaatctacaactttgttccgagtaaccgtgaaagtgttttcagaattgtcaacttcagtaaacttgatgtaggtcggattcttgagattatctgtctcgagtttgaacacacggtctacaaacttcttattgacattattgacaaagggtagcacacagggtaaatagcccgcattattggcataatacatagcgttgccattgccctttccctcaaagccaatacttatttggtctgcgccaataattttataagtgaaatagtactggcaccaataagttccttcaccgcctttgcttgcgaatgttaaaccaaattgtggtcccttgtttttattaatcagctctgtaccaagacctgcgctaatgatattttctcccatgcttgcagctccaggtttaatcatgttccagaatctttgtccgtaagcactgaaattgctgaaagcaaagtaccaattggcacttacaaactgttcggtaataggaggtacgacgggcttcaataccacgtttttgttattggcgtccacccatttatcgtcatcagaataaataaactctgagaacgtttcaccagctatggttactggcttgtacagtttaattcccttagcagtaaccacgaagttgagccgtgtttcatcttggctgtctgggttggtaaacgagatggtgtggtggctgcgcaaagccctgtaacttttgcctttaatgactacttcataaatattgtatttcatactggcaaagcgtttctggacggcatcaatgtaactggcccaattggtacttttcttcaatggtaccatgaccacgcggttgttgtgcttcttgcccttaagaatgatgctgtcggcagaggctttcattacacgaaactccaagtcgcctaacataccttttccgtcaacaccatttttatctggattgtgcgggtcggagaaatagtggaagatgtcattgtactcatcaaaagagagtatcacaccctggctctgttctatcttgtaatgtgacgtgaacgtggagtctttaccagcgacttcgcttgccacagtgacgcggtcgtttttatcaaacttgcaaagtacgttgtagccgccatacatgggtgatccataatagtgcataacccagccgtctgctggtgtggtgaggatgtccttggtattattgatggcctcgcttatgcgctgcgatgaggacttgtcaaacaagtcatcgacctctggcgaacaagccgtcgcaaggaggatcgccgcaaggaaagtgaagagattgaatatctttttcatattgcgtttccttattttaatgttttcaaatcaagttgatgaatctctgacgcccttcttgtgacaatgtcgcgaagcttgtcaatgtcaataccccaagtgttaaggaagtatgacctgaggatgtcaagttttttaagaatggcatcaagcccagtggtgtcgacttgtggtgcgcgctcatactcaaatacaggtaccttgaaatactctggtacagggttgccgtctttatcaaatatagtattcccatcttcatctacttggtaaataggatcaccaccatgagctgtaacgggataggcattgcctttgaacacaaaatatgcaaacaaggaaccatcttcatcaaattgatatttcacgcttttgtggatagagtaacgtgggatacgattgcccttgctgtcgagaatataaatatatttcccgtctttgtctttctcccacatgatattacccttagcatcggtagctggcacgagattgtcatctttgtcatacagtgggattagattaccatccgcatcctttttgtacacatcattgccatttttgtctttttgatagaggatgttgccgtcttgatctttctggacaatcaatgcttcgttcatcagcttcttccatgcagcgggagtagaggtaacgtatgtggaatacaattcggcaaagtcctcattgtactgttcgctggcataaccactgatgaaaccttcgtggagagcctgctcgtcagaaacgttaacccaatcggtggtgtggtatttaccaacggaaaccgtgcgatactctgttgaatattcctttttctgcgtcaggatatgacagaactcatggtgcatggtatgaaaataccagtagttgaggtcaagtggcaagtcgcggtggctcttcaacgggtcgtcttggttaacataaagattgtcaagatcaagattgttgatacggaaaagcgtaatctggatgccaccctcagcggtaccaaggatgattttgttttgtccgtcatactctggagagccaatgagctggataacacggaagcagttcttcttcaggaaatccttacccatcagttcggtgtaagcgtcaagccatacatgcttcaaaaggatggacatggctcttgagttcttttcgttagctggaacaacgttataattgttattggtgagcttgtcaacgtaacgataattgaactcgatgttataaggtttggcgtaattggcctctaaccatttgtcaaactctgattgctgcatggtagtcttggtgaagacagagttgtttgtatcaacgtcgtcttccttgcaggcgttggtcaccgcaataagtgccagcagcatgatgattttgatatatttcattgtgttcattttttagaagtcttacttgtgtttgcatctcttggatttgcctccagtcctgcgtcgattacatcgagcggcaattggatagcgcctcgcaagtcgcccggtttgaagaaaatggggtcttctccatctaagaggtgacatacggtaatgccgaaacgtttgatatcaaggaaacgaccgccgtgccagaaagtctctatgcgacgcatttgcagcaacatgtatatcatgttgagctgtgtgccttcttccaatgtgaacccttgtggatgcaaagtctttttgatacttcggtcacgattggtggtaatggtatcctttgcgagaggagtatcattgatgaatttattcagactttcctgggtgagcgtaggccgcttggctgttccttgcactggtttggtgtgtgcggttatccaagcgttcatgtcagtcaaggcttctgcgtattttttcttcattacatacgcttctgccctctcaagcaacacttggtctgtggtgaatacgggtctcacgatatgtggaaatcctgtgtcgttaatcttatcggtcacttcgaaatactcgttgacggttggaatccaaaccttttggttattgccataaagcttgcgtgcctcgacaagacaattattagaagacccaccacgtggagcccatggcatgggtacccaaaatgtttcacagtccgtcatggtcatgttgtgattaaaacgtgaacctgtgcgggctaaacgcgaaactgagggcagaattagcaagttggcattctctgaagtgctgatatatttgttagagaatgcatctatcgtcagtgaagcatattcgttcatgtttctgagcacacctgatggattgctgcccaaaacctcatttgcgtacttgattgttttatcgtagttgagataaaacaggttgaagcgagccgcgaaagcataagctgcctttgcgttgaaatgatatttgggcactttgaggtaagtgtcatccaacagtggtatggctgcctcaatgtccgcattgatgttttcgtagagttgcttgagcgtgccacgagtgttcaccgacacgtctggtaccttaggataaggcaaaccgagatactgttctgcctttgcgggatcccaagccatgcagaacaccgtagaaagacggaacatagagtaagcgcggcaaagcaaagcctctgccttggcaccattgagttcgactggtgtccccaagttctcgatggcctgaagcgcaaggttagctgaagccacagcggtgtaacagtggttccaaatatatttcgggtcatcattaccctctgtttcaacgtctttccaacggtagagttgttcctctttgggagaataaccaaagtttgttccgttgtcatcgacattgtcgctgctcatttcaaaaatataagttgggtcttgtttgggataagccgaaacaagaagtttctggactttatccacgttgtccacttcggctctgtcatcaggcaatttgtcgagatagtcattgcatgatgtggttatgcccaacgcgaagactgccgaaaggaataaatatatctttttcatattcttaacttgttaaaggaatttatagtccaactctgagtgtcattgtgagctgtcgagccattggcacagctacaccaccagcgttgaagaactctgggtcttgaccgttgagcttcttgtccgcatagataaggaacaagtttgtaccctgcaatttgaggttaaccttgttcaaatgtaaatagttagcccatcgctgtgggaaatcatacgacagtgaaatttctttcatgcgtataaagtcgccctttgccacacgttctgtagagcgattataagcattgtatgcgtagctcaatctttggtctttttggcgttgacgcaagtcagggatggcaggtacgttggttgtcatctcgtcgcctgcttttgtccaacggtttctgaattcttttggtgtagcgtcaaggtctgaataccaagagtagaaagcagggtcaagacgcaccttatttccaaaagcgtaagttgcaaaaacgatgagatgccatcctttataagagaaagtattgcccaacgaacctgtataggtaggatcgacaggaccttcatacttcaaatgctcaatgttacgagattggaagtagatgccactggtagtcttctctccattctcgttgataaaggttggtataccattctcgttcaatccttggaaatccatggagaacaatgagcgatatggataaccttcgagcgtaaagccagaacctgtaatcatctggataatgtttcgacgattctttaatgaggtcacttctgtcttaacatgagagaagatgaagtctgtgttccatgtaaaatctttgctcacaatgttcttgctggatatagaaagctcttctccattcgacttcatggaagccacattggcatattctacaatagtacccttggttccattggtgatgcgcggacctatcaagtcgtagttgttacgacgataccaatcgaaagtaacattgatacgattgttgaggaagcccaagtccataccaagattaagctcatgtttcttctcgtaggtaagttcatcgttggcaaaatcccatatctcaagtcccgactccttgtcaactgtaaatggtctccaagggttgtagctctggataattactgcagcgttggtcacagcaggtttgtcacccgtcaaagagtaagacgctttgaatgtggcatgtgtgagactgttcttgaaagctttttcaaaccatggctcctcgtgcatgttccatgccccagagatgttccatgtgggcagccatcgagcactacgagccttacccaagcggttgctaccctcgtaacgcacagttccgttgatggtgtagcgacctttccaagaataggtacccgttccgaagaaagatacttcgcgactatgtccgttagacaagtcatagtaaatttcgttctcttcgcttgactgcttgaaatatctgtaatcgtacgaaccgagcaatcccatttcgtattgcatacccacgccattgaaatagctgcggttgcggtcggtgttgttcacttccatacctccaaacaagttcacaatatggtcgttggcatacacatcattatagcttgctgtggcacggaagtcccagctgttcatcttatactttgtttcgcgatagaaaccaccattgggcagtaccgagaatggcaagctgttaggcacgtcagggtctgtataaagacgctggttgccataaagcatggtggcatcgtccatggcacggaaagccaaagcaacgttagagttgtcctttatctgattggcttgtgttgtcgtagagaacttgtaagcgcccaacattgccaactctactttcgtaatgggcttatatttcagttctgcctgaactttagtgtcgatgacatcatagtcgttaaagttgttcgccaactcatggtgaatgttgaatggcgcatagtttctaacgtagaattcattggcatccaacgttcttgatgtattgatagcataagaataagggttgatatcaaagtcgcgagtcacggctcctgtcacattgtccacatgctggttcatggcgcccggtgatttttgctttctataagcagcatttccaatcaaattgagcgacaagtgcttgctcatgttgtacaatgcgttggtgctgaaggtgtatcgtctcacgttgctctgttcagtccatcctgggtcgttcatcatagagaaagaggtataatattgtgccttctctgttcccgaagaaatactgatggagtgattcattgatacagcgttgctgaacaactcgtcaaaccaattggtattgcgcatttcagccgcttgcagatactttattcttccatcttctgtgtttggaagcaagaatttgcctgtggtggggtcgtatgtgttcatcaattggtacatcttgccatacacaccacttgtggatgcgcgatgagtgcgaccaaatgaaatcataccattggcttcaagctctctgtatatacccatttgctcttgtgagttcatgatattgaactgactataactgggtttcaaacgcatggtaaattcacccgtataattaatatgtgtcttaccagctgtaccttttttcgtggtaacaacaatcacacctgacatggcgcgcgcaccatagatagaagttgccgaaccgtctttcaagatttggaagctctcaatgtcgtcggcattcagacctgcaatggctgatgaaataaccgttgcagcatctccagacgacaactggtcggcattgacttctgtgacatcttccatgataacaccatcgaccacccacagaggcttactgctaccataaatagaggtagcaccacgtacgcgaatcttcggtgccgtaccgaaagttcctgacacattttggacactcacacctgcggcacgtccctcgagtgaacggctaatgtcggcaacaccatcaagtttggacttttcggcatccaccttagtagccgcaccagtaaagagacgcttgtccatcttctgcataccagtcaccactacttcgtctactttctgtgcgtccgattgcaatacgatctgcatgttttgcgtaccgcgcaaggtttgtgacttcattcctatgtacgaaaccgtaatcataggattcttcttgttagaagtaagcgagaacttaccatctacgttagttaccacgcctgtctttgttcctgtgatcatgaccgatgcaccaatcactggctgcccatcatcgccggatgtaacagtaccattgatctgtgtctgggcattagccaagcctacacagagaaacaaacttacaagcaacattgttaatctttgtttcataacctcattgttaagttaaagtcttctcaaatcattcacttattattcataacttttacgaataaaaacaaacactacaaaagtccaaactcctcattacgaaataaactataagcgtttgtcgaataatcgtattttgcaaaaataaactaaaccttcaattttagcaaatttttccaaacagaaatttacagattaaacgtttattaacataccaacaacgggattatgcctatacagcacgatttccccaaacaaatattgacttgttaatgtacaaaggaaggtatgaaaaacaccaacatattgcttgtgctgaggcgcagaggcacacgattcgtgcggccaatcaaacgccaattgaattgatgttacatcttggttgggtggacacacgagccgtactcccctaccacaatgcggttacgactccccttgcgtaacatttgagggctattacaactgaacaacgacagcaatctcaaaataacatttttgttgtgtaattttaccaaaaaacggccatctaaaatcttcaaaatagaaaaaatcaataggcaaacacccaacaaaaatgggctgattttaacaaaataaacggtttttttaatcaaaacattgatttaacggtcttggaaacatgtattagaggtgttattcacatgcttcaggagcattaaagcatgcaaataggaggcttatctcaatgctttaactgccaaaaagtgataaaaataggaaagaaaagcgacaccgtaagcataacgaattaaataacaacggattatgaaacttgctcataactcgcgtatttgcgaccaactttatcgttggatgttttcacgcgagttatgagaggcactttgtaaagaaaattcagcaataattatcattccatacagtgaaccaccaattttacaatcgctgtttagttggcgttattcgttattgaaacgtacgctcattgacatatttatgtcattcgttgaaattgtggtttacttcgatttatttcttcgtaatgacatcaaactcacaaactttcgaaatcgtacgacctccttgcaccacagtggcgcatatctttgcacgccccgactttattctattgtcagccttcaccatggcagtatagcggattcctgtacccggttcgatttgttctacacgaacactcggggaaatggtaagatgcttgttgttggtagtttctaaaactatcggttcgacattatataaagtctgagtaccctgattgtaaacttcaaacaccactctgcaaacctcccctcgcgatatggctccatcctgattttggtctatcagtcgtgcatttctaatttccatggttggcgcataagtgagacctttggctaacttctctacgctggaggtggcaggagtcttcttcgttggatactgaatcatgagtgaatcttcatcgccttgtctctcaaaatccaagagacggtcatccccactgtttgtttcgtcatatccacttgcgtcccaaccctctcgctgataatcgtacatgttttcttgtttctgcttcttgatttgttggcgttgcgctctcttctgcgctcttatctccttatctcgttgatactggtctaaatcagcttctcgctttttatctgcatttgctccgatagctccaccaaccacagcaccgcctgccattccaattatcgttcctaaatcacttccacgagggcctccagagatacctccaatagcactccccaatatcgaccctaaagaggaacctgcataagctccactccccgcataagtaccgcaaccactgcatacaatgaggatagacaacgaaataagtaagttttttttcatgttatcttgatttattgacggaacatagaattacactcgacgcacgatacaaatatacaaaaactcttcttaacctcgagagggaatttccccatgaaacgtaggaattcccctaaattcttgttatactgcaaaatagaacggattgggataatctccaccagtctcaaattgagcaaaaaaattaaatcgcttgataaccttttatactattggttttcaagatatctcgcaaactcaactcttcgtgcgcagcagatgaatcatcgacatgctcttcaggcagaggctgataattaaaaactttatcgtgcaaagcaccacatccccagcctaataaggctattgctaaaaataccagaaatacaataagttccatattctcactttttatgttctacataaatatctacacgcaaaaataagaaattaagttgacttttccacaaaaacaaccttaaaagtgattgtcggtagacttcacatgatgacaaagaaagaataatggctttcgtgcatagacaagaaagcacattaaaaaggaggtgaacgaccatgcgcgcacctcctttttacgttttatgtcactctcaaaaattatttgatagagatcggttcatttaagggagcaatatcaataccgtttgtcttaccatccaaattcttggctgcatctttgatgatatcgccctcgactttctcagagccatcaagcttataatacaattcaagtccgtcagacttaggatctactcctaacatgaattgtttgatttgcttgtcggtacgagccacactccatactctcaattcgctcatataaccacggaatggacgttcgccccaagggaatcctgccaacttaccaatgttaaagccgacgtccttattaggatcgaagccagcaatattccaagtagactcagcccacttggtaccattcaagtacagaacagtctttccagaaggttgatcgtaagtgatggcaacgtgacaccatttgtttgcgggcagtttgtcaggagattcataatgctggtttcctgcaatttgtaaaatacctctactaatgccgccgccttcatcaccaacacgtaatatcatgataccttcgcaacccataatggtattattcgatccccagcctgtagaataaactaaagcctcgtaggtaaacgacttaaagaaagttcctgctgggaattttacagaaatatagtgatttgtgaacgtacccaccttgttaattaagattggtttcgctaaaataacatattctatatcctcacctgccactgtaggaacgctacttgattttactcgaacaggcaagatataagactttcctgcttcaagactattcaatccagagagggtaagtaccactggttttgcgtgcgtcgcacctgcttcaatcacagcttgcggtgtgtttattttcgcattttgtgcattgaacggtaaataacctgtaccatgcttcgcattatactcttttaccaatgactcttctgctacctcatacgatacattcacatccgacgatagaagattactaagacgagaggtgatatttacatccatcacatctttttcttctttcatcgttacctgatattcactgctctcaaagtaaaccttttcagcgagcaaatcactttcgctctcattattgcatgctcctaacaagaaggctaaccctcccattaaaagagaacggcatatatgtttgtttttcattgttatctcatttttgatgattctctaaacttactttttcttttggttagctttccattcattataaaccttctggttaatctgaatagcttggcgcatccacttgtaattaggcgtattgtcgtagtcgttgtcaaaacgataagcacctacaccacctttacatccgttggttggcatcaaggctgcctgcttcaatagcttaccaccactactaaagctcgattcaaaattctcggtaataatcagttttttggtatcaaagtcatagtaatctaagctgggcacccagccatatgattgtgcaatccaataatcaacatagccatccaaggctttggttagaccatggaattgtccgtcaatacaaattagtttgtggcctttgccctctgggtcactctttggaccaatatacttattcatttccttaatcaaataaattaagtcttcattggtttctaaagttccatccatatcaaagacaccacttcctatttcccagtcgatgtcataaccatcccaatcattagctaccaacgagtcgcagagagctttcgcaaactttgccaatgcttgtttgtggctttctgatccacgtttgccattgtaaccccaaaacttccaacgagcttgtttctttgcctcattcagtcgttcctcgtctttgttccagccttcttgttctgcttttttctctacttcgtggtacacgtaatcaggagttctaccctttccgatataagaaagcagggtaacctccagcagtttggttcctttcactttttgcacaaactctttgtcagccttctgtgcaggtgtgatttgaaatctgttaggggcaccactccacatagacacaatgtccatactgtcgggcattgaactaaggtagcctctacggtaagtgcctgctggtgaccagttagaataccaaccaaatgctacagggcgaccataattattagccgttttcttataagctcttaaatcagcataatattgttcgctctttgcgttgttcatggtgttataaccacccacatggtcaaactcttttgcttcgggttctaccatatcactacaggaggtcatgaacattcctatcgcaagagcgagaaatagttgatgatatttaaaacgtttcattatttttcgattttaagtatattatttattcttattatcccaccacaggcgaataccagccttatcctgtccgccacgcagcatctgacgagctttgtctaagttctgcttgtcttcatcagatgtagccctattggctgggtaacgcattctgcgaataccgatattggtatctacctcaccgttgctgtaattcgccattaccttgtgcagctttggatagcccgtacggcgatattcactccaagcttcttgtccattaggatacaatgcaatccatttttgaatcatgattttctctaacttctcttcggtactgccaccccattttacggtagcatttgtaacagaaggctcagaaacactcacgttaggacgccacatgttcagactatactccatcggtgtgcggccagagttcatatagttgtctacctcattggcaggaatgccattctcctcgaacgacatggcaatacccttgcgatacaagtcttcagcagaaccgttgacagaaatgccatgtaacgctgcttctgccaaaaggaaatacacttcagaagcgcgcatccaataagtggcggttgtcttggttacattaggtcttgatgccattttaaatacttcgttctgcgaagctatattaccagttggcactgccatgtatgaaccgtattgtcccaccttcttagcgaaataagcttcagactctgtaaagtatttaggaagtcggggatcttcgtatccacctaaataagcctgcatcgatgaacccatgcgacactcattgtattggttcgataaaatctcaatgttgttgataaaggtaagtcctgcacccttttccatttttgcttcatcgtccttagactgcatcacaccgtaaggattgttcaccgcttgcagtacatacttctttgacatcgcctcatcggcataatatacacgcatcgccaagcgaagcattaaggagttggcataaactatccatttcttcacattgcctccatatacggcatcggcattgggcaacaatttggtagtaccatgctcgagagcatttgtcagcacgccaatggcattcgtcaaatcttcaaacatacatttgtacacgtctgcctgactgtcataaggtacactaataagtccctttcctgcctctttgtaaggaattggaccgaacatatcggtagccttatgccaagtagatactttgagaatttgtgccaaagcatacgcctctgggaaatctttctcggtctttatcttaatgtcttgccacaacggtatcactttggtgtaagccgaggtgtacgatgccgatacccaaccgtccatcaagaaataggttaagttgttacgaccgctgttccagttgttgttttgggcaaagtaaccactccaacaatcggcagccaaatgataagctacttgatattcgttggcaacatttgttccgtcgtcttgtgtaccaacaggtactacgcacttttgcaaagctgttataggaccaccgacagagataccgtccattttaccttcttcgggaagcatctcgaactcgttggtattgattttctcaaagtcgcacgacgcaaacaatgacaaagccaataaacctatcatatattgtttatatcttagaaatttcatagttgattagaatttaaattttacactaaatccataactcttcagactgggctgcatgaagtaatcgtttccttgtccataagttcctgtagaaggagtcacctctggatcgaaaggtgccttgcaataaatcatccaaggattgttagccacaaacgagagtgttaaatctttcaccacattattgaaccaacgagaattaaacttgtaactgaaagttaactcttgcaatctaacattggttgcactataggtatagtagccagccaaggctgtttcgcctgtacctatcaagttataatagtttttggcatcgaacactccctgttcaggtatcagcacaccaccagcatcacgagcatcggcagaggcttgcgacactccaaacttatcgagcaatgcttgtgtagaagaagtaacgacaccacccacacgtgcattgatcaagaagcttagtccaaagcctttataagagaatgagttgttccaacccatcgtaaaatctggtgtggtcttaccgaggtacacgggatctacattctctacgttaaagccaccagaagaggtaacattgataaatccttgattatctttagccaagaacttatttgcatagatatcgttgatagaacctccaacctttaagataacacgaccattgtctttggaaacttgaggaatgttaataggtttgggactcatggggtgagtataatccttcaccatctcaataatttcgttgttgttgtgcgaataggtaagcgaagagttccaacccaactcgccaaagttgtcgtgataacccaaagtcatctccacaccgcggttctccacatttcctgcttgtagatatacggctttataaccagagctttcgggcaattcaccgataaacgtttggttgtaggtgttcgacttgtaccatgtgaagtcgaaggatagctttttgaataagcgtgccgtcaaaccaagctcatacgactttgtacgctctgccttataatcggtaaacggataaatgtcggttgatttcaaactaccgcccaaaataggcgttgtgatggttcccggtgtcatacccgaacgtgatacaggcgaacctacttcggtgaacgaacctcttactttgaggtaagaaatggcttttggtaattttaccatttcagaaatgatgcctgacaaaccaactgaaggatagaagaacgactcttcggaagaattaaccaagcgcgaattccagtcgtttctgcctgtcaaggtaaggtagagcatgctcttgtagcctaattcggcactggcaaaggctgccacattgcgcactttgctatcgccaccagtctcacgaattttactatcggtaggatcgatattagtcaaagagaatttattgggtactaatgtcaggttaccaccatagcctctggtgagtgaaccataatcagaatagctgtaaccaatattggaagctaagctaaagtctccaaaacgtttgttgatactggcaataaagtcgacataggtttgatgatctttataattataataatcgtatgcgccctttgactttgcaaacacatcgtatgaagaagcataaatctttcgttcgctcgtcatgaaagttctgtcaaaacgtacacgacctgcaagatccaaccaatctaagacgtgataagtgagacctgcattaaacatatatcggtctttatcatcaggagctaaattacgataagctgtccaataggggttttgattggcaaatttaccatctaatatgggccaatactgcaatgggaagtttcgtgtattgtcgtaacgctcaaacgttttgatggcatcgaacgattcgccacgtgggaacagataagcagccacaataggattccaatactcaccttgagataccatattgttgtctttttgcttgatgtacgatgcacctaagtctaattgaaccttaccaccaaagagttttgaagaattgcgaacagtaaagttcaatcggtcgtacgtattgtttggcacaatgccctttgaattagtggaagctaccgatgcaaaggtttgattatactcattacctgtgtttagggtcaatgagttgataaagttagttcctgtacggaagaagtcttttgcagggtcgtacgaactgggcgttgcaagcttttcaccccaactctcataagagcctgctttgttaccataagtgttttggaacttaggcatgagcaagggagagctgaaatcggctgctgacgagaaggatatttccattttcccctctttaccctttttagtggtaatgagaatagctccattcgctgcattacttccatacaaggcagcggcagaaggacctgccaaaacgttgatgctctcaatatcttcggggttaaagtctgcaatgccttcactgctgacacgtccctctcctaagacaccactatctgaacctccattgaagttgaacaaggggataccatctatgacatacaacacattattgctgccttcgatagattttgcaccacgcataatcacacgggtggcaccacccacgccactggcacttttggtaatgcttacgcctgccaccttaccactgagcgagttgacaaaattggcatccttgttacgagtcagttcttcactttttacctgttgcacattgtagctcaaagccttctcttcgcgcttgataccaagagccgttactaccacttcacccagttgtttagaactttcgcttaagacggtagtagaggtgacatcagaagccttgaattcgcgagtagcaaatccaacatacgagaattcgagtatgtcgttgctacgaacattgaggctatagtttccatcaatatcggttgcagttgcagtcttgctgccctttactttcaccgttacacctgggagcgattcgccattctcatcagtcacctgtccttttacacgaatcgttgcgccactttgaagggtattttgtgtctgaggcttgttcttttgactgattaaaatgtgtcggtcggtgatggtatattcaatgttggtgcccataaaaagctctctcaataagtcggatagcttcatttgggtagcacttactttcaccacctttttaagattcatcacattctgtccgtaatcaacagacttatttgtttgtttttctatggcagtaatcatggtcttgagagttgcctcacgcttctgcaacttgatgacttgattttgagaaaaacctgccaatgaaatcaacaacaatgcacttacaagaaacagcttattccatggcatcattgttagaagtgtttttttagtcttaggtttcatacctttgtttagataaaatagatttagttgttagaatttatttcttatttgtctacaggaaattagtacgcttagctgctaaacaagcatcaacattgagcataattacctgattgcgttttacttgtgaatatctgctgggcgacctcctttcttggtatagattgtgataatgttattttgttttgtaaaatgtaaatggtcagaaattttgcaaagcacgtgcatgacatcgtctatggtctcatcttcacggaatgccatggtatatttttggttcaaatcaacatctgatgcgatattcaatcgtatattgtatcgtcgttgcaaatcggctataattgttttaagaggagcttggtcaaagtaaagtctaccgtgcatccactgactataatcgtaattttctactcgctgctttctcatcataccattgacacggttatacaccacctgctcatcgggcagaatggtcatggcttgtttgttttcatacacgagtaccttaccctgagctaaggttgtggttatattttcttctgcaggataagctttaatattaaactgtgtacccaacaccttaactttcaaattaccgatatgtacgataaatggctgctttgattgatgagtgaccttaaaaaatgcctcgccatctaaatacacctctcggctatgtgcaaaggtactaaattgttgaggataggataaagtagatccagaattgagcttaacctgtgtaccatcggacaaagtgagcgtaccaatacgcccttgggaaacataaaaatcggttaaagtcatgttctttgtgttctgataggaagtgacccaccaaacaccaaggctcaacaaaataggtaaagtaaaaattgcagcatattttaatagatttcttaatcgattggttgccactggatgcacggttgatactgaccgttgccgattaaatctatcaaaagattgattcaaagagcggctatccatcctactggaggtttcactccatatttgtttcatcgcttcctccttagcttcactatccttggagtcagacagccaacttataatacgatgatgataacgggctgggatgagtccgtcaacaaaaaatctcatgattttgtaggctgtttgttgattcatagttagatgcttttctataagacaacagcaaagggcatcacacgtagttaataaatattaaaagatcaattgcgcgctacatccgcactctataaggcaaggtagttttacacggtttcttcgccatatgttatttttacgacgaaaagcgtcctcaaaaacagcaaaaataaaatgagtggtgtacaacatggaaggacaataaatgctgaattttctttacaaagtgcctctcaaaactcgcgtgaaaacatccaacaacaaagttggtctcaaatacgcgaaatttgagcgactttcgtaaccctttgttatttaacacgctactctttatacgcttcctttctatcctaattttaccactttttggcagctaacccattgagataagcctcctatttgcatgctttaatgctcttgaagcatgtgaatagcacctctaatacatgttcccaagaccgttaaatcaatgttctgactataaaagccgtctattttgttaaaatcagcccatttttgcaggtcgtttacctattatttttttctatttcgcaaattttcaatggtcgttttttggtaaaataacaggacaaaaacaacggttgcctttgtcaatgctctcttgggcattctaaaattgatttatagacacagttatgctttctgcctctcaaatcatttcaggctcatatcatttgttgagggcttcatttttggatgctatcaatattagaccttccttcaaagatagaggactttgtgccgcaatcgtggaacatgcagcatagcgtgcaaaggggcaatagtagtgttttcattgccttattgctttatagaagtaatactatagcaattacataattcttcaaattaatataatctacattttttgctaccacattatatccaacaaattcataatcgtttgcatttcaattaatccgagttcaggataagaaagaattgttgaaggtttatgatattgttgtcactcatgtgttcttctacttacgtccgcttgtggacggagtcaaggagcaaggctttcttcttgtcatacgtttaaggattatggcgagcacatacatcgcaaaattacttttcgacagttgtcaaagcatatcgaaaagaaagttaatagtcatactatcaaagaactctttggttggaagcggaaagctacgtagcctttatctcaaattttaattctatcgtataatattactcatcaattatttctataaagtcagcatattctccttcaagttctttaatttcatgtgatatttgatcattacgaagagtaatttgattaatctcgtctattgaagcatttatttcattccgtttatcaatataattctgaagcacttctccaagataatgctcaaattgccttttgatattatctatttctgtctgataatttgtaataaattgacttttcgcaccttttatttcagccaatctgcgatcttcagctctggcatctctcatctgcatccagatatcaaagcctgtagtaacaacaggaataccaaatttagcaaacttcgcaatattacttgaccatcttactgcttgccatggcttaaaattatgaccaaaaaactttcctacagaataaacacctttatgtaaagccgatccagacgcactgcttattccgcttccaatttctttaacgccaggtgctaacttagtaacccattcgcctccattcttcaacaattccatggtcttttgctgaaaagctatacctttcttctcttcaatacttaaatttggtgactgagattttatctctaattgattattataagcaacaacagcatccttcttgctaaattcctcaacctcatttaaaagagcttcgtaattaagattaatcttagcctctatttcattagatgttgtattgattaagtttgttaactcattatctaacaaacgttgctgtgcttcccattcagcttgaggaatgtgaccaatactatgagataatttaattacctgtcccatggcattattaacaaacgagcacaattctccttgaacatcacgtttagtatccctttggctgttgttcagtttttcacagaattgcctataaaaagtacccatagctgggtctatattagtagcttctatttctttggtatatacctgaagattccttactggtgtatcaaaacgtttttttattactcccttatcctgtacaaacaagtttaacatgtcaataaactgttcaaaatggcttaactgaacaaattcgtcatcatgctcctcttctcctgtaatataatcatttgcgtcaatgaatgctatagggaattgagaaagattataaccacgctcttcaaaagttcttcttaaagaattctgataggtatccacaaggagatcatagtcacctgcttccattcccattttattaacaacaataaacatcttattcgcaaaatgttgattaaatgcaagatcaataaaattattaaagaccacgtcatcaaataattgacttgtcagaacatagaatatcaagtcacattggcttaacgcttcctttgttctttcatcatgggcttcgaccttacctgcaagaattcctggcgtatccattaatataatattattccacctatattctgatacagaatctgttgcaacattagcatcaatttttatatctttattgcccgttaaagctgaaataatagtggatttgccagcactatactgacctacaaaagcaagtctaagatctgtgcgttcactatccctatctaattcgtcctttaagcgttttgctaaatcctcattgccagttttttgaagaagattactcgtcttctctacaagagtgtctaatcgttgctgatattcagcaaactttactttcttatccataattatttgatattaaaaattatcttcatttgtgtagcctcttcagctttaatcttatcggcatcattgcatttcgtttcatattcaaaagttaaagattgttgtgtccaatcacgtttaaccggatattgtgaataaagctcatcattagaaaggtcagacactttcttaacagatatgactcctttttttagataatctaaaactctaaatccaattaaagaatttattgcgctttcatcgtttttacattgatttatgactggtgccatctcctctaaaagactttcaacaccttttatataagtcgtaaaaaggttttcaacagatgctgacgttttattaatagacgtaaatatttcagataacatttttttctggtttttcctcatattgctacttattccttctgttaaggaatttctcatcttttcttgagctttcctaatcttttctgattttgaagtaaacattcctgctattatggagactacagtaaagaccactaatggagctgccataaggacccatcccgctggattagatatgaacaagggaacaataaaaggagttgcacttcctaataaagttccaaataatcctatgcgtaatttcgtatctttaattctttctccagtagccactacattattattaatattacattctatattaagatcctcagataattcttcgatttttgctttcgactttgcagaaaagtcttcaagacgtatttgtaatcgttctctcatttcatcctgaattctgattacttgagaatctttaccaaaatgctcaccagcttctttgtcatcatagtgggaatcagcgaaatcagaagcatagttacataaggacgattttgtatcttcgaaaagcttttttatatcagacttcaatttttttgactctttattaatgaattgcctaaaatctttctgagtttttttcagcatgcttactttgtctgtcaatacttgatagtcaccattaagaatatttgaaatagagtgtatttggtatgatgctccatccatcacactcaagctcttttttaacgttcctgtattgtatacatcactctttatttctcttacccattcttttatattagaaccttcaagtaattggtctgcattatctcgattttccataccaagttgtgctgctaataaatgaattgggattatcttaaccgcatccatgttatacttaccttccaatctgtcatgaatgcgatcaaaatgtccttgtatggattcacgcccattaccagtacgccattgacttggatcttgtaagaatcttctcagcctaatctctgatgtgagattactctttacattcaatattatatataagggcttatttctctctttaattgtttcaaagaaatcaaattcagtctcttgaatagcatcacttgtaactacataacaaataacgtcagcttcatctatgatagattttgcaatttctgtatctacctctcctccaggtgcgcctatacccggagtatcaacaattcgtaacttatcccaataccaactacgattatatcgagttgttcttgttttaccaatacctatatcatcatcagcttgctgtgttataaccttatgaaaagtacttttacctgctttggtccttcccataaaggcaatggtaaagtattcaatatttttctttttcttttctatcacatctatattatgagatattgctgtcataatcgcattatccaaatgtaaagcaataccttcaacaatattttgacattctcgaatgtatttattcttctcgttacttgctgttttaatttgtaggtgtatgctttcttgagtatttgaaaattttttattcaaatcatcaagaatgtttgaaacgcgttcaaggtctatctcggcttcagctgtaattttttcaataacatttgcgaagttccaacttccaaacaagctgtcgatagttttggtatttcctttgttagcaatatgatcataataaaccttctccaatttcccaataattctttggtgtctcttcaaacgtgttgccttagctctttcttcatattcttgtgccgcctctgttatataagcttctggagaaattttaagaatgtcagagattttatttatcaaatctcgttcttcaggtgaaatatatccatctacaaaagacatcctaacaaaaaaacgtaaaatatccttccgtttctcacttgaacaattatacccacttaatgatagcaagagattagctaaagaggttttttcttctgcgtcagaaaaaatttcatgctgctttcgaattaaacacttatttttatcgccttgtaggtagaaatccaaggcttctatctcttttgtattaatttctttgtcagctgttattaaataacagccaattaaatatactatttcatctaatccattcatcataatatataagattttaacaacgcgtcgtcaatttcaatacaatgttctgaaaatgatagagttaactaaatttacgtatctaatataaattggtaaggtgtcttgattgccagtaagttacagcgaataaaacttaatgtaaataatatcagagcctatcaccaatatatggaaatctgcaaagatgtcattaaaagttcatccgcaaagttagacaaaactttcgaaaaactactcttggaaatacttttattgtatatggtaatacaagacaaaattagactggtgcttgagaaaggaaaaaatatgtttttacaatcagccagcatttttaatagaaaaagccttgtctggtttagagatagtgaaagaggataaaacatacgagcagtcgcctaatttgcgcaagtgcttgagaaatatgcgtttctacagttcgcttactgatattcaacctgtgcccaatttcttcattactcataccgtccaacctactcattgtaaagattctgcgctgctgattgggcatttggcttatcacacgattgataagttcgtctaattcttcactatagataatgtcttctacatcagtatcggctacaacatctgcatcggttaatgattgaagcttatgccgtacactggaggattttaaggcattaagagtgcagttacgtgccatagaataaagatatgcttcaaaatttgtcatgatttggatattgtttcgtttcatccataatttaagaaaaatatcctgcgcaatatcttcagcttcactctccacgccgacaaacccatatacaaagtttttgactttaggatagtaaagcttaaatataacatcgaatgaataatcattttcagtatgatgagacgttcgactaaaagagtgcttacgattagacatttttatgaaaacaaaggttttacatgacaaatatactacaaaataatgacacgcaaataagaattttcattattaaggagtagaagctgaaatatactttctacacgttgcaatttcagacgagagaataataaaaacgctctcaaccaaattggatgagagcgttaatattgaaagagatacggaaaacttactcagctgctttttcttcttgtgctttttcctctgaaacttcctttggtgcttcttcagcagatactgcttcagtagcgtcaactgtttcaacagaattttcaacctttgcagtttcatctttcttaccagaagaacgacgactacgacgagttctcttagcagtcttttctgtttttgccatattttcatcaaagtctactaactcaataaatgctatttgagcagcatcgccttgacgagtacctaattttataacacgagtataaccacctgggcggtcacctactttaggagcaacggttttgtaaagttccgaaacagcaactttgtcttgcaaataacggaatacaacacggcgcgaattagtagtatcgtccttagagcgtgtaatcagtggctctacatatttcttcaaagctttggctttggcgagggtcgtagtgattcttttgtgcataatcagcgagcaagccatgtttgcaagcatagcgttgcggtgagatgcagtacgacctaagtggttgaattttttattgtgtctcattttttgttttgttcatttgtggagttggaatcgtttgttttttcagcattgcaagtttttagaatgataatcttaacttatccattaagaagaaagaattctaaacttaaaaacttatcaactaaatactctccttattccttatccagtttgtattttgaaatatcggttccaaatgatagattcagactctcgagcaaatcatcaagctctgaaagcgatttcttaccaaagttgcggaacttcaaaaggtctgtcttgttatattgcactaagtcaccaagtgtctcaacatcggctgccttcagacagttgagtgcacgaacacttaagttcatatccactaacttagtcttcagcaattgacgcatgtgcaacacttcctcatcaaactcttggttggtatcctgatcaggattctcaagtgtaatcttttcatcagagaacaacatgaagtgatagatgagaatttttgcagcctctttcagcgcatccttaggtgatatggaaccatccgtagtgacttcaatcaccagtttgtcgtagtcggttttctgttctacacgatacggttcaactgagtatttaacattacggattggggtgtagatcgaatcgattgggagtacattaacatctgtgcagaattgacgattctcatcagcagggacgtatccacgtccttgattaatggtcaaatcaatttgcattgaagctttggcatctaaatgacaaatcaccaaatcagggtttaacacttcaaatccagtcagatacttaccaatatcaccagctttgaattctgtagaattctctacggtgatactaactttctcattctcgaattcttctactacttgcttgaatcgcacttgcttgagattcaagataatgttggttacatcttcctttacaccaggcaccgaagaaaattcatgctcaactcctgcaattcgcatggtgttgatagcataaccttcgagtgatgaaaggagaatgcggcgcaatgaattaccaatggtaataccaaagccaggctctaatggtcggaattcgaacttaccgaacttatcatcagcctccagcattactactttttcaggtttttgaaatgctaatatcgccattaatttaatgatttatttagagtacaactcaacgattaactgctccttaatgttctctggaatgtcagctcgctcgggctgatgtaaaaacttaccgctctttgagctctcatcccattctatccaaggatatttactgtggttaaaacctgccaaagattcctcaataacttcgagagactttgctttctcgcgaacacctacaatctgaccaggtttaactgcataagaaggaatattgacaacctttccatctaccacaatgtgcttatgacctaccatctgacgggcagctgcacgagtcggtgcgattcccaagcggaaaacgatattgtcaagacgactctctaagttctgcagcagtacctcaccggtaatgccatcagctttagctgccttctcaaacatattacggaactggcgttcgagtacaccataagtgtactttgccttttgcttctctgccaacatggctccgtactcagacatttttctgcgacggttgttgccatgctgtccaggagggaagtttctcttggacaaaactttgtcagcgccaaaaatgggttcaccaaatcggcgtgcaatcttagatttcggacctatgtatcttgccataatatataataaaataatgaatatactggagaattaatcatcacatcaattctccagtgaataaatttatactttacgtctcttaggaggacgacaaccattgtgtggtaatggagttacatcaataatttcggttacctcaattcctgcaccatgaacggcacggattgctgattcacgaccattgcctggaccctttacgtaagctttaaccttgcgcaatcctaaatcataagcaatttttgcacaatcttcacccgccatttgagcagcataaggagtgttcttcttagaacctcggaagcccatcttacctgcagaagaccatgagataatttgtccctcgctgtttgcaagagaaacgataatattattgaatgagctatggatatgtaattgaccgatagcatcaactcgcacatttcttttcttagaagctgttgttttctttgccataatttcttttagtttaaaagttagaagttttaaagatcagaaccttaaagattccgacgttcaactaacaactaaatgttacttagtagccttcttcttattagcaacagtcttcttcttacccttacgtgtacgagcattatttttagtgctctgaccgcgaacaggaagaccattacgatgtctaactccacgatagcaaccaatatccatcagtcgcttgatattcatttggacctctgaacggagatcaccttctactttgaattcagcgccgataatttcacggatacttgcagcttggtcgtcagtccactcgctaaccttcaaatcacggtcgacgcctgccttatccaatatctttgctgaactacttcgaccaataccatagatataggtcaatgcgatttcgccacgcttattttggggcaaatctactccaacaattcttattgccatttgttgataattaattaaataattgttttaaattgggcggtagttgttcaattcacatcgaacaagaaatccaccatttcttgatttagccctgacgtaatttaaacttagggttctttttgttgataacgaacaagcgacctttacgacgtactatcttacagtcgggtgtgcgtttctttagtgatgctcttgtcttcatatctttacttgattatttgtatctgaaaacgattctaccttttgtcaagtcgtaaggactcatttcgacctttactttatcaccagggagaatcttgatatagtgcattctcatctttccagagatgtgcgcaattatctctacaccgttttcaagttctacacggaacattgcatttgataaactttctacaattgttccgtcttgctcaatagcggattgttttgccataataattattttctttctaaaagttaattcctaatcttaattgaatgtttcattgccaatcttctactactatagacgagcatgatattttttccttatgcactaactatctttgactcacttgatttgaaccaaatagacaagtacatttcaaccttgcccatccccttgagaacactttgccataaaacatcaatcagagataagaattctttcagtgttgatgattagtaggcagacacattaccgccccgagtatgaccagagttcagtaatccatcataatggcgcatgagcaagtggctctcaatctgttgcaaagtatcaatcacaacaccaactaaaatgagcaaggatgtacctccgaagaactgtgcaaatccttgttgaacatttagaagatgagccaaagctggcataatggcgatgaatgcaatgaacaacgagccaggaagagtaagacgagacatgattccatcaatatagtctgctgtttccttccctggacgaatcccaggaatgaacccattgttacgtttcatatcctcagccatctgtgtcggattcagtgtaatagctgtatagaagtaagtaaatgctataatcagtattacatagattgtgttatacaacaaactatgagtgtccatcagagaacgcaagataggagatgcattatcagattgatactggacaattgccaacggaataaacatcaatgcctgtgcaaaaatgataggcattacgtttgctgcaaacaacttcaatggaatgtactgacgcgcacctccatattgtttgttgccgacaagtcgtttggcatattgtacaggaaccttacgagttccctgtaccaataagattgctgcacatacaactgcaaagagaatcaatatttcaacgataaacatgaccagtccaccaccgctaattgcctgcaagcgagaacccaattcctgtgcaaacgcttgtgggagacgagcgataataccaatcataataatcaatgaaacaccatttcctattcccttatcggttatgcgttctcccaaccaaaggatgaacatacttcctgctgcaaggataatggtagctggaatcatgaacacagtccatgagatgcctgttgccaaggcctgtgatgccatgtacttcaggttcataagataactcggtgcttgtaacagtaagataaatactgtcaaatagcgagtgtacatacttatttttttccgaccactctctccttctcgctgcatcttttgaaaataaggaacagcgacagcaagaagttgcataacgatagaagctgagatgtatggcataattcctaatgcgaagattgacgcattagaaaatgcaccaccagagaacatgtcaaggagcgacatcaagccgccttctgtctgcttttggagttgtcctaaggaagcaggattaatacccggaagtactacgaacgagccaaaacgataaatggccgtaaacagaagtgtaataaggagacgctgacgcaaatcctcaatcttccaacagttctttagtgtctcaataaactttttcattacttagattatagttgtgttaccacctactgccttgatagcttcttcagcagtcttagagaatgcgttagcttctacatcaattttagcttttaactcgccagtacctaaaatcttcaccagtttcttaccatttgtcagacctgctgcaacgagttctgcaataccaatctttgtcaggtttttatcttctgcaagcgcttgtaatgtaccaaggtttacagcaaaatattcctttctattgatattcttaaagcctcctttcggaacgcggcgttggagtggcatttgtccaccttcaaaaccgactttcttcttataaccagagcgagattttgcacccttgtgtccacgtgtagaggtaccacctaagccagagcctggaccgcgaccaatacgacgacgtgaatgcgtagaaccttctgctggtttcaaactatttaatttcatctttttgcttcttaaaagttatactattcaactactgtaacaagatgatgcactttacgaatcataccacgaatgcttggagtgtcatcaacttcaacaatttgagaaatcttgcgcaatcctaaacaagaaagtgttcgcttctgatctataggtgcaccaattttactcttaatttgttttactttaattgttgccattttatttctcctttatccgttaaataccttattcatatcgacaccacgtatgccagcaatggtataagcatcacgaatttggcttaatgccaagatggttgcttttactaagttgtgggggttagaagaacctttcgacttagctaatacatctgtaataccagcactgtccaatacggcacgcattgcacctccggcaaccaaacccgtaccagcagcagcaggtcttaagaacacctgagcaccactataacgagcttcaatctcgtgaggaatagtacctttcaaaactggaactttcaccaagtttttctttgcagcttcagtacctttagcaatggcagctgttacttctccagctttaccaagaccataacctatcacaccgttgccatcaccaactacgacaatagcagcaaaagtgaaggtgcgtcctcccttagttaccttcgtaacacggttgatagctaccaaacgatcttttaattctacgtcgctatttatttttactttattcattgccataatcgtttaaaaattaagaccacccttgcgagcagcgtcagccaattcttttacacgaccatggtaaagataaccattacggtcgaaaactacagtcgttacaccagctgactttgcattttctgcaatcagctctcctactttctgagcttgttctgacttgggtaacttctcaagtccaagcgaagatgcagaagcaatagttgtaccagttatatcattaattacctgagcgtagatttgcttattagagcgaaatacacttaagcgtggacgctcagctgttccgtttacattcttgcgaatacggaacttgatttttattcgtctttctactttctttgttgtcataatcgtaaaccattaaaattacttagctgcagctgtcttaccagactttctgcggataacctcgccttggaagagaattccttttcctttataaggctcaggcatacggaaagaacgaatttttgcacaaatgagtcccaacaattgcttgtcgcaagactctaacgtaataagtgggttttggtttctttctgatttagtctcaaccttcacttccttaggaagctgaataaagattgggtgggtataacccaaagagaactctacaagattcccttgattagaaacacgaaaaccgacaccaatcagctccaatgtcttggtatagccttcgctcacgcccactaccatattattcactaaagaacggtataaaccatggtaagcctgcttttgcttgtaatctacaggactcttctcatctacttcaaaagacaaagtatcattatcttgtatcaccttaatagaaggatcaatcttttgggtgagctcacctttagggcctttcaccttaatgatatttgttttctcatcaaaattaacagtcactcctgatggaatgctaattggcaattttcctattcttgacatattcgaacctccaattaatatacgaaacaaagaacctcaccgccaattttctgggcagtagcctctttatctgtcattacaccttgtgacgtagataatattgcaatacctagtccgttaattactctcggcatgtccttatacccggtgtactgacgcaaacctggtgttgacactcgcttcaaatgcttgatagcgctttgctttgtcgtaggatcgtacttcaaagccactttaattgtaccctggggaccatcttcgatgaacttatagttcaaaatgtatcccttctcaaaaaggatcttagtgatctcttttttcaaattagacgcaggtatgttcaccacacggtgatgagccataattgcattcctgagtcttgtcagataatctgctattggatctgtcattttataaatgtttaattaatcgggactaccccgacaatattaaattagcttcttttttgtattgtgtaattgtaactcatcacgtaagacaattaccaacttgcttttttcactcctgggatcaagccttccgaagccatctctctaaactgaatacgtgagagtccgaactgacgcatatatccttttggacgacccgtaaccttgcaacgattgtgcaaacgaatagggttagcgttcttaggaatagactgcaatttacgtgcagcctcgtaagcttcagctggatcatctgtcttcgcaatgatatccttcagtgcggcacgcttttcagcatagcgagctactaacttggcacgctttacttcacgagctttcattgattcttttgccatatctattaatcgtttttagcgttcttaaaaggtagaccgaagcctttgagcaatgcgtaaccttcttcatctgtcttggcagacgtaacgaaagtgatattcattccctgaatacgatcaatagaatcgatgttaatttctgggaagataatttgctcttcaatacctaaggtgtagttgccacgaccatcaaacttgctcgcaatacctttgaaatctcggatacgaggtaaagcaacacgtactaatttctctaaaaattcgtacatacgctctctgcgaagtgttaccatgactccaataggcatctttttacgaagtttgaagtttgcaacgtctttcttagaataagtagcaacggccttctgaccagtgattgttgatatctcattcacagctacatctataatcttcttatcctctgtagcatctcctaatccttgattgataacaatcttcttgagaacagggatttccatggatgaagaatagttgaactgttcttttaatgctggagcaattttctccttatatgcttttttaaactgtgctgtatccattatttgatttcctcccctgactttttagcaatacgtaccacgttctttccatcacgtctaacggaaactctagtagccttaccactctttgggtctattaagctcaaattagagatatgtataggagcctcttgcttcacgatgcccccttgtgggtttttcgcagaaggcttggcactctttgtaacaatattgacaccttctactatagcacgttcgtcagcgaccaatactttgagcaccttacctgttttgcccttatcctgtccggtaagaacaataacggtatcatctttcttaatatgtaacttactcattgattaatcttttaaaatattaaagtacctctggtgccaaagaaacgactttcatgttcaccgaacgaagctcacgagcaacagggccgaagatacggctacctctaatttcacccgcattgttcagcaatacacatgcattgtcatcgaaacgaatgtatgacccatctgcacgacgaatctctttcttggtacgaacgactaaagccttagatactgcaccttttttcaaatcacttgatggaataacgtttttgactgaaacgacaataacgtctcccacacttgcataacggcgaccagtacctcctaggacacggatgcaaagagcttcacgtgcgccgctgttatcacatactgtaagttttgattctgcctgtatcataattacttagctttttctacaatttgaactaatctccatcgctttgtacgagacaaaggacgagtctccataatgagtactgtatcacctacattagcctcattcttctcatcatgtacatggtatttttttgttttttgaacaaacttaccatatattgggtgtttctctttaaatttagaagcaataacaatggtcttatccatgttgttactcaaaacgacaccctgtcttacttttcttaaatttcttgtttccatctgaaccattgttatttattaagttctcgctgatgaagttctgttttcaaacgagcgatatcacgacgagcaatcttaatctgcgaagggttctccaatggagacactgaatggtttaatttaagctggttgtatgcttctactgcaatctccaacttctcgcgcaagtctttgtctgcgagtgctttcaattctgtcatcttcatagcttaagcgtttttatcgtaatcacgtcgtataacaaacttggtcttcacaggtagtttctgtgcagcaaggcgcaaagcctcttttgcaacatctaaactcactccttcaacctcgaaaaggatacgaccgggtgtaaccggcgcaacccaacccataggatcacctttacctttacccatgcggacatcggcaggcttacgagtaattggcttatctgggaaaattctaatccagacttgaccttcacgttgcatgtatcgattcacagcaacacgtgcagcttcaatctgtcggctatcaatccatttgggctcaagagtcttgataccaaacgaaccgaaaaccaattgtgtacctctatgagcgtttcctttatttccacgcccatcttgaggtcttctatattttactctttttggctgtaacatgatagcttctacttttaacggttattgtttcttctacgattaccacgaccgtttctaccagagtttgaacgagaattattcgccttttcttgtgagaaattcggggttagttcttgtttaccataaatttcgccacgacaaatccaaactttgattccaagcagacctactttagtaagtgcttctgtctgacagtaatcaatgtcggcacggaatgtatgtaaaggagtacgtccttctttatacatctccttgcgagccatttcggcaccatttaaacgaccagtaatctgaattttgataccctctgctccagcacgcatcgtattctgaatggccatcttaatagcacgacggtaagcgatcttaccctctacttggcgagcgatgttattacccacgatgattgcatcaagctcaggtttcttaacttcaaatatattgatttgaatgtctttatgaaagaggtttttcaactcttctttcaacttgtctacatcttgacctcctttaccaatgacgataccaggtcttgctgtacaaatagtaatggtaacgagcttcaaggtacgttcgatgataatacgcgaaaggcttgctttagccaaacgctcattcagatacttacgaatctttctatcctctacgaggttgtcaccgaagtccttaccaccgaaccaatttgaatcccaaccacggataattccaagtcgattgcttattggattaactttctgtcccattctattaattatttttcgtcattagttttggcatcaacaaacaatgtaacatggttactacgcttacgtattctgtatccacgaccctgtggtgccggtctcatacgcttcatcgtaacgccttcatcaacgaagacacggctgatatacaactcgccatcttcagctttacgatcattctttgcctcccagttagcaacagctgaacggagtaatttttcaacatcctgcgctgcttgctttttggagaatcgcaatactccaagggcacgatttacttccaaaccacgaatcatgtctaccacatagcgcatttttcgaggggaagaaggaacgcctttaagctttgcgaagtatagatttttgcgggcttcttttaacttttcagccgctatatgctttcttgctcccattattaattaaactttttaaatggtttgtcccttttactttctgttaccagcatggccaccgaaacgtcgggtcggagaaaactcaccgaacttatgtcctaccatgttctctgtaacgtaaacagggataaatttatttccgttatgaactgcaacagtgtgtcccacgaattctggggatatcattgatgctctggcccatgtctttacaacgctcttcttgccactctcgttcatagcgagaattttcttttctaaagcgacgttgatataaggacctttcttaagtgaacgactcataatttactctttgtttacttgttatttacttgctctttcaatgatgtacttgttagagtgcttctttggtgcacgagtcttcagaccctttgcatacaagcccttacgtgaacgtgggtgaccaccgctttggcgaccttcaccaccacccattgggtgatccacagggttcataacaacaccacggttatgtggacgacgacccaaccagcgtgaacgaccagcctttcctgattgttccaatgcatggtcagagttaccgacactacctaccgttgctttacaagtactcaaaatctgacgtgtttcgccagaagggagcttaatcacacaataactgccctcacgagaagtcaactgagcaaaattaccagccgaacgaactaacaaagcaccctgtccaggacgcaattcaatgttatgaattaccgtaccaacaggaatctttgccagtggaagtgcatttcctacttcgggagcagcatctgcacccgacattaatgttgcacccacttgcagtccattaggagcaataatgtaacgtttttcaccatcagcataatacaacaatgcgatacgagccgaacggttcggatcgtattcgattgtcttcactacagctggaacaccatctttctcgcgcttgaagtcgataaagcgatattttcttctgtgaccgccaccaatatagcgaacggtcatcttaccagtgttatttctaccacctgaagaacgcttaccgaaaacgagagacttctctggcacggatgcagtaatatcctcgaacgtgccaataatcttgtgtctttgtcccggagttaccggttttaatttacgtactgccattttttatttaaatattgctgtaaaaatctatcgtatcgccctctttcaaagtgacgatagcctttttgaacgcaggcttctgaccttttaccagaccagcacgagtatagcggcttgagcgcttacccgcataacgagccgtgttcacatctattactgtaacattgtacaggccttcaatctctttcttaatttggagcttacttgcatctggacgaacaataaatccatatttgatttccgcaactttcttacggtcttcgccctttactcggtaagttttttcaatagaagacttgtctgtaatcttagtcatcttctcagtgaccaaaggtttaatgataaatgccatattctattgtctcctttattttattaagatttcatcgatcgccttcagcgagttttctgtcataattaaaacatctgcattcaaaactttgtaagtattgagtgtagacgctgtcatcacttcagcctgctgcaagttacgagccgacaaatatacatttttatttacttctggcaaaaccaaaagtgtctttctaccatcaactttaagatttttagcaatatttacaaaatctttagtctttggtgcatctaaattaaagtcttcaacaactacaatcgaattttcttgtgccttataagaaagcgcagatttacgagcaagctgttttacttttttattcagtttgaaaccgtagtcacgtggtttaggaccaaaaacgcgagcgccaccaacaagtactggcgaattgatgtcaccacggcgagcgccaccgccacctttttgtcgtcctaatttacgtgtagaaccacttaattcacttctctctttggtcttggctgttccttgacgttggttggcaagatactgctttacatcaagatatagcacatgatcgttaggttctattccgaagattgattcgttcaacgtaacctttcttccggtctcctgaccattgatatttaatacgctaacttccattatttctcaattaaaacagttgaaccattgaatccagcgaaagaacctttcacaatcagtaagttctgttctgggattacttttaatactctcaggttctgggtagttactctgtcaccacccatctggccacccatgcgcattcccttgaacactttagcagggtatgaacatgcaccaatagctcccggcttacgagcgcggtcatcttgtccgtgtgtggactgtcctacaccaccgaatccatgacgtttaacaacgccttggaagcctttacctttagagactcctactacatcaacaaagtcagcattgctgaacagatcaactgtaatagtatcaccgaggttatactcctcttcaaatttgaactcggccaagtgcttctttggtgttgtgccggctttcttgaaggttcccatcagaggcttagaagttctcttctcttttgcctctccaaaacctaattgaacagccttgtaaccatctttctctacagtctttaactgggttacaacacaaggaccagcttcgataacagtgcacggtatatttttaccgtcggcactgaaaacggatgtcattccgatttttcttcctattaatcctggcatttcaataaatattaataattagtttgttagtttacgagtttacaagtttacgagttttagagttttagagtcaatgagtggattactcaatcaatttcctcacatttcatctcaacgtattacaatcaacgtttaagttctatcacttccttactcagaaaactcattaattatactttaatttcaacctcaacaccactgggcaagtcaagtttcatcagtgcatcaactgtttttgctgttgaactatagatatctatcaaacgtttgtaattcgacaactgaaactgctcacgagcttttttgttaacgaaagtgcttcgatttactgtgtaaattcttttatgtgtgggcaatggaataggaccgctaacaatagcacctgtggcctttactgccttcacaattttctctgctgatttgtcaaccaactggtggtcgtaagacttcagcttaattctaattttttgactcatgtttgttataattgaatgaatatattgaagaacgaaggcacgctttaagagtcatacgctaaagcgtgctctccattctctttagcttaatttacaatagattcgcattaccttttacctcttccaacacttctttagcgatagaagttgaaactggtgcatggtgatcgtattccatagagctggttgcacgacctgaagtaatggtacgcaatgcggtaacataaccaaacatctctgccaatggcaccatagccttcacaattcgcgcgccactacgtgcttcgtccataccctgaaccaaaccacgacgcttattcaagtctccaatcacatcacccatgttttcctctggagtaacgacttctactttcatgataggctccatcagcacgggtgctgccttaggacatgcgttcttaaatgcgttgtgtgcagcaagttcgaacgacaactggtcagaatccacagggtggaacgagccatccgttaaagtcaccttcaaaccagttacagggaaaccaccgagaacaccactcttcaagcagtcttggaaacctttttgtactgaaggaataaattccttgggcacgttaccgcctttaacctcgttgataaactgcaagtcgccttctgtgtaatcctcgtccttaggacctactgtaacgataatgtcagcaaatttaccgcgaccaccactctgcttcttataaacttcacgcagtgtaacgtctttggtaatagcttccttgtagttcacctgtggcttaccttggttgcattctaccttgaattcgcgcttcaaacggtcaataatgatatccaagtgcaactcacccataccagagataatcgtctgtccactctgctcatctgtgcgtacagtgaaagtagggtcttcttctgctaacttaaccaaaccgttgtccaacttggcaatatcagcctgactcttaggttcaactgcaatagaaattaccgtatcagggaatgtcatagactccaatacaattggatgtgcctcatcacaaagtgtatcacctgtgcgaatatccttaaatcctacaccagcaccaatatcaccagcatcgattgaatccatcggaatttccttatgagaatccatttggaacaaacggctgatgcgttctttctttccagagcgaggattgtacacatacgaacctgcttcaatctttcctgaataaacacggaagaacactaaacgtcccatgaatgggtcggtagcaatcttaaatgccaacgcagaagtaggtgcattatcagagggctgacgatcctcttcttcctctgtatcagggttcgtgcccacaatagcttctgtatccaatggagaaggcaagaaagcacaaatgtagtccaataaaggctgaacgcccttgttcttataagaagaacccaaaaccattggagtaagctccatggcacaagttcccttgcgaatagctttaatcagctgctcttctgtaacttcttcaccttccaagtatttctccatcaggtcgtcatcaaagtttgcagccgagtctaataatttctctctccattcattagcctcatccactaattctgcgggaatttcagcaatatcgtactcggcacccattgtttcgtcatgccagtacatcgccttcattttgattaggtcaactacacctttgaagttttcttctgcaccaataggaatttggataggacatggattagcacccaaaatatctttcatctgctgcacagtttcaaagaaatttgcaccagatctatccatcttgtttacataacctatacgtggaacgttatatttatcagcttgacgccatacagtctctgactgtggttgtactccatccgcagcggaataggttgctaccgcaccatccaacacacgcagcgaacgttcaacctctgctgtaaagtcaacgtgtcccggagtatcaatcaagttaatcttaaaatttttaccgaggtaattccaattacatgttgttgcagccgaggtaatagtaataccacgctcttgttcctgggccatccagtccattgtagcagcaccatcatgcacttcaccaatcttatgagtctttcctgtataaaacaagatacgctcagaagtggttgttttaccagcatcgatgtgcgccataattccgatgttacgagtcaaatgtaaatcgcgatttgccattgtcttttaccttatttattatgttagaatctgaagtgagcgaatgcgcggtttgcctctgccatacggtgcatatcttctttacgtttataagcaccaccctgattattgtatgcatccatgatctctgctgcgagtttctcggccatactcttgccgctgcgcttacgtgcaaactgaatcaagtttttcattgaaatactttgtttgcgctctgggcgtacttctgttggcacctggaaagtagcaccaccaatacggcgactctttacttctacttgaggtgtcacattatcaagagcttgtttccaaatttcaaggggagacttctcctcattcgccatcttttcctttaccgtttcgagagcttgataaaaaatagcataagaaatgctcttcttcccatcatacattaaatggttaacgaattttgaaaccttttggtcattaaaaactggatctggcaagatcacacgcttctttggttttgcttttctcatttttttattaatttatgtctgcggaggctgttatttactgttcttcaacactcactcctgagcatttactcaaccttgataataattctccagcaaaacgatgaatatttctttgaagtaaaatttctaaatcatcgagctctcgaagctttttgcacctcacgttctgaagttatgtatctgctacattcttaccaactgcagaactcggtgatttagaaacccgctgctgccatgtttacttctttgcagccttaggacgttttgcaccgtacttagaacgacgctgtgtacgatttgctacacctgccgtatccaatgtaccacgtacaatatgataacgaacacctggaaggtctttaacacgacctccacgaaccaacacaatactgtgctcttgcaaattgtgtccctctccaggaatgtaagagttcacttccttttgattggtcaaacgtacacgagcaactttacgcattgctgaattaggcttctttggtgtggttgtataaacacgaacacagacaccacgacgctgaggacaattgtccaacgctggtgacttactcgtctcttcaatcacacgtctgccttttcttactaattgtgaaatagtaggcataattttacttttttatttatatatttatttgtatattatcaaaacagtgcgattcaggcattccatcttttacgacaagacaaaataagccttttcgggctgcaaaggtacaaaaaaaatatgaataccacctactaagtatgtttctgttttttgcgagttctctatttttaactaaaaataacttttgacttactaaattaggcgtttattgacgcttaccacaacaatgcaatatatgaaataaggatgtccatcaaagtgcatctacttggtaagtcctcaaaactcaatgggctacgcctctcccttatgcttatcgaaaggagcgatggttttacctgcagcttcgggcaataatactttaccaaactgttgctcgtatttatacatattttcttgtaaagccaatagaagacgtttagcatgctcgggagccatcaccaccctactcacaacctgtggcttcggcaaaccaggcaacatactggtaaagtctaaaacaaattctgtgtttgaatgtgatattaaaaccaaattggcatacttaccttccgcaacatctggggataactcaagctgcaaaccttgtgattgattattctcttccattttttatttatttaatcgttaagataatgagcagtcaaatttagacatattttttcaacttccctaacaacacgagttttttatatcagcacaacatagtttttttatttataataaggttgcatattgcaaaagcactctcattatgattttgcatcaactgcgattctgactcaaagaaacgaatcacattcatctgacgtttacacttcgttagcttccagaatagcaatagcacccctcctcaaaatagcaattttgtcctattattttactaaaaatcgaccattaaaaatctctgaaatagaaaaaatcaataggcaaacactcaccaaaaatgagctgattttaccaaaatcaaggtcttttcaagatggagcattgatttaacgcccttggaaacaccatttagagctgttatctacatacaacaacaggcttaaagtatgcaaattgtgccgctatctcaatgcttttgccgccaagagagtgtaaaatttggaataaaaagaaaagggaaatccgcaacacactcagcagcagtcagttaaaagcatcgctcatttttagcgtatttgcgaccaactttgttattggttgtctacacgcgaattttgagagacactttgtaaagaaaattcagcttttattttcctgccatgcaacatatcactaaccttttacatatactattttgttgacgtggtttcgttgtattaagtagatccaaaaatgagaaagctgcgcaccttttacatcctattagtgttcaagcaccccctctacattcacggattgaatagcaaggaacgaaaaagaatcataaaaacacttcattgagcaaaataacaacttgtttttagatggcaataactgaaagataaacaactttttttgtaactttgcaacacaattctaagaaatgaaataacaacaatctttacttccttaaataaaatatgtagtcatgcagagaaaaaaatcaacagagctaaaagattatgttatattgaccttagccatgctcatcggtagcattgggtggacggtttttctattgcccaatcatattggaattggaggaattgcaggaatctcctccgtgttgttttggggaatgaacatccctgtagagctaagctatttagggttcaatgcgttgctactttctttcgcactaaagattttaggttggcgtttctgtctgaagaccatctatgccgccattgttttctcactatttgtttcgctcatgagacatctaaccaatgaccaagccattattcgtgatgaaccttttatggctgcggtgttaggtggagttctcttgggtagtagcgttggattgggactctcctgcaatggtagcacgggaggaacggatgttattgccgcaatgattcacaaatatcatgacatctccttaggcaagattattttgtgttgcgacatatctattattacctcgagttatttggtattgcatgactggcagcaagtattatatggatacgtagttctcatcgtatcctccgcttgtgtagacaaggttgtgaacatgagtcgacgttctgtccagtttttcattatttcagataaatacaaagagattgggcgtgccatcaacactcaagtgccacgaggatgtaccaccatcaatgccaatggcttctattcaggacgtgacattaaaatgttattcgtattagccaaacaaaccgaatcggcgatgatattccaaaccattgacgaaatagatcctgctgccttcgtatctcaaagttcggtcattggcgtttatggattgggatttgacaaatttaaagtcagtaagaaatccacgacatagcatggctcattattggcatcgcaaaccatatacgctaagtgtttatagctttcccccactccctatcgtagggggtggggtgttatacccacaaaacaaatatgtatagattacaccatccaataccaactttacgcattttatagccaagggattccgtattgcaatacagaactgtccgataatagaaatgatcactaaaagtgctgaatcagtggaacatatagaacaagttgttttttttatacatgtatcattaataaatcagtgaaatataatgaaaaagaatttttctattttgttttgtctgctcaccactatttccattcatagttgggggcaggtggtggttgaggcatcaacagattctataaatcataaaggagaacggattgtttctgtgaaaattaaaaatatatcaaaagatttaacttatgtttttttgggagaattaggtctattagaaaacaatcgagttagtgtggatgaggacttctctaactattccaagaattatttggaagtagaactgtttccacgtatttttcattactttctgaaacctaacgaaatttatactttccattgcaaattatataatcagcttccaagtaaatttatggtaaaagtttatttgttttataatgtgtgtagatttcctaaaaatttcaatactaaccatataaagccgaaggattttagcaaatataaatcagatgaaatatttagcttaaagtatatgaagttggttacagactgattataaaatgaaaaatcacaaaaaaatcagggatatataatgaaaaggtatttatcaattttatttattttgttcaccaccatttccatgcatagttgggggcaagtgacggttgaggtgtcaacagattctgtaaaacatcaaagtaaacagattattaacataaaaatcaaaaatatatcaaaagatttaacctatggtttttggggggatttggctttattgggaaaaaatagagtgagtgtgagtgaaaactactccgataattctaaaaaatatttaacagatgagttgtttcccaatattttactttactttctgaaacctaatgaagtttatacttccaatatcgtagtatataatcagcttccgtctaaatttgcggtaaaagttggattgtattacatggcatacagatttcctaaaagaatcaacacaaaacatataaagccgaaagatttgaagaaataccaactgaaagaggtctcagagctaaactattttcatgagttacaaactaactgattacagagagagcgctattaatttgaaataagcaaaaagcctatttctgttataacttctcaagctttcagcaatgagattgaggtatcaaaattaacccatggagataaggggcttaacccatggagattggagcgttaagtgcatgggttaaggtggttaactcatgcttacaatctgacaaaggataagtggttgattttcaaactatttcaactccatgatgtcgctccagcgagtggtgggatttttgctcttaaaaacatgctgtatcgcatctgcaaatactatagccttgccgttttgttgtttttgcctgtactgctgagcccccagcttaacggtttccgtccccatgagtttgttcagacgatctacaacttggtctaatttgatgtgcttttccatttgagtagcgtggaaatccaagaaattagtttgtatcgcagcatccgactgaagtcccataaccacaactccagctttcttgtattgatatccacttgcgaaaatgtgttgcaacccttgcgctgccgcctgcacaatgacctgcgtggaatttgagggagtgagcaactgtacagaagtggaattccaatactgatccaaatcttcacggaaacgattggtgtgcacaaagacactcaccacagaagcaacagattgttgccgccgaagtttatacgcacaccgtgcggcaaagttggcaatgtgggtacgcacagcatcatactccgccaacatgcctgtaaagcttctactggtacaaatacttttcttatgcgtcatctcatctattggcacacaatcctctccccaaagctcctgccaagtgcgcatgccaaccaccgtaaaaagtgaacgtatccacgacttgtcacgcatcgcaaaatcataagccgaacgaatgcccatggactctaatttcgtggcatgacgacgtccgatgccccacacctcactaacgaggtattgttgcagcgcttttgtccgtttctcatctgtatcaatgatacaacaatgctgatacccctcgtatttcttcgcataatgacttgccatttttgccaaagtcttggtatgcgctatcccaatactaataggcattcccgtatattttagtatgcgatgacacaaagactcaccccactgtttcaaatctgtaaaactcatatcgggcaagacacagaaacactcatcaatggaatatctgaaacactgaggtgacgcctctcgaatgagctgcatcacccgtgccgtaagttcaccatataactcgtaattgctggaaaaaacggcaatctcattgtcaggatattgctccttgagttgataatagggcatgccagctggtattcccatccgtttagcttccttactgcgggctacaacacatccatcgttgttgcttaacacaacaacgggcttatgtttgagatcggggcggaacacgcgctcacaactcacatagcagctgtcacaatcacaaatcgcgtaatacattgaggtttttacaattcttgatgacaaaggtaacaacgccccatatttcaaaatcgtcatcattgacaaccttaatgggcttaaaattttcattggcaggcatcaattcgatatatccctcctgagcatgcgctgtattcaagaattttaaggtaaactcgccattcacataagccacgacaatatctttatcctttggttcttcagcccgatcaatcacagcgatgtcaccgtcatagatgcctactcctatcatggaatcgcctgagacacgcccatagaacgtagcttcgggatgttttatcaaatcccgattaaagtcaatcctgtcttgtaaataatcttctgccggacttggaaagccagctttgatagcaggagctatctgcaatgagagttgtttggcaaactcgcctttcactatttttattttccccattatcaaataacagtcaacatacgttgatgcaaagatactaaatttagggtagaaaacagaccaacccaataattaggttcaaaatagagcgagattgtgaaaatctacctcgtataaaaagtaaaaagggaggtgcaccattgacagtgatccacctcccttgtatagttttcttggtagtacatacagcctgtgccgtaatgctacctcaccaaattattcggagaaatcgagtacattcttgcgattagcctcaatgcgctcatattcttctttcgagccaacgatgagcttctcccactggcgaagtccagttccggcaggtattaagtgtccgcagattacattctctttcataccttccagataatcaacttttgcatggatagcagcttcattgagcacctttgtcgtttcctggaacgatgctgcactcataaagctcttggtttgtaacgcagcacgagtgataccttgcagaatctgagttgaagttgctggaacagcatctcgaacttccaccaagcgtaagtcacgacgcttcaacgaagagttttcatcgcgcagcttacgagcagtcacgatttgacccaccttcaacacttcactatctccggcattgattaccactttcttgccccatatgcgatcattctcttcagcaaaatcaagcttatcaactaactcttgctccaagaatgtagtgtcgccaggttcgttaatttgaaccttacgcatcatctgacgtacaataatttcaaagtgcttatcattgatcttcacaccctgcagacgataaacgtcttgtacctcattcacaatatactcttgcacagcggttggtcccttaattgcaagaatgtcattcggagtgatgacaccatcagacaatggcgtacctgctcgtaccgcatcatgttcttgaaccaaaatctgtttactcaaagaaacaagatacttcttctgctcacccgtcttagaggtgacaatgatttcgcggtttccacgctttaccttacccatggtaacctcgccatcaatttcagaaacgacagcaggattagaggggttacgagcctcgaacaactctgtgacacgaggaagaccaccagtaatgtcacccgcacctccaacggcacgtggtatcttcaccatcgtttgacccgtcttaatttcagcaccgtcttcaactaccacgtgaccacctactgggaagttataggtgccaagcacctcgcccttctctccgataatatcacaagtgggaaccaaagacttatccttagaatcactgataatcttttcggtcaaacctgtagtatcgtccgtctcagcgtgataagtttttccagcaaccacgtcattgaacttcaacttaccttcgtattcggaaacgatgacagcattgaatgggtcccattttgcaataagcgttcccttctcaacggtatcaccatgcttataatacaacgaacttccataaggaacgttcatcgtactaagcacaatatcggtatgaggatcgatgaaacgaatttctgccaaacgactaacaaccttcaagcatttaacatctttcactccatcgttctctacataaggaacagtacgcaactcgtcaaactcaattttgcaatcatttttagcaacaatagaagcattggcagctgcattacctgccacaccaccggcgtggaaggttcgaagtgtcaactgtgtacctggctcaccaatagcctgtgcagcaatcacacctaccgcttcgcctttctgtaccatgcgtgctgttgccaagtttcgtccgtagcatttcttacaaacgccatgtttactttcgcaagtcaagaccgaacgaatctctacgctctcaataggagactcgtcaatgagtcgtgccttttcttctgtgatctcttcaccagcggcaacaataagttcgcccgttgttggatgtatgatatcatgaacggatacacgacctaagattcgctcatagagtgttgagataatttcatcaccactcttcaaagctgtacagataagtcctcttaaggttccacagtcttcctcgttaatgatgacatcatgagaaacatccaccaatcgacgtgtcaagtatccagcatcggctgtcttcatagccgtatcagccaaaccttttcgagcaccgtgtgaggaaataaaatactcgagcactgacataccttccttaaagttggagagaataggattttcaataatctgttgtccctctgctcctgccttctgaggtttagccatcaaaccacgcataccagagagctgcttaatctggtccttagaaccacgagctcccgaatcaagcatcatgtagacagcgttaaaaccttggtcgttttcggtcatctctttcatgaggacatcacccaactcattattcacatgagtccaagcatcaatcacctgattgtaacgctcggtgtcggtaatgaatcccatttcatagttagctttgatttggttgacttcatcctgtcctttcttcactattcccactttactttcaggaatgataatatcatcaaggttgaaagacagacctgcaacatacgccatgcgataacctaagttcttgataccatcgaggaattcgcatgcgcgagccataccaacaaccttaattacatctgcgataatggtacgcaaagtcttcttagaaatgatgtcgttgaagtagcccacttcatctggaatgataccattcacaataacacgacccacggaggtttctaccacacgatcttgcaacttgccatccaccaagtccttcaccactactttgacacgcgcatgtaagtcgcacttcttttcgttgtaggcaataattgcttcttcaggaccatagaacgaaagaccttcaccctttgcacctggacgaattttagtaatataatacaagcctaacaccatatcctgtgacggaacagtgataggagcaccgttagctgggttaaggatgttatgactctgaagcatcagtatttgagcctcaagaatcgcctcgttgcttaaaggaaggtgaaccgccatttggtcaccatcgaagtcggcattgaacgctgtacaagccaaaggatgcaactgaatagctttaccctcaataagtttgggttggaatgcttggattcccaagcggtgcaaagtaggagcacggttcaacagaacgggatgtcctttcatcacattctctaaaatgtcccaaatcacaggctcacgtcggtcaactatcttcttggcactcttcacagtcttcacgatgccacgctcaatgagcttgcgaatcacgaatggtttatacagttcggcagccatcaatttaggcaaaccgcactcgcccatcttcaattctggaccaaccacaattaccgaacgtgccgaatagtctacacgtttaccaagaaggttttggcggaagcgtcctgctttacccttaagagaatcagacaaagatttcaaaggacggttactctcactcttcaccgcactactcttgcgagaattatcaaacagagagtcaacagcctcttgcaacatacgcttctcattacgtagaatcacctcaggagctttgatttccataagtctcttcaagcgattattacgaatgatgacacgacgatagaggtcgttcaggtcggaggtggcaaagcgtccaccatccaacggaaccaacggacgaagctcgggtggaatgactggtactatctttagaatcatccattctggacggttgatatctttgctctgacggaaagcttctactacctgtaaacgtttcaaggcttccgttttacgctgctgacttgtgtcattgttcgcccgatcgcgcaattcatatgaaattgaatccaaatccaagttagccaacaaatcatacacagcctcggcacccatcttagcgataaacttattggggtcggcatcatctaagcggtcattgttaggatctaactgatgatcaagaatatctaaatattcatcttctgtcagtaaatccattacatgagagccgttcatctctataccatcgccatccttgcgaccttccatgacaccaggcttgataacgacatacttctcgtagtagataacggaatcaagtttttttgtgggcattcccaatagataacctatcttgttgggtaatgaacggaaataccaaatatgggcaacaggaacaaccagctcgatatgtcccgaacgttcacgacgaaccttcttctcggtcacctcaactccacatcgatcgcagacaatccctttatagcgaattcgtttgtatttaccacaagcacactcatagtccttcgttggtccaaaaatgcgctcacagaaaaggccatcacgctcaggcttgtaggttcgataattgatggtttcgggttttgtcacctcgccatacgaattttcgagaatttcctcaggagatgccaagctaatggttatcttggtaaaattattttttatttttgtatctttcttaaaagccatgttctatatctttattgtgtgaatacaatgtaggaaaaattaatcgagtttcacactcaatccgagtccacgcaattcatgcagcagcacgttcaacgattctggaattcctggtgttggcattccatcacccttcacgatggcctcgtatgccttgctacgtcctacagtatcatcagacttaactgtcaaaatctcctgtaatacgtggctggcgccaaaggcctcgagtgcccatacctccatctcaccgaaacgttgtccaccaaattgtgctttaccaccaagtggttgttgggtaatcaatgaataagggcctattgagcgtgagtgcattttgtcttcaaccatgtgaccgagcttcaagaagtaagtaatacctacggtagctggttggtcaaacttctctcctgtctcaccatcgtagaggtgagtagaacacaagtgaggcaagcccgctttctcggtccattcagacaggtcttcaagttttgcgccatcgaaaatcggtgtagcaaacttgacacccaacttcaatccggcagctccaagaatcgcttcgaaaatctgaccgaggttcattcgagagggcacgcccaatgggttgagtaccaagtctactggacgaccatcttctaagaatggcatatcctcggcacgtactatctttgatacgatacccttgtttccatgtcgaccagccaatttgtctccgacactaatcttacgtttcttcgcaatataaacttttgccatttgcaacacgccagagggtagctcatctccaatcgaaatagcaaacttacgacgcttcagctcggcatctaacattttatatttacggatatagttcatgattaaggcttgaatgagcttattggtatgctcatcatcggtccaatcattcgactgtatgccatcatactctaagtttttcaaagcagcagcggtgaagctacttcctttcgtaatgatttcagcacccgtatagtctttaactccttgtgactttttgtcttcggtcaacgtaaggagtttgtcaaccaatatatctttcaggtcattatttttagcttcgtactcttcatcaattttagctaagataaccttgtcatgtttctttgattcccttgttttaatggcacggctgaatagtttcttgtcgataaccacaccactcaatgaaggattggctttcaaagaagagtcttttacatcgccagccttatcgccaaagatagcacgtaacagcttttcttctggtgaaggatcactctctcccttaggagaaatcttaccaatcaaaatatctcctggctccacccttgcgccaacacggatgacaccattttcatccaaatctttggttgattcttcactgacattaggaatatcgctggtgaattcctccatacctcgtttggtttctcgaacatccagagaatattcatctacgtgtacagatgtcagcacatcgtcacgaactacccgttcagaaatcacaatagcatcctcgtagttatatcctttccatggcatataagccaccaaaagatttcgaccgagagccaattcgccattttccgtagcatatccttctgttaaaatatcaccagccttgacacgttgccctttattgcaaataggacgaaggtctatggtcatattttgattggtgcgtcggaactttggaatgcgatattctttcaatgcaggttcgaaacttacaaattcctcgtcttctgtccgatcgtagagaatacgtatcgtagtagcatctacatattccacgacaccattgccttctgctgttatcatcgtacgtgaatcctcacatacctgtttctctaagcccgtaccaacgataggagcatcgttatggagcaaaggaacagcctggcgcatcatgttacatcccatcaatgcgcggtgtccatcatcgtgctctaagaaaggaattaaccctgcggacacggaagcaatctgctgtggagagacgtctaccagtgcaacctggtcgggatctaccacaggataatctgcatcttgacgacatttcacgtaatcacggataaacgaaccatctggacgcaatggtgcatttccttgtccaacaatcaagtcctcctcttcctctgcagtcatgaaaacgatatggtcgttattcatatctaccttggcattcttcaccttacgataaggggtgacgataaagccaagatcattaatttttgcgtagatacatagtgaggaaatcaaaccaatgttcggtccttcaggactctcaattggacacaaacggccatagtgtgtatagtgaacgtcacgaacttcgaacccagctcgctcacgagacaaaccaccaggtcccaatgcagacaaacgacgtttgtgagttacctctgctaaggggttcgtttggtccatgaactgtgacaaaggattggttccaaagaacgaattgataacgctggttatggttttggcattgattaagtcagtaggtgtaaagacttcattatcgcgaacgttcatacgttcacgaatggttctgctcattcgagccaatcctacagagaactggttggacaattgttcaccaacggtgcgcacacggcggtttgacaagtggtcaatatcatcaaccgttgcatttgagttaaccaactgtatcaaatatttgataatctcgatgatatcatctttcgtcaaaacacggatatccatatccgtttcaagacctaatttcttattgatacgatagcggcctacttcacctaaatcgtagcgtttatctgaaaagaaaagattgttaaagacctctcttgcactggcatcatcggcaggatcggcattgcgaagctggcgatagatataattaacagcctccttctctgagttggaaggatctttcgataacgtattgaaaataatcgcaaacttgttagccaattcagaatcacggtgtaataaaatggtagatgcaccactgtctataatgtctgccacattatcttccgtaatttctgtttcgcgctccatgatgacctcatttcgctcaatagatacaacttcgcctgtatcttcgtctacgaagtcttcattccagcttttcaaaacgcgagcagccaaacggcgaccaatcgaagctttcatattcttcttattcaccttcacctcctcggcaaggtcgaaaatctgaagaatgtccttatctgattcgtagcctatggcacgcagtaaggtagtaacgggtaattttttctttcgatcaatgtaagcatacatcacattgttaatgtctgtagcaaactcaatccaagagcccttaaatgggataatacgagcagaataaagggtagtaccattggcatggacgccttgtccaaagaagacgcctggcgatcgatgcaattgagaaacaaccacacgttcggctccgttgataacaaatgtaccattgtccgtcatgtaaggaatagtaccaaggaatacgtcctgtataaacgtaccaaaatcctcgtgatctggatctgtacagtaaagcttcatcttggccttcaagggtacactataggtcaacccacgctctaaacattcatcgatagaataacggggcggatcaataaaataatccaagaactcaagaacgaagttatttcttgtatcggtaatagggaagttctctgagaacaccttatagagaccgtcattcttgcgttcttcgggaggagtttccaactgtaagaaatccttgaaggactttaactgcacatcgagaaaatccggataaggtaccggattatgcacgcttgcaaaatttattctgttatcaacactttttgtagccataaataaaatcagtgggagtagttctcccctttgctcgttaacaatttgttgtcttaagacacaaaaaggtcaggattcgcctactggacaaatcctaaccgtaatcataataagtgggtttaggagatgcgactattcacgcagtcgcatctcctaaaagagagatttacttcaattcaatcttagcaccagcctcttcgatggccttcttcaagttctcagcttcttccttagacaagccttccttgatggttgcaggagcaccgtcaacaagatctttagcttccttcaagccaagaccacaagcttcttttacagccttaacaacctgaagcttggtagctccaacttcggtcaatacaacgtcaaaagacgtcttctcttcagctgcaccagctgcaccaccagcagcaggaccagcagctacagcaacagctgcagcagcaggctcaataccatactcgtccttgaggactgttgccaactcgtttacttctttaactgtcaaatttactaattcttcagcaatagctttaatatctgccattttattctaaatttaatttatttttaattctttatttgatttgacttttggtagatgactctacacatcaacaggaagagtcaacggaataatttattctggacgttctcccaatgtttggagtacaccatgaatggtattaccaccagattgaagtgcagaaacaacattctttgcgggtgattgcagcaatgcaacaatctctgcgataacttcgttcttgctcttcaatgcggccaactctgccagcttatcagcaccaatataaacgctttcctcagcataagctgccttcagtgcaggataatcttgcttatcatattccttcagcagcttggcaggtacgtttgctgtctgtgcaaacatcacagcagtgcttcccactaagcagtcatataaaggttcgaaatcaacatcagatgcgtcaagagctttgcgaagaagtgtatttttaactacaaccatcttcacttcattcttgaaacacttccgacgtagctgagaggtagcctctgcattcaacccagtaacatctactaagtaaaaatgaggatactccttcagtttctcgcctaattctacaatgatagtatcttttatttctttcttcattttacaaaacttttagagttattcaactgatttaggatcaatcttgatacccttactcatagtgcttgaaataaagatactcttgagatatgtacctttagcagcagttggttttaacttgataacggtagagataaactcttttgcattatcataaatctgctcaggagtcatgctgattttgccgatagaggtatgaataataccagacttatcaaccttaaaatcaattttacctgatttgatttctttcactgccttagcaacatccatcgtcaccgttccactcttggggttaggcatcaagccacgtggtccaagtacacgacctaaaggaccaactttacccatacaagatggcatcgtaataatcacgtctatatccgtccatccacctttgatcttttcgatgtattcgtcaagaccaacgtagtcagcgccagcttctttcgcagcagcctcttggtcaggagtacagagacatagcacacgagtaactttaccagttccatgaggaagtgtaacgacacctctcaccatctggttcgcttttcgtgggtctacgcctaaacgcatatcaatatcaagagaggcatcaaacttggtggtagtaatatccttcaccaattctgaagcttcttttaatgtgtatgccttccctgcttcaaccttatcagctactgatttctgattttttgtcagtttactcattttttaattgaagttttaatttattttccagggaagtccccttttactgtgatacccatactgcgagcagtacctgccacaagtttcatagcgctctcaactgtaaaacagttcaaatctgtcattttatcttcagcgatagtgcgtacttgatcccaagtaacgctcgctaccttttgacgatttggctgtgcagaagcggttttcacctttgcagcctccttcaactgaacagctgcaggaggagttttgagaacaaagctaaatgacttgtcagtatagtaagtgataacaacaggaataatcttccctgctttatcctgggttctggcattgaactctttgcaaaatcccatgatattaatacccttagaacccaaagcaggtcctactggtggagaaggattcgcagcaccacctttaatctgtaatttgattaatccagctacttcttttgccattttttttgttaatattaaaattgaaaaatataaaaaagaaagtctaaccccgtaacaaagtcgttaaacctctttttgcacttgcataaaacttaactccaatggagtctttcgaccaaatatctttaccatgactttcagtttatgcttctcgacatttacctcttcgatgacgccactaaagccactaaaaggaccgtcggtaacggtgacaacctcatcaacctcataaggaacttctacatcgttcgttatttcggtctcttcgacatcaccaagcattcgattgatttcggactgaggaacaggtgacggattatccaagccacctaaaaatcctaagcaattgggcataaagcgcaaggtatgcgccacatcgccaaccagggaagcctctacaaagatatagcctgggagacttattttctccttttctactcttttgccgttacgcaaagtggcatgtttctccattggaatcaatatttgagagacatgctgttgtagcaacgtgttgtgtttcatttcagcctcgatgtattctttcagcttagcttcttttccactgacagcacgcagtacataccaattcatttttgtatcagccatttcttaacgatttaacctggataaacaatgcccattagatgctggaagcaccagtccatacagaacaccaccaatgcaatgacaagggaagcagataatacaaccactgcactgtgtgttagttctcgactcgttggccaagttgttttatgcgcaagttcatcataacatgccttgcaataatttacgatcttcttaaacatataatcttttattttgcacgggttgaaagactcgaactctcgacacctggttttggagaccagtgctctaccaactgagctaaacccgtaaaagaagttcccgcaaccgctattacgggaactattatgaaaagggaatgaatcgttaaacgattcaatcccgtatcttcaattactgaacgtcgtccaaaatctttgtaatctgaccagaacctacggtacgaccaccttcacggatagcgaaacgaagaccttcattcaaagcaaccttgtaaatcagtttaacttcgatttctacgttatcgccaggcataaccatttctacaccctctggcaaagtgatttcacctgtacagtccatggtacgaagatagaactgaggacgatatttgtttccgaatggagtgtgacgtccaccttcttctttcttcaatacatagatagaagccttgaagtgatcgtgaggagtaatcgctcctgggtgtacaacaaccataccacgtttaacttcatccttatcaataccgcggagcaacaaacctacgttgtcaccagcttcaccttcagaaaggatcttgcggaacatctcaacgcctgtaacaacagacttcttgtcttcaccaagaccgagcaactggatttcgtcaccaacctttactttacctgtctcaatacgacctgttacaaccgtaccacgacctgtgatagagaacacgtcctcaacaggcatcaagaatggtttatccaaatcacgctcaggctcttgaatccattcatcaacggtatccatcagagtcatcacgctgtctacccacttatctacgccgttcaaagcaccgagtgcagaaccacgtacaataggagtatcctcttcgaaatcatactgctcaagaagttcatggagctccatttctacaagttccatcatctcctcatcgtctaccaagtcacacttgttcaagaaaacaaccaaacgaggaacgtttacctgacgagccaaaagcacgtgctcacgtgtctgaggcataggaccgtctgtggcagctactaccaagatagaaccgtccatctgtgcagcaccagtaaccatgttctttacatagtcagcgtgtccagggcagtctacgtgtgcatagtgacgcttcgctgtttcatactcaatatgtgaagagttaatggtaataccacgctctttctcctcaggagcgttatcaatctgatcgaacgaacttacactttcactaccaaagcccttatcgtgaagagtcttagaaatggcagctgtcaaagtagtctttccgtggtctacgtgaccaattgtaccaatattaacgtgcggtttggtacgtacgaattcttctttagccatagctttactttttttatttatataaatgaattatcttgttatatctgtttttctacaaaggatctataaaatagaaccgaagtagagctgtaactgagagttgaactcaggacctcttccttaccaaggaagtgctctaccactgagctattacagcagtgagagcggaaaacgggactcaaacccgcgacccccagcttggaaggctagtgctctatcaactgagctatttccgcaaaaacttctactggagtgggtagtgatggattcgaaccaccgaagtcgaaagacagcagatttacagtctgccccatttggccactctggtaactaccctttgtttttacgaacttgtctctttttagctggagagcctcttgtcggattcgaaccaacgaccccgagattacaaatcacgtgctctggccaactgagctaaagaggcaaatctatgcagccgtttggctgaagcttttaagacgtgtcgtaaaacggctgcaaagatagggatattttttaaaccgccaaaactttttctatttttttttagaacgagcgagatttttctttgaatttttggattttaacccgcatcgcatcaacacagaggtcaatcccctcttcgaatgtgtcgcaggttttatccacaaacaaggtggctcctggcactaccacggtaagacttgtttccttgttcattgccgtggctggcttgatgaccttgagctgtacctctactctctgaatgtcttctaaagatttttctaacttgcctacttttttctctacgaaggcctctaatttctcggttgcatcaaagcgaattgattgaatttttatttccataattacctccaagttttaaaggttaagctcggggatgagctttcatataaacacgcttcaactgctcgaaagttgtatgggtatacacttccgttgttgtgagactttgatgtcccagcagttgttgcacactctccaatcctgctccgtggttcatcatcgctgtagcaaaggtgtgtctcaacacatggggtgtacgcttttttaaagtggtaacagtagacaaacatttatttaccgcataacgcacctgattatgtgtcaaacgctgcccgtctttatccacaaagaaagccatcgattgtcgttgcacttgttcatcgcgaatcgaaacatagtgctgcagcgactcctttaattccgcaccaaacggtatgtagcgttccttatttcgttttcctaagaccttcagactctgatgagtgaaatcaatagacgcatcatccagccccatcaactctgccaaacgcatgccagtgcagtaaaaggtttctaccaatgtgtgtgccaatacatctttatattgagttccttccagtttgaagtctaaaagagcatccatctcggattctttgacgaactggggcaaaggcttttttttcttagggcccactattgtgatggtaggatctttatcgacatgacctcgagttaaggcaaaacgataaaaggaacgcaaagcactcaatctcctattgattgacgtagcattgtttcctctatccatcatactctccatccagtcacggatgatgtttgagtctatcgactcccaagagagttggggctccaaaagacgaaagaactcctcaaaggccataaggtcttttccgtaattcttcacggttagcgcggagcgatttttctcaaatcgcaggtagtccaagaactcttttatcatcgtcatcacttgcttacaccacggaggtaaaatcattgattatccaggacgtaaacacattcatgatgctcaactatccgttaaatcaattgttatacgcaacgaatatacggaaaataattgaaactaccaaaagaatctgaagtttttattcttcagcgtcgcgcaatttttgtacgtagatggcacgctccatcttcaagcgcctcaacacagaaggcttgtcgtattgctgacgtgcgcgtaactctttaataacacctgtcttatcgaactttcttttaaaacgtttcaaagctctttcgatattctcaccatcttttacgggtacaataatcatgcttttgtttttaatatttaatgttatagttaattcatttttacatctcgttacgaaatgcggctgcaaaattacgacttatttgtgaaacgtacaagtttttagcgcacattttaattttgcaagcacggctcttttgtttaagaaaggctgtttattgtgaaaaacgaacttatcctgctcatttataggacgttcccacaagtctatgccttcctaaatggcttgcgtagcctctcgcagccaattattttccttatccgagagatagggtgacaaacgttggaatacttgttcgtgatacgcattgagccaattccgttcctcaggcaacaacatctctataataataggtgtagtatcaataggggcaagcgttaaaggttcaaattgcagaaactcaccgaaagcggttttcagatagggtgtgatgagcaatgtgttctcgatgcgcacgccaaacttgccttccaaatacagtccaggttcgtctgtaacagtcatgcctgcacgcaagggagctggcttgtattccattcgaatttggtgaggtccctcatgcacattaagatagctccccacgccatgccctgtgccgtgcataaagttcatcccttcacgccacatgacttgccgagccagcgcatccaactgtgtgccactggcacctgcaggaaacttgcacagctctaactggatatgtcctttgagtactaatgtgtacacacggcgttgctcttcggtaatcggtcccaaagcaatagtcctcgtaatgtcggtggtaccgtcaagatattgcgctccactgtctatcagcactaaccctttgggttgtataggaatgtcggtctctggcgtggcttcataatgcacaatggctccatgcggctcgtagcctacaatggtatcaaaggagagtccacgatacaaatcctgctcggcacgtaaagcggtcaacttttcatctaacgaaatctctgtctgtccaccagcctcaaccgctggcttaagccactgtaagaatttgaccatggcgacgccatcacgctccatcgctgccttaaaaccagcaatctctgttttattcttcacggctttcatggcagggacgggtgagaaagctgtgattacatgttgtttttgaaacaccgagaaaatgtgtgcattcaattgttccgcatctaacaatattgtataatcggggtaatgcctacccgcctgcgtaacctcatcatacgaacgagtggacacaccttcagctttcaagtaagattgtacctcctctgtcaacttttccgggtcgatatacaacacggctgcatgcgtagatatcagaagataagcaacgaatacaggattgcagtgtacatcggtgccacgtaaattgagcgtccatgcaatatcatcaagtgctgaaagcatggtaccatccgcatgttgcagacgcaaggcttttctgatacgtgtcaatttactgcttgtggattcacctgcatatttcaagggatgtatctccaccttgttcttgggtatagcaggtcggtcactccaaatctggacaagtgggtcaaagtttgttctgagggtgataccgccttcttttcgtaagtcgttaaccatttgctgtacaaaggctttagtgtttacgaaaccatccattcccacttcggtgacgtctgtttgctgcagttcttgcccaatccattgagctatcgaaggtgtatctggcaatcctatccgcatgagttgatattcggtatgcttcaactgcgattcagccgcaatgaaataacgtgaatcggtccataaggcagcactggtttgggtaaccacagccacacctgccgaaccgtcaaaccccgaaatccattcacggcctttccagtggtcgggtacatattcactattgtgtgcatcggtactgggaaaaataaatgcgcctaaatgttcgcgtttcattactttgcgcaacctacttaatcgctctgctattgctgtcttcattgtcctacttttttatgtattacaaatatagataaaaattccgaattataagctcatgactaaaaaaagttattcttcagaggcatcatattttcatatgaggtttttgaaaagatagccacaaaatacgatagaattaaaacattagaaaaataggaaacacttgtttaccgtatgagtaacgatacggatgacgggaacaaaaatttcgaagaatctcattgtatcagaaatgcttgacaatgctgattatagattcaaggcttaataagcattaaaaaaaagaaaataaaactcatattcatttagtttttagtaactttgtgctcaactaaagcgacagaaatttttagtactttttaaatatataataatttatggcatttttgacaaacgaaaaattaaccatcgtcggcgcagctgggatgattggttctaacatggttcaaaccgccctcagcatggggcttacaaacaacatttgtctctacgacgtattctctccagaaggtgttgcagaggaaatgcgccaaagtggtttcgatgcagtaaacatcgttgctacaacagacgtgaaagaggctttcactgatgctaaatacattatctcttcgggtggtgctcctcgcaaggctggcatgactcgcgaagacttattgaaaggcaactgcgaaattgcagaaggtcttggcaaggatattaagaaatattgcccagacgtaaagcatgtagtgattatctttaaccctgccgacttaacaggtttggtaacattgttgcactctggtttgaaaccatcacaggtaacaaccttggcagcactcgactctactcgtttgcagagtgcattggctaagaagttcaacgtcatgcagaccgaggtaaagggtgctgctacttacggtggacacggtgaacaaatggctgtatttggaagtcacgtaaccatttctggcaaaccattgaccgaaatcatcggtactccagaattctctaacgaagagtgggaacagatgaagaaagatgttaccaagggcggtgcaaagattattgagcttcgcggacgttcttcattccaaagtcctgcttacctctctgttgagatgattcgctcggtaatgggtggcgaaccattccgtttccctgtaggaacatacgtaagcaccgacaagtacaaccacatcatgatggctatgaagacaacgcttgacaagactggcgcacactacgaagtaccacaaggaaccagcgaggagaacgctaaactggatgcaagctacgaacatctttgcaagatgcgcgacgaattagtaactttgaacatcgttccagaaatctctgaatggtcaaagattaatcctaatctctaaggattcctttgcagttgagatttctcaacttgaagatataaaaggatgtagtcctcttggaactacatccttttttatcatttttcatttgcctgccataaaacaaacagaaaggaaatactaaaacaatgaaactcattaaaaataaagaatttggaggagagcgtcctcttttcggtattcacgatgtacgactggaaaacgtaaacatcacagaaggcgaatcgggcattaagaaatgtcatcatatcgaagccgaccactgtcgcttcataggcaaatatccttggtggcacgtagaacattcgctcattaccaactgctattttgaagttggggcgcgatcggcaatctggtattcaaacaacatggaaatgagagataccgttatcgatgcaccgaagctatttcgcgagatgaataatctaaagctcaccaatgtggtgattaacgatgctgatgaaacgttctggaaagtgaacggacttaccttgcgaaacgtaacactgcacgagggaacttaccctgtgatgttctgtcaaaatgttgacgtcgacggctgggagagtgatagcaaatatgtttttcaatatgtgaagaacgccattattcgcaatgcgaagataacaactaaagactcgttctgggaaacagagaacgtaactatctacgactccgaattgaacggcgaatatttagggtggcactcgaagaacctcaaactggtgaattgtcacatcacaggtgagcaaccgctctgctattgtcagaacttaattcttgaaaactgcaccttcggcgaagactgcgataggatgttcgaagagtctaccgtgcaggccgacattcgaggttctgtcacaaacattaaaaatcctacctctggaaagattgtagcagatgccattggctcggtaaccattgatgaacatgtcttacagccaaacaactgtgaaatcatcattagaaaataatcttaaaaatgatacactatgaaatacgattttgataaaatcatcccacgtcgaggcaccaattcggtgaagtgggacgttgcaaaagaagatggagtcatccccatgtgggttgctgacatggactttcaggctgccccctgcatacgtcaggcactgaaagaaagagttgatcacggtgtctttggatataccttggtacccaatagctattatgaaagcatcatctcatggtttgacaggcgccaccagtggcacattgaccgcaactggatactctatacttctggcgtagtgcctgcaatttctgccatcatcaaggcactcacggagcctggtgacaaggtgctggtgcagactcctgtctataattgcttcttctcttccatccgcaacaatggctgtaccaccgctgaaaatgcactggtacgcaaaggcaactcgtatgaaatcgactttgatgactttgagagacaggctgcagacgagaaaacaaaagtatttttgctctgcaacccccacaatcctgcaggacgtgtatggacacctgacgaactcagtcgcatgaacgacatctgtctcaggcatggcgtgaaggtaatcgccgacgaaatccattgtgaactggtcatgcctggatacaaattcactccttttgctgccgtgtcgaaagcctgccaagacaattgtatcactaccaactcacccacaaagtcgtttaacatcgcaggattacagatcgccaatatcattaccaataatgacaccattaagcgaaaaattgatcgtgccattaacatcaatgaggtgtgcgacgtcaatccttttggtgtcattgcacttcaagctgcttataatgaaggggagtcatggatagaccaactcaatctgtatttgtgggagaactacaaggtactcaaggacttctttcaagaacatctacccaagttgcaagtattgaaattagaaggtacataccttgtttgggtagacatcagtgccacaggtttgaaagccgatgagcttactaacgagctgttacaacaaggaaaggtcatggtgaacagtggaacgttgtatggaaagacgacgggtgcagattatctacggctcaacatcgccatgcctcgaagcctcatgttggaagcactacaacgcatcgcacaggttttgcagccaaagctttgagcttgtacactgaccatatctaaaagaacaaatgaaaacaatctttctgtcacttgactgatagaaaagtatcgaaaaagggatgtcgcacttcacgacatccctctttttaagtttttgtattaaccagcttattgcgtgcagttaacacaccgctataacaatcgtgtttagaagagataggtaagacctattcgccacgagttagcacgtgtcttatgattctctacgctctctttcacattcttgaaagtgatgtcacctgtcttaccaacgcccacattatagttggctgtaacctgaaaatgcgtagcaaatgtaacaccaagaccagcattcacactgaagttcgatgagttcaacgaccactctgctgcctgatcagggagatcagaaatttcttttaccttgttaccaatattaaaaccaacctgtggaccgccaaatacaaatatatttgccacatcgctcagtccgatgctgtatcttacattcaccggaacaatcagtgattgttgtttcaatacggtattgaatgtggtggtgttgacaccttctaccttggtttcttcacgattgtacaaagcggataaatccattcccaatcctgtgagaggcaatgaaaacttcaccgtcggaccaataaagaaacctgcacggttagacgtgttaaataggtttttatccaaagacatttcgctcaagttgaaaccaccctgcacaccaaattttaattgtgcgctggtaggcaacactgcgaccatagttaatactgtgataagagataaaattctttttttcatcatgtttttgtttagttgaataatgtgaatattaaatgttatattttaatgacgctgacgacgaacggtcactcgagcagcagaactgtttgaagacgagctttttcggcttcgattagacttaactgtcgccttcgcatctcgaggtgaacgactgcgtcgaacgcgttttgacttactgtctttcggattcagcttagcaatgctgtcaagagaatctttgcgagcggcattgccccacatgtttttttcaaatgcctgtatctctttttctattttctgctgttcacggttcattgctgaatcggtgggacagtattgagccaaggtttgtcccaacatattgttggttttataaatctttccctgatacttgttcttcgtaaaaaaatcgtcgatactcatgatggcagcattgttgagattgctggtcataatcgtctgcttcgacaggaaaggagccaaatcatcatatttcacccagaacagcggataagaggtggtaccatcgccgaaatcatccacacgtttcaagatggggcacaaagctaacaccttggtgtgaaaagtggctgtagcttggtcgtaataggcactttctttcagatagtatgcagtgacctcgcgcgatgggatatcactgtcatcgatacggatgccacgatctgtccgctcgtaaaagacatgataattgtctaaaaatgccaaaggcttgacacgagcagagtcttcaaacgactcgttcccatccaatcggtattcgtaggctctaatattgccggtcatcattaacttgaaaatgtagcaaaacaggttcatctgcgtgcccatcggctctacgggataatataatcctgcattagcatcctttgttaaatcgatttcgcgatagatgtctcgacgccacaccacatcttccgacatctttggagcagttggaaaggagagttgtgcccgtgtactgagcgtttgcgcattgttacgttgggcacgctgttgttcggcgcgccgtgctggcggttgtgcaatagctaactgtatcgcacagaagatgatgcctatcaataaaattgttttcttcatcgtgatataattgtatggtggagtttttctcagtccaccttttatttaacgataatttccattgatgctggtaatttacgtgtcaacccatcgggaccaacggctgtaacgcgcgagatgtagaatcgcttgttgcgtgacaactgtcggaaagcattacgttgacggtcggagaagcgtgcgccattcgatgccatgggcacggcatttcccatattgtcgaagaacaccgtctcaaaattaaccaccttgaactgaatatccagcaagccgtcgtcgatagccgcctgtatgcctgtcgcacccatcaaggaagctttggacagtccacctcccttgaagcgatcggtgcccaaagcaatataggcaataggatctggcaattttcgcacatggaaagtatatttgccaacgggtcttgcgcttccaccctgattcgacaccacttgaatggtgacatccttacccaccgtggttggacgtgcgatgtatctgcctgctgcaaccatgcggaagcctccacctgtcattgatgcggagacagcagtaagcggcacacctggaatactgatgctgatagggttgtcgtaacctgcatacagcacattcatcaggtcagcagataccgtagcactcggtgccactactgcatatttttgggagaagttgcgtcgtatggtttcaccactaccattcatcatagtgatatagccttggaatgaatgctcgcccacacctcctgcggtaaattgataggtgttattgtgcaaatttattttgcgtccaccgatgtaaatatcgggttgacgagtggtatcaacggcagccatgacaatctgtgccgagaagcgatctccactaacaacggttttagactctggtatcacaaaggcttccaacttattgacacgaatatccttcaagtctacattggctaccaacgtatgtaacacttcgccctcggcataacggatgtcgctttgcaacttggacaagagtgtgacagcagcagacacgggcatgttctcaaacatatattcctgccagtttttacccatggcttgggctcgcttcgaccgttttgtcgtgagattgctggcaatcatttgtcgctggtgttcatcgggtatcattttcaagatttgttcacgataccgattcacacggtcgtataacatctttcctttgcctaccccaggcgccagcatcacatgtgaagcggcttcaagatcgtccttgtgttcaatattataaacatctccatgaggaccgtccgcctctcgcacaatctcttccttgagctcttgaacaaagtagtacaacgagtcactcatgcgctttacttgcgtagccttgtcaaaccatgcctgcaccttggcgggattggctttgacttgatcggaaagtcgacgatagatagacctattctctcgtgaagagttggcggtagtacgattcaaactctcctctactaccgcaaagccttccaatacctcggtagatacgttcagtgccaacatcgccatcagcacgacatacatcaagttaatcatgcgttggcgcggagatacaggtcttttctttattgccattctgagttgatgagtttatgagttactgagtttataagttggtgagttcctgagtttataagttcctgagttaataagttgatgagttgtttattcttgcgaagggtctaaccccggattggctgcacgcatattgacagtcatcgcctctatcatacgggcataaatcttgttgagctgctctatttgttgagccatcttgcgagtctggtcgttgatttgatctatcgtaccaatctgctgactggcacctttcaactgcatctcgtaaaccttacaaattcctgttaaggtacgatttagattttccatttcctcactgtcacgcgtcaaccttacactctgttcggagaccttccccaaagtctctgtcaggttcttcaattcggtgacatacttgctttgcgcctctatcaactcaggcgaactttgctgctgtgcttgtacccactgtgaggaggcaccagccgtctcactgccatcactaacaggcatatccgtacctgctgttgcagtaacaggtggaggaactactacagaacctgccgttgaatgcccctgtcctctatatgaagaagtggtttggagggcttctgctggcataggctgggctgcagacgactcttccaatggagaattgtaaacgaccttacctgtttccaaatactcctccgtgactcttgtagggagctcacgtccgtcggcagtcttgtcaaatgggcggtcaaaagcagagaggaagaataccactacctctgttcccataccgataaacaacatgaggtttccaccttttaagtgcgtcagcttaaacagcgcacctaaaataaccaacgatgcaccccaactgtatgcatagttcaagaacgtttgtcctggaacactgtccatccatttctgcaaacgatagatgatattgtacttactatatcctgccattattttctacctttcttctgttttgtgcttgttgtattcgccagactgcgtacacatctgaaaccgatatatgaacgaggttgattttgatattcccaggtacgccaggcacttcgaatatacgattctggatctttccatgacccgccacgtacactcttctttttcaatttatagggatcttccaacgctgccttatagtctaactgcggattcaaatcgttcatcgcatcaactcccgcttcggtataaatagtgctggtccactctgccacatttcctgccatgtcatacagcccattcgagttggctccatagatacctactttgctggttatcaggttaccatccttggtataattaccccgatcgggcttgaagttcgcaaaaaaacaaccctcgccagacatcactgccttgttgtcccaaggaaattcatttccttctttccctctggctgcatattcccattctgcctcggtggggagacgataacgctgtatgtaacgtgcctcggctcctaaacctttcaaaaggtagtcggtacgccaagcacaaaaggcattggcttgctcccacgtcacccccacaacgggataatcgttataggcggggttactgaaataattgcgaagataggtctcgttatccgagttttgaaaatcattgacccaacaggtggtatctggatatacgttgacaatgtaggtgttcaaaaaatcccatggacccgaacgtggacggttgatggtttcgctcacaatacgcccagtatcgtcgatataggcggtatcttttgaaatcatgaccacctcatcagggtctactgtttggtcggtattcagattacgctcatcaggtatcatgcggtttctccgcagtgctgccgtggtgtaatcataaatttcatatcgataattgagctgacgataatccaatagtttttcgcccgtcactggattggtgacatacatactctccacagctcgctgctcgtcttcgttcattcgacgtgggagcggtttcttccagttgatatgcggtggcactgggtcaccgttcttatcttctgtgatgagataagtctcgtctcccgcataggcaggatctgcaagacgtgtccgcaagatgctgtctcgaacccaagcaacgaattgcttatactttgaattggtgacttcggtttcatccatccaaaagccatccacagagatatccttttgcgtcatctcttttccccatagactatcttgcttctccagtcccattttgaggtaaccacgatcgatgcgcgtcatgccataaggagtaggctcactgaaagcttttcctcccacacctactacttctcctcctcgtcctaccgaagaggctgacctgccaccgaagcagcctgtcagaatcatgaggctcaccatgcccattaccatacttatctttgtcttcatatctgtgacattcatttttcgacgtaacatttatagaagtctgacactcttatgtttatttcttcctttcttcgccaaattcacatccatttgatagcctacgaacaactcgtgactaccgttgccgggctgaatggcagaggtgtacaactcatagctatatcccaacacagctccatggaaactgccacctactaaaaaggtgacggagttggtgggactataacccacgcctccatacatcattcgcttttcgtgttggtagacgagtcgagcggtgacatcgccccgataagcgacaccgtcggtacgtaccaacacagaaggctgtatagttaaaaacggatttcttaagcgtatattgtatccagctgttaaataataggtagcatcaatgtgaaactggttcttttctgttaagtcgataacgggggatgtcagatgttgagcagagagccccacataccaagatgaatggaaataatataatcctgcaccaatatcgagtgcattgccctttacttgtgtgttcgtaaaagcggggtcattggcatcggcaagatttagtttcgtgccatcaaacgattcgctcaacatgcctgcctgcacacctgccgacagttttccaccaaagagtttgaaccgaagagcatactgtgctgcaagtcgctgatgcgtaaacagtcctatctgatcgttcatgagttgcacacctcctccatggtaggcctttaagaaataaaaaggcatatctgccgcggcgtacatcgttttcggattgttttgaaatcctaccatgctcatggcgtacgctgcattaatgttcaattggtcttgtttgccaactgctgctggattaaatgagggttgcatgtcaaaataatgactgaacgacgcatcatattgcgctcgtacggtacacacactcaagagcagcagccagagaaaatatatctttcttcgttgcacgaatggataacgcaagttctattattttattgctttcgccctatctttaatgaacatgtaatatttatcgcaacggatgaatacggaatttcacggcacatccgtgccgctccgtgtctttccgatgctataacgacaccacgcacttccggcatcatatctgcaagtcatggttttacactcctccaaagcatgtttataaaattattttgatcgcagaacgattgcattcattcacccgcttacctcttttgtttcttccattttattcgttgttaagtaattattcttttatgagtgtgtaatatttatcgcaacggatgagcacggaatttcacggcacatccgtgacgctccgtgtcgttccgatgctataacaaacgaccattttaatgaaacagccgagtattgcgccagcaacggttacaagcaatgacagggcgaagcccgcaagataacactccgagacattgtgcaccagttaacgttacgagcaatgacagggtgaagccccaaaaggaatatagcccatggtaacaccatgggtaagcagtagttagctaatgggcgcgctgtaagcgcaaaaggagttagggaagtgtcatttctattatcttccttttgctctttcagagcgctaaataaatggtcaactgtacccagggcggatgccctgggctaatttcttattgggctttcagcccgtctttgctaatatgcaattagcacggttgtcgataataccgccgtcaaaacattgtgtaacagctgcggttattagcaatgacgaggcgaagaccgcaaggtgacactccaagacgttgtgcaccagtaaacggtttcgagcaaaggcggcgcgaagcgccaaaaggaatatagcccatggtaacaccatgggtaagcgataattaactaatggcgcgctgtaagcgcaaaaggaatcagaaaagtatcatttcttttaccttccttttgctctttcagagcgcaaaataaatggtcaactgtacccagggcggatgccctgggctaatttcttattgggctttcagcccgtctttgctaatatgcaattagcacggttgttgataataccgccgtcaaagcattgtgtaacagctgcggttatgagcaaggacgaggtgaagaccgcaaggtgacactccaagatattgtccagcaacagacgttatgagcaaaggtgggacgaagtcctacaagataacactccgagacgttgtgcaccagttaacgttacaagcaatgacggggcgaagccctgcaagataacattccaagacattgcacaccaattaacgttccaagcaaaggcggggcgaagaccgcaagataacactccgagacattgcacaccagttaacgttacgagcaaagacggggcgaagccctaaaaggaatatagcccatggtaacaccatgggtaagcggtaactaactaatggcgcgctgtaagcgcaaaaggagctggagaagtattgtttctttcttgctctttcagagcgcaaaaatgcggaattttctttacaaaatgcctctcataactcgcatgaaaacatccaacggcaaagtgggtcgcaaatacgcgaattatgagcaaagtttgtaatccattgttattgagtatattacgtctacaacgttgcttttcttgcctatctttaccgtttttttgcggataaagcaatgagataagcctccaatttgcatgctttaatgctcttgaagcatgtgaataagacctctaatacatgtttacaagggcgttaaaacaatgttccaacgagaagagacggtttttaggggaaaatcagcatatttttgtataccgtttgcctattgattttttctatttcgcaaattttagatagtcgttttttggtaaaatgataggacaaaaataacaaatatctttgtcaaaattgaacaatgtcgcacaagctttgtttttgtctttttagtatatttcgttgttcaatagccgttcaaaaaattatcgtcagcagctgtacacaatggactgcacagaaaaaacatgcagcaaaaagggtaaaacaaagggtgacaagcacaacgccgtcacccttagttttacattattattactcaggtcattattggcgaatgaccatcttctgattcacagtctttccgtttatctgcattgagacgatatacacaccgtttggcagttgagccttgaggcgattcaggtcttcaggctgacgcacattggccacgcgttcacccgaaacggtgtacacaacagccgaaccattccaggttgctgtcgtcaccccttgaatctcggtaggcaaattgccgaatgaggttgccgtggtgttcaccaacttaaagcggttgctatccacacccgtatgacgcatggtgtaggtgtatgaggtaacatcctcatgcaagtcaaccaactgacgagtggtgtagtctaccaacttcagatgctcgtactgtggcaggttcttcttgcggatggtcaacgtgtacaactcgttgtcgctaccctctacagtaacttgttgctgcgtgaggtcggcagttgcgttcacctgcatctgtccatcaacggtttgtacatacagactggcaggtgcattggtcaacagtttgcgaccatcccaaccacggtcgtagcggtcggtggtgccttctgcctcgatgagccaaagcacatcactgctcttgctgctctccaaaatcatctgtacagcgccgggctctttcgttgtgacctcaaaaggtttcgccatggctgcccgttcgttctttaccacactttggtaaggaatagtaactgtagcaggaacatcactcaccttggtttcagtatcggtaaacttcagcaagaagccctgcatagaaggtatcgacttgtaaccaatggttgctgccgagttctttggaacagccaaatagccacctgctgccacattcaaatcttgcgttccgttggtcgtcttattttcataccaattgttgaaactacccgtatggtacacatacaccgttggatcaacttcattggggaagctaagcttgtcaatatcgatggcagccgtgtaagagttggcaaagatgttttgtcccaatccccagtgcttctcgcccacgttggcagaggtagattttgtcacctcagcagcctggcgtgtcagcgtcaagttgtggtcgcacaggttcaacttacctgtcagggcatataccttcggtgcatcttgtgtcaactgatagcccacgaatggcgacatcgttttgtccttagccatccagctccacttttgataatactgtatcttgctgttcttcgcctcggaatagtattgcaggtaagaacccttgaatacaggacttggtgccatttccgtcacaggaataccaatctgttgccatgtgtaaggctctgcttgtagcgtgcggccctttgtaggcgaaccgtcgagcttgtcctcaatcttcaacatctcgttgcctaccttctggccacgtccatagagttctaccgttgcatatacctcagacttgcatgggtcggcatacgatacggcaaacgaaccgctggcatctgttcctttctcgtcggtcttgatcaccaacttcttggcatcacctggctgattgtaacctactaacgcagtagaaacaaccacactactcttcttcgatactacaagagccttgtctgactggttctccagtgttccgatggtcagcaccttgtcctctggcaatacacagtcgttcttggctgcgcctttctgtgcagggttctttggattggcattgtttgactcggtagcaaataccacgtcttcgccatctcctggtactttgaccgtccagttgttttgattctcgaacttggtgtcctcattacctacccataggtttttctccattggtcccgtgcagtcgccaacagtgatgattaccttacgttcgccaccagggctgccagcacaggtaggtattgattgtgcaaacatggtacctacggtgaactcatacgtacctgctttgtcaaacgtagcgtctatggcgttgcctgtacccacctgtaccgtctcgcctgtgtcaaggtctttacgagtccatgtcacatcatacatataggtagacacgggtaactccaaatggttgggagcaagtccctgaccgtagcatttctctgtccactctgcttctacttcaggaattccaacaggagagatataaacgttcgacacctgtgctgggcagccattaccataactatattgtgcagttacctgataccatcccgctgcaagtccactgaacacatgaagtgaagcgttttcgccattgtttttggtgatatccacaggctcacgagcatcttctcctggagttaccacaccattctgctctgtagcttttttaatttcgtagtgcaacggataagtagcttcatatcctttcttgatgcccacggtgataagacctgagttggggtctttccgatcacacatcgcaccttgcacttcgaaggcaccgtcacccacggaaggattgaaacggaaagcaaaagtcttgttagcaaagttgttcacaccaatagctgcgccataagatttaggaacatacgcttgctcgataggagaatacacatgatcgtctgtctgcgcattgataccaatggcaaattgccaattaggaagataagggcttacttcaatcggagtgtcttccttaaagtctccaggggaattatttgaagaacccggactatcagattcataataatcctgtgccaggtgattgcagtcccctaatccaaagtcaaagctaaccgtattgtctccacaacccgcctgaacctttacaccgttcttataaccgctgtcgttacgaggctggtatttgataacgtcgctttcgccaatggtcaaactcatcggtgaggagatttcgccgcatcgactaatacgtatcacatactctccaacaggcaaatcataaatttggagatagccatttcgaggcgtggtcttaaaatcaatagggaaggacaaggtatgctcatattcaacattgctcaagaatggtgttgtcttgaacgtggttgatgtagcaccgtcctttcgctctatatgcactccgtattgcatggatttctttgacacttctatccatgtgcctgcggtgttcccatgaataccagcgatgcaccaaggccttaaagttgagccactcttgatgtccaagtttttaggcagtgccacttctacttccttggtcacgtttaccacgtcgcaaccgtcgtcataaacaaagcgatatgttccggggccataatcagtaacgtctacggttctttcatcattttcaaacaatgttcctccacccatcggcacttcaacaggcagctcgtcccagttgcccgtctctgtattctttttctgaagttttgccttggtaccttcaggaaagtagtaatgggtgccactcaccgtggtagaatatttaattttaaattctttactgagaacgttacagtcctcatccgtattgtagttggagataggagtcagtttaaacggtgcactgaaacgagaatcgtttccgccatcacttccaaggttcatatcctttgcatacaaaaatttgtcttctgtcattacacccgtacacaaaggcttgtattgcttgataagccatttatcttgctggcgacttcccttgtagcttgccttgaacaccaaggtaatggaagaattgtctgacgtacttttcgtctcatcatactcgagattcatgacatctttaatctgataccacgcatccactctaacgccaccgtttttcaacatttcggcttgctcttccctggcttcctttgtgctgccatagacctcaacagctacatagtcttggtactgacaattgccaagatacattctagagtatcttttccaccataatttaggtgcaggagcctgccccatggtaataccttcaacacttaccgatgtttgggtagtggggcatacaccattttgcgtgtctgccacagttaccttcaccttatcgccttgagagagcttggtaacgttccaagtacgggcatcaatggcatcggtacccgaagtctgggttgtcttcgtgccatctgtacttgtaatttcagccgtataatggaaaggacctaaaccatttttcactgttacctcaacactaccgttattgctgccattgatggaacaatagggatccgattgggtataggtcatggttggcgaaacatacgtttcgttgattttcttcacctctacctgcccagcatactcttgtttcttatcgctggtagtttggaagtacaagtcgtatgtgccctctgtaaggttatgccatgttttagtccacgtgttaggatcggttgacgactgcgtcaaattggcatcatctccctgcgccacaccattaacagtgataacatcattcggcttgcccggcttgcgaagttgtgcagagccattaggcttctcgctgttggtgcctgtcacacttagcgtaaccgaacctccagtggctccacaaccaatgtttatcttagacactttgtaggtgtaggtataggtctgtgcaaaagccgccacgccaaaagtgagcatcatgacgagcatgagcaggctgcgttgccacaattgaggtctatatgacctcgaagaagtaaaatttttcatcggattttctttaattttttttctgttttcaaaacatacatacagcatgatagccatcaatcgaaccacccagttttcatgtcgaagtcctcgtcgaacccaccttcctttgcatcaatgggtttcatacccccattgtcttcgccactcactgttgcattgggaccaatttgcatgggtagcaataagatgcttggcgttacataacttttcctcataatctcaatttttagtatttattcgttactctacaaggcaagcccgtcttatcggacagtagcttaccatcactgatttcattaaaaacaaaccttattgtcaatgtgtgacggcagttgcagatagaaaacttgcctatttacaaggcgccacatgtattactggcataaatttgaggcaaagttatcaagttttgttaaatttaccccccccataaagttaattatgtttaattactgggaatttaacaagtttgtaacctatcgcagctatctaaaacgtggttcttgaatagtctaaacaacaaaaaagcgaaaaaaaagtagagacgcacagcctgtgcatctgcaagaaaaagatgttttcaactatccaatatttatttgattggacacatgagtcatgcggtcctacacgatatgatttcactttcgttacatggtaaggaaagaggtgaggcgcaagaaacaaagactatctaaaacagaaaacccatgacccgtgggattcaatgtggctgaatccagcgagtcatgggcttgacatgacaaacaatcaaggtgtcgtaagtacaaatgcgtttccttgttgacgcatcacctttcttaatactcgtcctcgttaaagaggaaatcttccttggtaggatagtcgggccatatatcttctatactgtcatatacatccccctcatcctctatctcttgcagattttccaatacttccaaaggagcaccagaacgaatcgcataatcaataagttcttctttggtagcgggccatggcgcatcttctaatttcgatgctaattcaagtgtccaatacatagtgttacaaaattatatgtgttaatcttcgtgcgtgcaaaaatagtgatttttatagaatcaccaaggatattcccattttttttctgttaccttggcttgaaagttgatttttcgtgccaagacatacaaataatctgacaaccgattcatatattgaagagcttcgggttggataggtatgtgagcatgaaaggaaatcatacgtcgctcagctcgtcgacaaaccgttcggcatacatcggcttgcgccgcacaacggcatccaccaggcaacacaaaagctgtttgtggaggcaattgcttctcaattttatcaatctccttctcgattgcttgtacttcagcggcaggaaggaggtaacgctgacgcttatcgggctgtgcggggtctgaagccaaataactaccaatgacaaacaataaagattggatatgggtcacaaaagccttatcatactgatgatgcagcatcgggcgtaagagtcccaagtgggcattaagctcgtctaaggtaccaaaagtctcaatactcaaatcatctttcgcaacacgagtccctccaattaagctggtggaaccgttatcccctgttttggtataaattttcatagtgtcacataaattaagttgggtatcatcatcgtcttatcagatttcgacaagcttttcagaaaagaaacaaaagataacaagacagaacccatagttatgaaatatttagttacggtggaaatgttagtgtccaccttaaaagatgagtcgataatgtccaattgttttcgttggatcatagagtatgataccacaatcaaacaaatcgaaagttataaattgacgacaacgtatcaccatctctttccaaatgcgctgacagtgccgattcaatgaaatgccttctacaataaaaaaggttctatttcgtggctgcgcaataaaacgcaaaaagcaagacttccaatcctcctccaaatggactaaatagacatcaggtatcaaagaagcgtcctttgcatctcgcaactcaccaaacaataacttagatggtggataacctgcctgaatataccgactatagagtgcagcatggggggtacgaatccaccagtgggtaagagtttcagcacgtgcaaagcgaaagagcaggcgagctaaccgcaaggatgcgctggaatccgcgggcatagcttcttgcagcacccgatatgatttataatctgtacggtcattgacaactcgggtgacaaaatgataagtccaaggagactgaatgccaaaacccaaagcacgtgaccaacgacaaaggcaagctaactgccgccgcaaacgataactgatagatgttgtatgatagttgtccattccttttcaacacttgcacaaagataataaaaaaatcaagagctggcatgacccaagcaaaaataaacagacaaaaatattttctttttaactatcctcacaatacaccctttctcatcttcccacagtatgccccctttcgtaactatccacagcgtaacaccttccgtaccctttcacacctttgcatcctgttccaactatccacaccgtgccaccctatattcctgcaacctataaacaaaaaaaagcctccagcatcggttgagacactggaggcgtgaagtaaaaaaggcagctacctactctcccacattgcattgtagtaccatcggcgcaagcaggcttaacttctctgttcggaatgggaagaggtggaaccctgccgctataaccacctgataaaggggttgacaaatcttcacaagcaaaacatgaataaaataaaatgtacctttttgttgacgtgtctattttcatagcactacaacacacgatacaactgaaagaatggctcacaaaagaaagtcttgggcaattagtagtgctcggctttgccatcgctggctttacacctgcaccctatcaacgtcgtcgtctacaacgacccttgtatggagttctcatcttgcggatggcttcgcacttagatgctttcagcgcttatcctaacca

SEQ ID NO: 120 - DNA, 117310 bp, Prevotella timonensis
  source 1..117310: mol_type = genomic DNA
aaaaaggattgaaacagacttctcgcagatgtgcgaccaatttatgatttgccgcaactatgcaaaggaaacagtaggattgtttacaagaattatcggtaaaatcagtgcctttacggcaatgcaatatttaaatcacattaataatagacccattggaagagtcaagtatgcactggcttaattccgccaacgggtttaaaacaatatctaaaatgaaatcattatctaaattaaagccgtatgttatcggtttggacttaggcggaacaaactccgtttttggtatagtagatagtcgtggagacattaaggctacgacttcaattaagacacaaggttatgacgatgtaaatgattatgtagcagcttccgtagaggctttgcagctcatcattgaccaagtgggcggtatcgacactatcaaggcaatgggaattggtgctcccaatggtaactattataatggtactattgagtttgcgcctaatttgagctggggacataatggggtagtacctttggcgaagatgttttccgagaaattaggcattcctgtagctttgaccaacgatgccaatgctgctgccattggcgaaatgacctatggtgtggctcgtggaatgaagaattttatcgtgattactttgggtacaggagtaggttctggaattgttgtcaatgggcagcttgtttatggaagcgatggctttgcaggagagttaggacacgtagtggtacgtcgtgaggacggacgttcttgtggctgtggacgtaacggttgtcttgaggcgtattgctcggcaacaggcgttgctcgaacagctcgtgaattgttagaaaccaccgaagaaccttctttgttgcgcgagatgatattggaagatattacttctttagatgtgagcatcgcagcagaaaaaggagacaagctcgcacagcatgtttatcagactactggagagatgttaggcgaggcttgtgctaattttgccgcattcagttctccagaggcattcatcttctttggtggacttaccaaggcaggcgatttgctcatgaagccgctcaaagaaagctatgataaaaatgtgttgaagatttataaggataaggcaaaattcttaatcagtggcttagacggttcttcagcagcagtactcggtgcgagtgctattggttgggaaatataacattctcgtcacatcgctattgttagatacttcttcctctttttaattcatatacctgtattaagactgagatgcgctctcaataattggtatgaacgaaaggaataaaaaggaagcttgacttaaaccgtatcaaggggtgcgctgtttggcgtagcccctttttctttacttcgtcattgcattgttcaacacaaatgacaatgttgatgattagggaattagctgaaaatctctaatcatcgatatatctttttaagatgtcttgatagttctcaatccgtcggtctcgtaagaatggccaccagcgccgtacttgctcgctatggtcgaggtcgatgtctatcaccacgctttcttcatcgtcatcgcatgcctgataataaagttctccttgtggaccagccacaaatgaactaccccaaaagtcaatgccattggtttgtccagaagggtcgtcttcgtgtccaactcgattgacagtgatgactggcagcccattggctactgcatgccctcgttgaacggtcatccatgcgttgcgttgtcgctgttgctcatcgtcgtcatcgctgctttcgtagccaatggctgtgggatagatgaggagctgcgctccttgcagtgccatgagtcgggctgcctcgggataccattgatcccaacataccaatacacctaagcgtcctacggaggtgtcgatagggtggaaacctaagtcgccaggagtgaaataaaacttttcatagtaagcggggtcgtcaggtatgtgcatcttgcggtatttacctgcgatagttccgtctttctcaatcactacagccgtgttgtgatacagtccgggagctcgtttctcaaacaaggaggtaacgatgacgactcctaattgttgagcgagcttgccataatactcggttgatggacctggtataggttctgccaaatcgaagttgtttacatcttccacctgacagaagtagagcgagttgtgcaactcttgcagcacgataagttgtgcgccacgctgcgccaagtcggtgatattctcggctattttctttttgttatcgtctacacattcggtgttccgcaattgtaataatcctattcttatttcgttcatttttttagtttttaagttgatgagtttttagttttttagttgacaagtttacaagttcacaagttgatagctttgccaatcataaagttcaaagtttaatgttcaaagttcaaagtttgcatttgttgcatggtgaggcagtgcagcgaaccatgttgcttgataaccgtcgtggcatccaggggaatgatgtcacggtgggggaaggctgtcccaatgatgtcgagtgcttgctcatccagttcgtcttgttgataggtaggaactatcaccgccccattaatgacaacgaagttggcgtaagtggctggcagacgctcaccttcgtagaaaataggttggggtatagggagtctcagtagccgataaggctttccatcaatcgttcggaaagttttcaactgttgttccatttttttgaagtcgttgtattgcacgtcctcctcgtcatcggtacctatatataataaggtgtcatttggggcaaagcgcacggtggtgtctatgtgtccatccgtatcatcacccaccaactttccgtagtctatccataaaatgcggttggcgtgcaatctgttgagcaacgttcgttctatttcttgctttgtcagcggttggtttctgtttggagcgagcaagcagagactggtggtcaggatggttcccttgccgtcgctctctatggaaccgccctccaaaacaaagtcgttataatctacatattcgccttttactgcgttttgcgctacaagttgcttgttgatcagattgtccttggaggcttcaaacttgtttccccaaccgttaaattggaaatctaagagtaggggagcagccttgccgtctttggacagtagggtgatgaagccatggtcgcgagcccatgtgtcgttgagaggacattctacgaacctaattcgttggcattcctgtgccgtgaagtgacgtttcgtctctgccacatcttgtgtgacaatgagcacctcctgatatcttgcaatcacctttgccagttgtatttcggtgtcaatgatgtcttgcaaatagggttgccaatcggtatgggcatgcggccatgtcaattgcacggctttttgcggctcccattcggctggcaggtagtattttacgtcttgtaaatccatttatagataaactatgcttttaataattgttacaaatatacatgaaaaaaatgagttgtggtgcgatttcttcaaaaacctatgtttggtgcattatatttttacgaatactcataccgaaaagaattgtcttttttaatattattatttggtagagatatacgttgtttttgtcctatcattttaccaaaaaacgaccatctaaaatctgcgaaatagaaaaaatcaataggcaaacgacatgcaaaaatggactgattttaacaaaatagatgtcttttcaagtcggaacattgatttaacggtcttgaaaacacacattagaggtgctattcacatgcttcagccggcttaaagcatgcaaatagtaggcttatctcaatgctttaattagcaagaaatggtaaaaaatagaacgaaaagagaaagcataatcgtaacattatcaatatcaacgggttatgaaagtcgctcatttctcgcgtatttgcgaccaactttggcgttggttgttttcacgcgagttatgagaggcactttgtaaagaaaattcagcatttaatttccttccatgcagcgttcctccaattattcacaccgatattcatacagaaaagaaacattcatgtcgtttttgtaagtttgttgactatcagtttgttttttttgtgtaaatttgccaatgtatgatagaaatcaaggatgccaccattgccgtagcaggaaagacgctgctcgaggattgttcttttattgcacataaaggacagataacagctatcttgggttgtaacagtgaggcattgactgcattggtacacgcctttatgggttttcttcctttgaataagggatatgtttccatcgacggtgaagaaataataccactctctgcatctttttttaggcagaagatagcgtatgttcctgcaaatttcgcctttgaaaacatgcaggtatctgaactcttgcgcacgctcatggggaattctctgtcaatgatgaaagagcagaagaaagcactttggaaagaatgggaagctttagccattgagagaagttgttatgatgcagtatgggagtctctccctgctgatgttcagcaacgcatcgtactatcggtggcaggaatgttagaccgaaaaataattcttatgaatcagccaactttgtatcaaacagaagaaaatcggttggtggttacctcatatataaaaagtttgaggtcagacgatagcgtcgtatgtttcactaccatggacgaggagagtgctcaggtggctgatgtaatagtaaaattaacaatgtaaagaaatggaaatcacgttcatgcaatatgtgtggggatttttgctgttgcttatcccgtgttatgtgttgtacctatatcattctaccttactcacaaggacagtgagagccaccgttaggatgatggggttactccttgtcttaggatttctgttgtatgaagtgatggtgctgaaccattggggtgtaacccttttgttcgctttgctcatggtggcgataggtgcggtactcacggtgagacgagctaagttgtcagttcggcagttgtttgtacctgtaatggttggtacgctcacaggcgtcttggtagttgggttttatgtcttgtggcttgtcatgggtgtaagaaatccactggaagttcgtttctttattcctgttgtcggtttgttgacggggcatttgatacaagtgaacagtcaggcgttgcacatttatttcataggattgcgtcatcacagccagctctaccattatctgttagggaatggcatgaaacattctcaggctcttggctatttgtttcgacgcaccatagagcgagcagcgcttcctaccatctccactatggggcggatgttaataggcgtatctcctattattttatggagtatgatgttggcaggagcaggcgtttttactgccttggctttccagttggtgttgttgatagccatgtttagtgcttcgatgatttctgtcattgtcacggtggtggtgtcacgcagatatttgttggacgattatcatcgattgaagggcgatgagccacatcaacaaacagaatgaactgttttgtttaaggatgcgtgacacttttgtgattgctccttgtcaatacttgtgctacgttacctattattaccttttcgtagagaattggttcaaagaaaaaatagagccaagaaggcattggtaaagctataaaagagaaaatgacagaatagaaaataaagttaaacaatgccttgggagttgcataattgagctaaaaacagtatctttgcagcatctaatcgaataatagcgtgaagataaaagaagtggtgagtgcccttgaacgattcgcgcctttgcccttgcaagcagattttgataacgctgggttgcaagttggattgacagaggcggaactatcaggggctttattgtgtttagacgtgaccgaaccgattgttgatgaagcaattcggcttggctgtaatttaattgtagcacaccatccgttgatattcagaaaactgtcgtgcatctccaaccaaaactatgtgcagcgtactgtcatgaaggcaatacagaaccacatcacaatagtggcgatgcataccaatatggatagtgctaagggtggcgtaaactataaaatagccgagaagttggggttgcaaaatttgtcttttataggcaaagagcaaattgttgacggagttacaggaggtgaggggattgttggaacctttgctgaaggactggcagccgatgatttcatctccctgctgaaacgtgtctttgaagtcgaatgtgtacaagccaaccaactattgcgtcgccctatcaaacgtgttgcgctttgtggaggctctggtgcgtttttgttgagtgatgctctacaagcaggagctgatgcgtttgtaacaggcgaaatgagttatcacgacttttttgacatggaacagcacattcaattagcggtaattggtcattatcaaagtgaacagttcacgagtgagatttttaaggagattattcaaaaagagtttccagaagcacattgctgtatatccagtatcaacacgaatcccattatctatttctaaaaccaaaacgtcattgtggaagaagaaatgtagtggtatattttgaaatacatagtatcaattattcaataacaacaataaaacatggcaaaaaaagatcctacagacttatcggtagaagagaagttgaaaactctctatgaattgcaaacaactctctcgtctattgatgagaagcgtgctttgcgtggtgagttgcctttagaagtccaggacttagaggacgaaacagaaggtttgactactcgtatggaaaaaattcagactgaaatagatgaatttaagaaggctatatctcaaaaaaaagctgatattgccaatgcggaatcgagtgtagagcgctacaagaaacaactcgatgaggtgaagaacaaccgtgagtacgacacgttgaccaaggaaattgagtttcagagtcttgaaatagaactctgtaacaagaaaattaaggaagcactcataaagatagaggaaaaagaagctgacttaaaagaaaccgaagcactgcttagtgatagaaaggttgcgctgaaagaaaagaaaggcgagctggatgaaataatgcaagaaactcgtgatgaggaagaggaactgaaagaaaaagccaaaggtttagaagtgacaatagagcctcgtttgctttccagctttaagcgtattcgtaaaaatgcacgcaacggattgggaattgtctatgtacagcgagatgcttgtggtggctgctttaacaaaataccacctcagcgacagttggatatcaagatgcacaagaaagtgattgtgtgtgagtactgtggccgtattatgattgaccccgaactggctggtgttgaggtagaaaaaacagcggttgaagaaaagccgaagcgcaagcgtagcattaggaagacaacaaaaaaagctgatgaagcttagccaaatgctataaagttggtggaggagtacactcgtcaaggttcgctaatatatgagtttcgacaacttctcccactcaatataaaaccaaggaaaagatggacagctttatctgacagtgttttgtcattcgtttggtaaagcaaaggcatcttttccttggtttattttgtgccgatttatcagcagaatttatacagtgacaccgcttgatatgggcaaaattttgtttgtagatggcaccttattggcgaatatctatgaggtaatttgcagtttataatcctcttgccttatagattttatcttttgcattgtttatttcttgaaatttcttttgcgcagctttgcgaacatcgtcccctaaggtagacactttgtcaggatgatgcttcaacgccatttgtcgatacgcattctttacctccacgttggaggcagaaggagagacgcccaacacacggtaagcagcttccagactggaagaactgtctttaaggttgagcattgagtctacatcggtggcagaaagtcccaaattgatggcaacttctttgagcacattgatttcctcggttacaacatggccatcaacttgtgccatgatgaccaagaaattgagcaattgtagacgttctggataagccatttggctacgtatttcgaagcatgcctgttgaatagtggattggaatcgttgccaccccatttgcttttgttgttcaaaaagtttcagaacaatgtcctctccttgctttacagcgatagctccaaagttttgacgtaagaagtttcgtagcaattccatttccgagtgcatcacctttccgtcagctcgaatgatataggaggcgagtgctaaaaacgaaaagaggaaagaattgcgttggcgttctgcttgcacgcgctgccattggctacctcgttggttggcgtgagactgtgtttgtccatgctcacgattttgataaggttcgttaacggcatctatttcattgtcaaaaagccatcctaaagcgaaccccgccaaagctccgagagcaccaccttgtaagaatccaagtagtccgccaatccattttcctgttgccatatatctgttgtataatgtgtttttagctttgtcttcatagttgaatgtgtttcattcagctacgagttagtaacccttcttgaagcgtttcttagaaagcacaaattcgttgttggtgatctcttccacgtcaagcgattgataagaaatgtgattatttttctgcccaacttcacacaaaaatcctattcgtccgtccttttgagctatcatagtggaataagatgaaggtccaggatgaaccaacatccctcttttccaatgggatgcaaactcgagagctgataggtgtttctttccaatttctttgtaaaagatgcccacgtttgtacgttgtggtccaaaaggtaccgattgaagagctaaatatgtttcctgaccatctgatttacggacgacaggtaaaaccaatatttccccgttgcattggttcttgatatgagccatgtcggacgccgtttgtcggctgtcccaatgaccttcaccttttttgatattggtaaaggtaaagatgttgaacattctaccttctgcgcgtgagcttagaataagactaccatcgggaagctcttcacattttacttcatcaccatctttgcagggagattcgtcgatattaccaagaactttccactgatgtccaaagtcatcgctataaacgatgaaattgcccgagagcgtgcacagacctgagtacaagcgaaagtatttgcctactttgacgtatctgctttgatgaattctgcccgaggtaaagaacaaagactgaattggaccttgcttgcgaccatcaaatagtcgataaatctgctctgtattctcgtgtcctttgtcccaagtctttccattgtcattactgcgaaacactgccactctgttaggattgttacgcttgccctgaaaataaaccgttttgccagctacgcaaacagccaacacttcgctgttggtgcggttggctaccaaaccacaatcgccaaaagcgtaatcccactgaatgcgattttcgtcgccatgtccgtcagcaagtttggcaatgggcgaccaagtattgccataatctttactgatacggtacactaagtccacagcaccataaccaatatcagaaccacaatagcggaaatcagaaaccgcaatcaagtttccatttctgcattgagcaatggcaggaatgcgatatgggatttcgttggctgaatctgtttcaaatagcaattgttggtgatgctggttgtcagaagcttgtataaaaagaccagtggaaagaaaccataaacaagaaatcaatctaaacaaaatcataagttgatgtggtatttgttatataataaattaaagatttaattttgataagaagtttatcttttgtctacaaaaatacataaaaaagttgagtatatgaacctttttcatgtaagtaaactcctttatttagaatatttaatgtgtagaatcgctcaggcggatttaataaatgagtttaagtttggcataatggcaggattgttagctatgaagacaaatgctgtaaaaggaagttgtttggcgtatctcatctattgtcagtacacaatctatgcccaaatcaaaaatcaagaagtagtaagagattcggatagattgatgcaatgacgaaatttgataacttgaatatagaaagagtttgcttcattaacgggagcaaactcttttaatagcaaataatctattatgatttctttcgtattatctcttagatgttttaatatgcaattttattttctttattgcccaatcgtaatggctggcagttgcagatacgcagtaagctccaagagaggaagtccctgtccaagcaagtgttcctttgataaagagctcatcgttggagaattgctctatcaatgccattatatctttgtgactctctcttaaatttgctttggctctctccagtggtgttttttggtgttttttccaaaactcaacattcattatcgggtaggttttccaattatatggttctggaagaaaaggcttatactcaccattactgttggtttgtacccaattcaagagcagctgatgccattcgtatagatgtacaagcacatctcgcaggtttttatccctgctccaatgagcttccttacctgccgtagccatttcatctgcaaaagttgctgtctgctgttcttcactaatactttcaatgagtttccacattttatcaaattgtccgttggcggaagttatcaaatctgcctttgtctttgctcgtgccatatattcttgttttagttgttatttatacaatacaattattaattctcgtgttatctctttcttggttattatgctatgaacttcaagaaaagcttttgtctctgtcaattttccaaatgaattataggtcacttcaagtaaatagccaactaattccttaaaatcaccactataactgttcgcaatcattttaagatttttcacaaatttacttattcatagtgagaggaacgaataaaaaggtaaaaaatgtcttttgcggatgctttatttctgataatcctcttacagtattaacctttatgactgttaggcttagagagataaacttcgctatcctctcatttgtaagagtacttatgtctgtgaaaattctatccgcagcataaagatcggcgtttggtcaatagtgattattgttaaagattttgatagttagggatgctatccaaatatatataatttttctgttcataattcatcttgcagcaatagctttcaataccattgctaacaattaaataatcgacatgaagtaagaaattataggttgagatttggtcaaaaactttctgtgtaatggggatatgaggcgctttatattcaataatcattctgggttttaatgtaagatcgtataagatactgtcaacgcgcaaggtcttatcggctatctttaacgaaacttcatttgctaaaagtgacattgggtaattcttgtgttcaatgagataatgaataaaatgctgcctaacccattcctctggagtgagtgctacatatcttcttcgaagaatatcaaaaatagtgggcttgtcctttgtaccccctaattttatttggtattggggtaggtttaatcgaaacattttagtaattttgcattcaaatacaaagttaataaaaaagaagaaggtaaaagagattagtaagaactttgtgaacatttttcaggtgattacttgagacgttttcaaaaataaattctgctgaacttgtttctctttttcattcttttatgaatgacatgccaaaagcaggagtcacatacgagtcagtaatgcgagaattaaaagctcgtcatttttcacctatatatatattaatgggtgatgagtcgtattatattgataaaattgcggactacattgctgagcatgttctacaaccagaacagagagattttaatcaaaatattatatttggagcggatgtcaacgctgcacaaattatagatctttcaaagggttatcccatgatggctgattatcgtgtagtcattgtgaaagaggcacagaatttaaaagatacggagctgattgctaaatatctcgagaatcctgttcgttctacgatcttggtgctatgtcataaaaatggtactattgatagtcgtaagcgacttataaaaaaggcagatgccttaggaattgtttttgaaagtaaaaggatgcgtgagagtgatcttcccaacttcatactctcttatctaaagaataaaaatattgctattgattttaagtcgagtgttatgatagcagatcatgtgggcgctgacttaaatcgtctcatttctgttttagaaaaagttcttatatctcttcctgaaaacgttcgagagattgatcctactttaattgaaaagcaaataggagtgagcaaagattttaatgcttttgaattgagagctgctttgataaatcgtgatatttttaaggcaaatcaaattatcaaatattttgacaataatccaaaggcaggatctatctattcctttcttccattactttttaattatttccaaaatctgatgattgcttattatgctccctctaaaacagataatgccgtggctcaatatttagagttgagagggggatgggctgctcgtgattatatgagtgggatgagaaattactcaggcaagaaaaccatgcagattatttcaaagtttagagagattgatgccaaatcaaagggtatcaacaacccaaatacgtcaacgggagacctgatgaaagagcttattttcttcattttgcactgataaacatactttttttgttactttttctctataatcaaacttttcttttccgccatttttgcccttaaagcccgatgtaataagactttaagtgtttttagtatgctcaaaattcgcatatttaagagcaacttgagggatggtccagaatatgagagttatgagaaaataagcattaattttatgctcacgatttcttattaacgtttattacagttttcgtttctgtatttttgtattctaaattatataaatgtatattttattttatcgttttgttgatttatgcttctatattctaaacaaaaagtagcttattgtacagattcaaatacgtaaatatatagatttagtttcctgtattcataattatacgtacaatacaattacatattttactatgataaccaataacttacgtgtgttttatcaagccttttacggtgaataggtacataaattgcaaaaagacattagaatctttgtaataaacactgaaaaatgaaacgtaagtgaaatgtaatcagttgttaccatttttacgttatacaaagttatatgactaaaagaacggtttatgtttatgaattaagaattcaaacactatcaatgtgttttggtttacaaacacaaatagtttacatttacataaacgaatttgctgtttgaaaatagtttaggaaaatgaattgtatgtccaatttaatgtttacctttgtaaaatcaacgaaaattagtgaattaacctctaaaagcaagcttatggacgaaatgaaggatagaattaggcaattaatgttggctcagcacatgaatcaacaaagttttgcagaggtgttagatatatcccctgcctcattgagtagtatttttaatgatcgaactaaaccaacacttaatcatattgatgccattaaaagtaaatttccttctataaatttagattggttgatgtatggaaaaggttcaatgtttctggatggcgattctcatgatgagctaaaaaactcaaatgttactactcaattacaaccaactttagattttgatgatacttcttctatagatacctacccttctacgaggcaagttgcatcagtacctcctatgagtacaaatcctgcttcttcatctcaacaaataaatatgaattttcttgacaaaaaagaacgaaagattactgaaattagaatattttatgatgaccaaacttgggagacttttgtacctaaaaagtaaagtgtgcaatctttttccttaattgttatgcttccttttttaatggttcttacgttccaatctcttcattgatgagggcattattttagtttctttgtttgtcaaacctcgtaaattatgttatctttgtatcgatttaagaagtgcagcacttagggtttgaaaagcttaactaatgaatacttcttttagtgccaatcagctttgaaactttggtgatgtttgtacacatatttatatatacagataaagttttatttgatgaagaaaatttgtgaggacttgcttgttcattctctcgagcaattaagtagcagacattggttaatgcgcctacgatcatcttcgcagcttccagagatgttgccagggcagtttgtgcaggttagagtggagcattccccatctacctatttgcggcgtcccatttcaatcaatatggtagattacgaaaagaatgagctattgctgctaattgcggcagttggtgagggaacccgacagttagtgcgcttacaaccaggtgaacgagttaactgcttatacccattgggtaacggctttaccatgccttccagtctcaaagaaaactgtctgctgattggtggcggtgttggtactgctcctcttcttttcttaggcaggcgaatagctgaaatgggagcgcagccaactttcctcttaggagcaagaacatccagcgaactcctcgaaaaagacatgtttagaaagtatggcgagttgtatctcactaccgaagatggctcggaaggcgagtctggcttcgttactggacactcaattcttcgtcagaaacgctttgaccgaattgcgacttgtggtcccaagcctatgatgctcgctgttgctcgttatgccaaaagagaaaatataacgtgtgaagtatcccttgaaaatgatatggcttgtggattaggtgcctgtctttgctgtgtggagaacacgacagaagggcatattagtgtgtgtaaagaaggtccagtgttaaatataaagaagttgttatggccactctaaatgtaaaaataaatgatattgacttcaaaaatccaattcttaccgcttcgggtacattcggatatggattagagtatgctgatttggtgcctttagatcagcttggcggcatcattgtgaaaggtacaacgcttcatcatcgggagggaaatccctacccacgaatggcagagacaccttttggcatgttgaattgtgtggggcttcagaataagggagtggattatttttgccgtgaaatctatccaaagataaaggatatcgatacccacatgttggtcaatgtgagtggaaacactcccgatgattatgctgcctgtgctgctcgcattgacgagttggacaagattcccgccattgagttgaacatttcttgtcccaatgtaaaggctggaggaatggcttttggtgtgacatgcgctggagctgccagtgttgtaaaagctgttcgacaggcttatcacaagacactcattgttaagttgtcgcccaatgttaccaatattgcggatattgcaatggcttgtgaggctgaaggagccgatagcgtttccttaatcaacaccctcatgggtatggcggttgatattgagcgtcgcaaacctgttcttagtattgcgacaggaggacttagcggtcctgctgtgaagcctgtagccctgcgaatggtatggcaagtggcaaaagcagtcaagattcctgtcattggactgggaggtatttcatcagccgaagacgccattgcattcatgatggcgggcgcaacagcgatacagataggcactgctaattttgttgatcccaccataacccttcaggtccgtgatggtattaaccaatggctggagcagcatggttgtgcttctgtaaccgaaattattggcgcattggacgattgacccagcttaatgttgcacatctcgttaatctgctgaatccatataggctctaaaaaacattttctatgaaaatacatgatacattgatcaccatagcctttgcttcttttttatgctcatgcgagagtgtacaaagtttggaagggcttgtggtggatgttcataatgtttctttagatagtgttttaatttcagacgatctgatgaattttcgtatgcgtacagattcgttaggaagatttaggtatatgataatgctacctacaacaagccgaggtatagacacaaaatttagtttttccaaaaaaggatttatagatcatagtcagacaattaaagtctatcgttctacgaaagttattgttgttatggataaagacacacctgaataaactgatggtacaacaatcatgggttgtcattattgagcagaccctaattagtcataccatcgttcatttgtttgtattgcggattttcacagattttacatgtcaaatacgaatatcatataagtacattctacaaccgcttattacaaccctgcaaaatacgtcttcaatacctccacatatttcatcatggcattacgccccgtgtctgtcatcttgcagatagttcggggttttacgcccgagccatctgtagtttttgatatatagcctgctgtgaccagtttatccagctgtacactaaggttgcctgccgtcgattctgtcttttctttgatatagttgaagtctgctttctctacattcagcagaatcgacattacggcaagacgcaactggctatggagtaatggatccaactctttcattattgttgcttttttgctttgaagttaaggatatgtccggggatgacaagggtaatgacaaaggacaagaccatcagttccatctgcataatacttataacttgttcaccagaaacaaagttgcgaagccatccagtgccaatcactacaccaagaagtccgcatatctgtatcgacttctctttgagtattacgccagaggtgtatgtgcctatacctggcaacaacatacccaacaaaaacattccgttccaactccttacttctccgaaatgtaaaaggcagtcaatggcgtagactgcaaacattgcacttataatagcccacactttatttatagtgttgcttgcataagtgcttgccacatgactcttgcgctttgccatgtaggtctttatacttgagactgcgaatcctgctatcggtatggccaagtaaagccaaccacattttgggtcgttggttgcgcgcagcatgacaattactgccaacgatattgcagcactaaggtagccccatataaggaaactgtcaccattgcctacagataaatccttctttgtctggtttatcattcgagtgataagctcaaggctctcctgctccgaaatcttcttctcttccattttcgttacgttattgcgacacacttattgcatatatcaagcgtgatgtgtctggttaaacatttagtttattttataaaccatctttggaaaaagagaagcaaggaggtcgactctcacttgctttagctagcattattctcttcgaacactgatgattacagttgcaaatttagataagtttattttataaaccaaatgatttgcaataaaatattcgacatttaacttttgtttacaatcggctgtgcttttgctatttgctcgacaatgcttagtgccatagccgtttcttctggcagatagaacatggctttgcgtctttgcagctcttcatagcgttgaaaggctttcttttcgtctttattatgcaatcaatactccgttaattctaatataatatcgtacatggcgatacaaagaaaaataaatgtcactcagatggaatattacggaacccattgcgagcaggtctactgaacgaatttcaacctcagccgggcttagtgaatcaattaggttcagtacaacctgtcactttcccagctttatctcaaattttaatgaactattgtccgcatgtatcattttttttgtaagtttgcaatatcgaaagtactaaatcggaagttatgaataaagtaaagattttgttgttctcgcttgttacaacgcttcttgtagcttgtggaactacacgtactgtacctatcacagggcgtcatcaaagtttgatggtgtctgatgagcaggtgcttagtttaagcaatcaggaatatcgtaagtttattgcgtctgcaaaactctcttcaaatgccaaccaaacagcgatggtgaagcgtgttggccataagttagcgaatgcggtagaaacttttttccgtacaaatggcttgtccaatgagttgagccattatagttgggagttcaatttagtggctgacaagcaagtcaatgccttttgtatgcctggcggaaagattgtcgtatatgaaggcttgttgccctatactcaaaacgaggcggctcttgccgtggtgcttggtcacgagatagcacatgctgttgcgcgccacagtgcagagcagatgagtgcgcaaattcgcaacaatgtgggcgttcaggtgttaggtggtgctttaggagcaatgggagtgggttctaccaccacgcaattggctcaaatagtagcgcaacagggcttacaattcagaagcttgaaatattctcgtgcacatgagacggaagccgacaagatgggaattatctttgcagccatggctggttatgatcctcgtgaggctattccattttggaaacgtatgtcctcaggacagcaagcacatagtgacatgttcagttcgcacccctctgacagtaagcgtattgcagctttagagcgtgagatgcctacagccttaacctattatcatggtcatggcaagactgctgcacctgtcttgaaaaaaagtacaaaacaaagatttaagtcacagtctaattcgaacgtgaagtctgtttctgtttccgatttgtataagaatgctcaataatacgcatcaatatttcatggattcgcaaggagtcgagtcttgaatcattgttctatgcgcaaccgttatattcaactatggtagaccttatcatctgccatagttttttagttttatgaacctttcacacattcctaattatctgcctacagtcaactcaaaaagatgcactttttgtcatgttatttcaaaatttaagatttctcttttagaaaagagacaaccaacgaatagcccttcctccgcagttttagcgattttttgtaagaacgataccgtaaaaaatggaaaaatctcttgcactgtccaatcaaaataattatctttgtcaaaagagcaatcatttcctcatgttggaagttttttcttactcaaggtatgacttatctcttcaatttttatagtatttcaaatccttaaactaatgtttgaatatttatcgcaacatttatggctggtctggattatcattaccatgctgtgcttgattatcgaactgggatcgggcgatttctttgtcacttgttttgctttgggggctcttgtcgccatgattagcgcactggttgacttgccgatatggcttcaggtcattatttttgctgtcggttctgttctcagcatcgttttcattcgtcctcccttgttacatgctttacatgcttctggcgagactcgagtcagcaatgccgaggcactcattggcaggaaggggacagttgtcgagactatccatgacaatggcagcggatatgtccaaatagacggtgatgtgtggaaagccgtcagcagtgatttgtcacaaattgagtctggagaacgtgtccgtgtcatcaagatggatagcatcattgttacagtggaaccttgtctataaaaatcatagaatattaatcaaagcaataaattatgatagcaacttacgtattagtagcaattgtagtcttggcattaatctttgtcaagcaagcaattatcattattccacagtctgaaaccaaaattgtggaacgtctcggaaagtattatgccaccctgagtccaggcattaatatcatcattccctttatcgatcgtgccaaaacgatagtcaccatgactcgaggacgatatatttacagtaccagtatcgaccttcgtgagcaggtatatgattttgacaagcagaatgtgattaccaaagacaacattcaaatgcaaatcaatgcattgctgtatttccaaatagttgatccattcaaagcagtttacgaaatcaacaacctgcccaatgccatagaaaagcttacgcaaacaaccttgcgtaacattattggtgaacttgaattggatcaaacgcttacctcgcgcgacacaattaacaccaaacttcgtgccgttctcgatgatgccactaataaatggggtatcaaggtgaaccgtgttgaattgcaagacatcacacctcctgagagtgtgttgcaggcgatggagaaacagatgcaggcagagcgtaacaaacgagctaccattttgaccagcgagggcgagaagcaagctgccattttgcaatccgaaggcgagaaaaccagcactattaaccgtgccgaggctaccaagcagcaggcgattctttatgccgaaggtgaggcaacagcgcgcattcgtaaggcagaggcagaggcgattgccattcagaagattaccgaggcagtggggcagagtaccaatcctgctaattacctcttggcacagaagtacatcgccatgatgcaagagttggcgtctggtaaccaatccaagacagtctacttgccttacgaggctaccaacttgctcggaagcattggaggtataaaggatttgttcaagacagaatagagattcaatgttgtttccgataaatcaatgtggaatgaagcgaaaataagcaaacccagtagcttcttccatactgcgaatatcgtatttttttaacattgagaataagataatttggcagagtgatacagatgataggctcatcgttcgtcactctgccacatctttttaatagagattcgtccacatagcgaatataggtgggaaagcttgaaacagatgatgttacgcattgctcttggcaataatacgggcacaccattataatgttgctttctggaatacgcatgcttcagcagggtggttcgctttgctcaaacatctaaacagaccagaacatatccgcagggggataaagaagtctgtggctttaccccaattattttaagtggtgaaaaacacacagagaaagacttgccattgctcatcaagaaatatagattcattgattttgatgaacctgtatttgattttgccaaagggtcatgtaatgacgtagtcatgggaatttgtgaaaaaataaggaatacaaagtattggaacttacagctgtggcaaggaaaatgtgagttagcaatggcggtattgttcatattttcaaaggcaaatttcaagttttttttgtgttatccgttgcaagtgagcaaattaaagtctaactttgtagaaaaatattgcaatgaatatctgtatcgtagcaggggcacgccccaatttcatcaaagtggcacctattataagggctatcaacaaagcagctaatgagggtagggatattacttaccaactggtttatgcgggcagggaggacgaccctacactggaaaactcactcttcgacgacttgcaaatgccacgtcctgatacttatttagatgtagattgcgacaatctcaacgagcttacagggtgcgtcatggcaggttttgagcattatttgcaaagtcatcccaccgatgttgttattgttgtggacgacttagcctcgacattagcagctgctatcgtcaccaaaaagcaaggtattacattggctcacttggtggcaggcacccgaagttttgacatcaatatgccgaaggaaatcaatagattggtcattgacgggcttagtgatttgctctttaccgctggaatgaaaagcaacagtaccgccactcgtgaaggagcagagcaatcgaagatttatttagtgggtaatatcctcatggatacccttcgttacaaccgcaatcgtttacaacgccctacaatccttagtcagttaaatatcgaggatgggtcgtatctcgtctttacattgaatagaaaggcattgctgtccaatgaagaattactacgctcattactccgtgtgataggcgatagatgtggtggcagaaagattttagctcccttacgtggtcgtgcagcacaggtcgtaaagagacttattggtaacgattacccagcctttcaattgatagaaccccttacatacttacaatttggctatctcacagcccatgcttgtggcattattaccgacagcggtaatgtggcagaagaggcaacgtttcatggtgtgccctgtatcacgctcaatcggtacaccgagcatattgagacagtgaaggaaggctctaatgtcttggtgggcgaggataccactctcttggcacaagccatggatcagatggtggcaggagaatggaagaagagttccatacctgataggtgggatggaaggagtgccgaacgtattgtacaaatcttattagaacacaaataaatcttacaacttacaagccctactctgttagcaattcatttcactcaacaggggagggtttttcaaaatctatttctatgattgcatttattacaggagctaccagcggtatcggtcaggcttgtgccttcgcatttgctaagagtggttatcatctcattctaacaggtcgcaaacaagaacgtttagaagcgctaaaacaagagttagctgccttccctatccaagttttgtgcctttgttttgatgttcgtcatcgcgaggaagctaccaaagccgtagagtcgcttgacgaaaagtggcgtaacattgatgtcttgatcaataatgctgggttggcgttaggattggaacccgaatatgaagggagttttgatgattgggatacgatgatagacaccaatatcaagggattactcacgatgaccagattgattgtaccaggtatggtggctcgcaatcgtgggcatgttatcaacataggttctgtggcaggagatgttgcttacgccaacggcaatgtgtattgtgctaccaaagccgctgtcaaggctttaagtgatgggctgagagtggatcttgtggatactgctgtgagggtgacaaccatcaagccaggattggtacaaaccaatttcagcgttactcgctttcatggtgaccaagaccgagcacatcatgtgtatgagggcattcagccactcactggtgaggacattgctgatgtggtgctttatgccgctcaagctccccaacatgtgcagatagccgaagtgttggtactggcaacccaccaagctaatggattcactattagtcgtaatccagaccgaaaagaatccttatcctaaccaaaggggtggttgtgtccctatcgcaaccgtgtctatgccatcaaagcacgatgctggggtgacaaagtaggagcaggggcgtgtctttctcatcgtccgctgctcaccaaaatttgtgaatatcgtatgctacagcgtagagacaattataccttcctgacgcaaggacccattcggcgtgtcattcttaccatggcagtacctaccattgccagcatgctggtgacgagtttttacaatgttgccgatacctattttgttggaaagattaacactcaggcggttgcagctgtgggcattgtgttctctgtgatgttcgttatccaggcattcagtttcttttttggcaatgggtctggcaattacatggctcgcgagttgggagcgcaacgacggcatcatgcccaaatcatggcgtctactgcctttgtctacgccattgcttcgggcttggtcatcatggtgataggcttgctattcttagagcctttgtcggtgtggctcggtagtactcctactatccttccttataccaaacgatacttaggcatcattttgttaggtgcccctttgatgacaggttcgttgtgtctcaacaatcaaatgcgctttcaaggcaatgcatcgtttgccatgtggggcatcgtttcgggggctattatcaatgtaggtctgaaccccatctttatttttctgtttgattggggcatcacgggggcagctttggctaccgtgctgggacagttgaccagtttcttggtattactgtacatgactcgttatggcggtagtatgcgcatcagttttcgttacttctcgttctcttggatctatgtcaaggaaattttagctggtggtacaccttctctgtcgcgtcaagggctcaccagtgttgccagtatcttgttaaatgtggctgctgcccaatatggtgatgctgccgttgctgccatgtctattgccaatcgatttacaatgattgtcatggcatcggtcattggattaggacatgggttccaaccgttttgcggattcaactatggagcacacctatatagtcgtgttcgacgtggtttttggttcagtgtgcaggttggaacctgtttcttgttggcttgtagcgtgttaggttggatattttccgatggtattgtggagctgtttagaaacgatattgaagtcatcaatattgggacgaaagccttacgctggcaattggtgtcgttgcccgccatggcgtttttccttatgtccaatatgttgatgcaaaccatccgtaagacgttccgtgcaaatctgctggctgcatcgcgcagtggtcttttcttcattcctttggtagtaatattacctcaattcttaggtttgcagggcgtgctgatgagtcaggcttgcagcgatatttgctcgcttctcattaccttgccattgctgtatgttacgtttagggagttgacgcaggcgcaaaagagcgatgccacccatcggacatcttgataaggttgcaagtgcatggcatgatgtttgtggtaaaagaataagccctcacgtgagcaaaacagtctgtttttcattgtaaaacagtctattttggagtacaatacagtctgttttgcccaccaaaggcatgcaaattcgtggcttttagcaatgcttttcccttgaaatagcatgggagttaaattcatgtcggtttgttgttatcttagtgtattgaaatgtagagattttcgttgttagttcatatttgacgtatttgtgacgagaggctcaaaagtttgagaatacggatagcgtcaagcggtgtgttatcaagaaaaacgccatcatccaaaagctcaatttttatttcttacatggggctggttcatgagtaggcatgcttcttaagccgtaggttggttagaacgaaccaaaaatacaaacgccatgcatggcatttacaaactaattcactaaatttgcaggagatacttcatgctgtttgaaggaaagagagaaatgagatgaagaatcagcaaaagtcattgaattccgataggaaactaacatctgtcggcggaagtgtgttgtacatcaagaacatggtgtgcgaccgttgcatcatggctgtgcggctgttgctacaaaggatgggtatcgcacctcaatctgtagagttaggggtggtaagattagctgaagagctcagcaaagaacagttggaaatgcttcaaaaagatttgctgcaactgggctttgaactgcttgacgacaaaaggcagcaaaccatcgaccgcatcaagaccctcattgtcgatttggttcattatcatgacaaccgctccgagctcaacctctccgactatctggcacaacagttgcacagtgaatatagcagtttgagcaagctctttagtgagtttacaggtatcaccattgagcgttatttcattctgcagcgcattgaacgcgtcaaggagcttattttttacgatcagttgtcgctcaccgaaatagcttataaactcaattactcgagcgtagcttatctgtcgagccaattcaagcaaatcacgggcatgacaccctcgcaattcaaggcattgaagaaaaacatacgtagaggattggacactatctgatatctttttttataattttcttccaaaattccataacacgctttgtggataaaggatgtatctttgcagtgttcaatcaaaacatagaacaatggaaaagaaaacatttacaatcaacggaatggcttgcgagcattgcaaggctatggtagaaaagcgtttgtcgtgtttaataggagttgagtctgcaaaggttgatttggcgcatcacactgctgaagtggcttatgatgaggagttgataagtccaaaggagatgaagaaggcagtagacgaggcaggttacgacttccaagtgggataactctttacacatttagcttgctaacttgtcaactctttaactcagtaacccgtcaactatttaacacaacatgatgaagaaaacaattccagtagtgggaatggcatgtgcggcttgttctgcccatgtagagcgaacgctcaattccttgcaaggtgtaaactcggcagcggttagtttgcccggtagaagtgccttggtagactatgatgagcatgtgatttcgcccgaagagatgaagcgtgccatcaataacataggttatgacctcgtgatagacgaagaacaatctgtggaagcaatagagcagaatgaatacagtctgctgaggcgaaaggtcatcctctcttgggtttttgcggtgttgtgcatggctgtatcgatgaggtggattgatttaggggcaaaaaatatcgttaatcaggtggcgttgcttttggctctcgccaatttcttatgttgtgggcgggcatttttcatcaacgcatggcgacagttggtacatcgttctgccaatatggatacgttggtggcactttctacgggcattgcattcttgtttagtgtgttcaatacttttgtcggcgagcaggtttggagcagtcgaggcatcgaatgtcacacctattttgatgcttcggtgatgattatcacctttgtcttgacaggaagattgttggaggaaaaggctcgaaatagtgctgcaagcagtatacggcagctgatgggactctctccaaagacggcacatttggttcagggagacagcatacaagaggttccacttgccacaattaaaataggtgatacggtagaagtgcgtgcaggtgagaagataccagtagatggcattgtaacatcggcaacaagtttcatgaacagcactggtgtatatgtggatgaaagtatgataacaggcgaaccaacgccagtattgaagtgtgaaggcggagacgtcttggcaggaacagtggtctcgcaaggcaagtttcagttcaaagctcgtcaggtgggtgagcatacagcattggcacaaatcatacaaatggtacaacaggcacaggcaagcaaagcccccgtgcagcgtattgtagacaagatggcactggtgtttgttcctgtagtgctgttgttggctttgcttacgtttgttttgtggtgggttgtaggtggcaacgcattgttgccgcatgctatactgtctgccatttcggtattggtcattgcttgtccctgtgctatggggttggcaacgcctaccgcactaatggtgggaatgggcaaggctgcacagatgaatgtactcatcaaggatgctacagccttagaagccttgcgaagtgtagatgccatggttgtggataagacaggtacactcactattcccaaccagcaaatagactttacagaggcagatgatttatctttcgaggcaagagaaaccttgaaaccgcatgctcgtgaagccatggaaatattgcaaaaacaagagaatatagcagtatatatgatgagtggtgaccgtcacgatactgtaaaatattgggcagagcgtgcaggtatatcgcatttttatagtaaagtgctaccccaagacaaagagaatttggtgcgccagttgcagaatgagggcaaaaaggtagccatggtgggcgatggcatcaatgacacgcaagctttggcattggcagatgtgagtatcgcaatgggtaaaggaaccgatgtggcaatggatgtagcacaagtgaccttgatgggtgatgatcttaggcgcataccgcaagccatacgcttgagcaaacaaacggtacagatgatatggcaaaacttgttttgggcatttgtttataacttgagttgcattccgttggcggcaggagtattgtacatttttggcattaactttcagattacccccatgtgggcaagtgttttaatggcattttcaagtgtaagtgtggtgctgaatagcttgcgattaaagtacaagaagtagaagttttttaaggctttgcaaattattttggcactggataattatattggtcaaagtaagtattactattgttgggcatccacccacgttctaccgacaattgtatgctgaacgaaggattgaaatgatatttcacagccgctcctaagcggtcgcccattgacgtcatatcgtagagagggcggaacataggcatggtttgatgcagtgatttttgaccatagagataggcttcccaccgttcattgaaccgataacccaatacggcagacagtcctgcatcatgatatgactggtgactccacctgagacgattgagatagccgcccactgccagtgataaattcttgttcaacggcatggcatacattgccgatacactttgtgtaaagcctgctccgctcggtgcattcttaccaataaacccgaaaacagaagcccctaaattcacgtttagcccttgatgcaagtcccaacgataccagccagtaccgtaatacggataccaatagttggatatcacttgcccttgtaggttgagtgttggcaaatgaagtgagtcgctgtctgtgactggcaatgctggcaaatagccattcacctgcggttgggctgatgcaccagcagtatgtggctgaacaagggtagcagtgtcggtcttttcggttttcgacggtaactgtttcttgttttcttgcgcacctataggcatgcaaaatagcactatcaaggggagaatataccacttcttcatggtgagcaaagatagatgattgtgcctatacaacaaaacttttaagggtaattttattttaattatcaattgttattttgattctctgcttatttatgctatttttgcgacaatcttttaaatgatacgacaatgaagaaaataaggtatatcgtggttgttctgttattgggagcagtcacgaacgtgtcggcgcagagccaagataagaaaaaagaaccttttgaagaaaaggtgtcgaagtttttgaagaagaccaaaaaagagttggaacaagctggtcatgaactcggtgatgctattgggtttgatgacaggataggtggaaagtctgacttgctaaaagtaaacggttctttttacatgcccttgtacagcaaggatctgtataaaggcgaggatgcgttgacgtaccgcaaggcctgcacgcagcagtttagaaagaaataccccaaggtaagcatccagtcggtgaccattccacaaaaagaatgggtactggagacggttgaaaaggatggcgaactggtgggatatcagcgtacgctgcattgtttcattatcgcccgtgacggtgatgaggggtatgtcaatgccaaatttacctatcggcagtataaaaatgtaggacaggagtttcagaacgtgaagggctggtggccgaaatgggagcgtaccgacttcatgaccaactcggtttacgaacaacttttaaaattataaaactatgaatttcttgaagtcgctgtttggaagcaaggctgaaaatgaggaagaaaagcgtcgggaagaagaacgaaagaactttgaaacactgaaatacgatggcgtcagagcgttacaaatgagccaaatagaacaagccctacgctgttttagtcacgccttacagctgcatgatgatttggagacacgtgattactattcacaggcattgatacgaagcaacgatttgcctggtgcctacgcacaattgcagaagatggtggaggcagaacccgacaatatgcagatttatcttcgtatggcggatgtggcatatatgatggaaaactatgttgccatgggcaatacctgtgagaaagccatgcttgttgacagtgaaaatccgcaggtgttgtatcgctatgctaaggcctacataggtcgtgacgaccttaccaacgccattaccatgctcaccaaggccattatgttaaaccccaaagcatacgaagcctatctcttgcgaggcgaaacgctgttggatacgggtgatttggacgctgcggatgaagatgcaacccttctgttagaacatttggcagacaacgaagacgtgctgattttgaaggctcgcatcgaacagaagaaaggcaacaaggctgaagcacttacctattataataaggtaattgacgtgaacccattctcgatggttgcctttcaggaacgaggaccgctcaggatagagctgggtgatgagcaaggaggtagaaaagacgttgagatggctcaggagatgactactcaattggttgccaatcaggtaaaagctgttgctgatgagggtgtggagcagaaagtgaagcgagcctacaagaacatggacccatatggcgttttctacaattcttgatacatcgtcttgaaaaatataaaaaatgcaagttattttaatgatttcttagcaaaatgtttgttaattacaaaataatataatatatttgtaagcaattaaaaagagaaaaaatatgttgaactacgtgtacgcatctttctattacttctatctttactttacaaatacttgtgaagcggaagtttgtgtgccatagtcaattcaaaaaaataatcccatgaaagccccgcttcactatatgtgaaagcggggctttcgcttttaatacctcatagaacagataaggagatgaagagaaagcaaaacaattcttcctgtcaacatgaggtcgaaaaggctaagatgatgaagtttgaacgataagttcgtggtctaactataaaatcaacaacaacatgaacattcaacctgcacagcgtgtgaaccaaatacaagaatattatttcagtaagaaactgaaagaagtagcacagctacaagcctcgggaaacgatattatctcacttgccataggtagtcctgatatgccgccttctcatcaaacggttcaaaaactttgcgaagtagccaacgacgtttctacacatggctatcaacccacctgtggtacgccagaattgcgccaagccatggcacgtttttacgaaaagtggtatggcgtgaggctcaatccacaaaccgaaatacagccactcattggtagtaaagagggtattttacatgtaacgctggctttttgcaatccgggtgatgccgtattagttcccaatccaggttatcctacttatacttcgctgagtaaattgttgggagtacaggtactcaattatgacttacgagaggagaatgcatggcagcccgactttgcagagttagaacaaatggatttgacaaaggttcgactgatgtggaccaattatcctcatatgcctacgggtggcaatgcgcaattggagacgtatgagaaattagtggtatttgcaaaaaaacacaatattgtgattgtcaatgacaatccttattcgttcatactcaacgaccatcccttgtcaatcatgcaagtagagggagccaaagattgctgcatagagttcaactctatgtcgaaaagctttaatatgccagggtggagagtgggcttgtgcgcatcgaatgcaacgtatatttcgtggattctcaagataaaaagtaacatagacagtggcacctttcgtggtattcagttggctgcagctgaggcatacaataccaatgacgaaatgtggcattatataaataatgtgaaggtgtacaaagagcgtcgcaagatagcagagaagatcatgcaagttttgggctgtagctacgatcatgcacaggtggggatgtttttatgggggcgtattccagccaaatatgaggatgccgagcaactcaccgaacgtgtgttgcaccagtcgaacgtttttatcaccccaggatttatatttggtagcaacggaaaacgctatatccgaatatcactttgtgccaaagaaacaaagatgaacgaagccttgatgcgccttcaggcaatggcatggtagacggttatgatgtaacaaagtcttcaaaataactgggagaaattgaacaaaacgagcaattagaaatatttatatggataaaatatttacctttgccattgtgtcaaaggtgatagaaaatagaaaaatgaaatggaattagacttattaccactcaatttacaaagcgatgtaaagcgtccttttgtcattgcgggaccttgtagtgccgaaacggagcaacaggtcatggagacagcatggcaattgaaaaggaaaggatgccataattttagggccggtgtgtggaaacctcgcaccaaacccggttgtttcgaagggaaaggagaggaagccttgtcatggttgagacgtgtaaggcaggagacaggcatgctggtgtctaccgaggtggctacaccacagcatgtagagttgtgcttaaaatatgaattggatttcctgtgggtaggggctcgcacgacaactaacccctttgccatgcaggctttggcggatgcactgcaaggagtagatatacctgtgtttgtaaaaaaccctgtaaatccagatttggagttatggatgggagccatggaacgtctcaatagggcaggtattcaacgcatagcagccatacatcgtggcttttcaagttatgaaaaatctatgtatcgcaatctccctatgtggcaaattcccatagagttgcatcgccgcatcccgcagcttccaatcatttgcgaccccagtcatatgggtggaaagcgtgaactgatagctccactttgccaacaagccatggatttgggattcgaaggactgattgttgagtcgcattgcaaccctaatgctgcttggagtgatgcaaaacagcaggttcttccagaggagttagatgccattttgtctaagctggtggtgcgagatgaatatacaacaaccgatgatttgcaaattttgcgcgcagaaatagaccagttagacgaccaactgatgaatttgttgagtaaacgacttcgcatttgtcgtgaaatagggcagtataagaaggaacacaatttaaccgttttgcaatcaaatagatacagtgaaatcttagacaaacgtggaaagcaaggtgtgcaatatggactgtcggcagagagtgtagcaaatatctttgaagagatacaccaagagagcgtgaggcaacaactgaaaatcattaattcataatatagttgacaagtttatgagtttacgagtttacaagttgacgaggagacaagtaaataaacttattgcttataagactatcaactggtgaacttgtaaactcgtcaacttgtcaactatattatgaattatgaatgatgaattaaaaacaaactatgcgaatattagtaatgggtgcaggtaagatgggaagtttcttcatcgatctgctaagtttcgaccaccaagtagcagtatacgaaaaagatgcccagcgtatgcggtttacttacaactgtcagctgtttacttctttggcggagattcgtgattttgaacccgaattggttatcaatgccgttacggtgaagtacacgattgttgcgttccaagaggtgatgccgtatttgccaacagggtgtatcttgagtgatattagttcggtgaagacaggattgaaagcattttatgactcaactccccatccttacgtgtctactcaccctatgtttggccccacatttgccaatttacaccagctaagtcaagaaaatgcgattattattagtgagggtgactatatgggacgcatcttctttaaggagctataccgtggattaggattaaatatctacgaatacacctttgacgaacatgaccaaacggtggcttattcattgagcattccatttgttagcacctttgtctttgctgccgtgatgaagcatcaagatgcgccgggaacgacctttaagcgacatatgcaaatagctcgtggggtgttgaacgaagatgattacttgttacaagaaatacttttcaacccctatacacacgaccaagtgtcgcagatacgagaggaattaaaagaacttttgcaggtgattgatgacaaagatgccgagggaatgaaaaaatatcttactaaaataaggcaaaatatgagagaagatttgtagctttgcatcgcaaatcaacttaaaagctaaaatatatttatatcatgtggttctatcacgttgttgctttcctaacggtagcgatatgggggtctacttttatctccaccaaagtattgatacaaagtggcatttcaccagcagaggtgtacacattgcgtttcttaatagcctatgtgctaatgttattgttttttcataagcatatttttgctcgtacatggaaagatgaattgctgatggcaggactgggattgacaggcggaacggtgttcttcctggcacaaaacgtggcgttgggttactcaacagctatgaacgtgtcacttattgtgtgttcgtgtccgttgttcaccatgctgcttcatcggatatggttcaggagcgaaccgcttggtaagtggcaaatcattggtacagccttttcgtttgtggggatggcagcagtagttctcaatggtcaattggtgcttaatctttctccactcggtgattcgttggctttgttagcttgtatcagctgggcagtgtattcgctattgctcaaaaaagccaatgagaaatatcctactaccttcattactcgtaaggtctttttctacggtttgctcaccgtgttgccttattatgctttcgaaccaggatttccaagtatcgagacattgatgcaacctaagatattgtacaatctcttgttccttggagcaatcgcttctatgctttgtttctggttgtggacgtgggtgatgttgcgcttaggagcattgcaggctactaattatgtgtatgtgaaccctgttactacaattatctttgcagcatggatattacacgaggagataactgtttattttgttgtgggaacggcattgatactaacgggtttgtatctaagtagccgaaaacagcctttacgtttcggaaaatccatataatggagtagcgatgacgtatgtgttgagcctgttgttaggagtattcacagtggtggaactgaactgtgaaaaccttttcgattgtcaacacgatagtctgaagcatgatgaacagtttctgcctacctctgattatcattggacctcacatcgctattggactaaggtaaaccgtatagggcaaaccattctttcctgtggcgagtctgccaatgggtggtcgctgcccgatatggtgggcttatgcgaggtagagaacgatagttgcctcgttgcattgacccgtcgttcgcttttacgtcatgctcggtatgagtatgtgatgacacattcgcccgatgagcgtggcattgatgtggcattgttgtatagtccattctcgttccaattgcttgattggcatgccattcctattcatcctgttaaggatatgcgccctacacgagatgtattgtatgcgaagggaagggttgtaacgggtgatacgttgcatgtcttcgtggttcatgcacccagtagaatgggaggagaatcctttacccgaagtcatcgacgaattgtgggcgatattttgttgcaaaagattgattccatacggtcagtatctacccaccctcgcatcttggtgatgggcgacttcaacgattattcatctgacaaaaatatcttgaggcttgtccaaagtgggcttgttgaagtgtcggcaaatgcgaaaggcacacacggagcaaaagcaacttatcgctttcggggcgagtggggtagtttagaccatatctttttggataagttttctgcggcattggtacaagaatgttatgttcacgatgcgccattcttgttagagaaggatgaaaaatacggaggagtgaagccccgtcgcaattatcaagggccccgttatctcaatggttttagtgatcatctgcccttagtgatgcgcattagctggcaaaagtaaaggctgtggcgcatctcttttggcgtttttctatttttattcccttgttgtatgaaaaaatagtattacttttgtagcgtatagtgggaacagacacatgcggtttgtagagcttgttccaagagaaaataaattcatactctccaatggttatacaaaatagatgcagaattgtgcatagaaatgaagaggaataacagaaaacgataaataaagctatgtttgagaatttaagtgaaagattagaacgatcattcaaaatactgaaaggtgagggaaaaatctctgagattaacgttgcagagactttgaaagatgtccgtagggctttgttggatgccgatgtgaactataaggtagcaaagaactttacagataaggtgaaggaaaaagccttgggtatgaatgtgcttacggctgtgaagcctggtcaattgatggtcaagatagtgcatgatgagttggctgagctgatgggtggtgaagctgtaggacttcagttagatagcaaacccgccattatcttgatgtctggcttgcaaggttcgggtaagacaaccttcacaggtaagttggcgaacatgctgaagactaagcaaaagaagaaccctctgttggttgcttgcgacgtatatcgtcctgctgccatcgaacagttaaaggttgttggcgaacaagtgggtgtagaagtgtacagcgagcttgataataaagatgttgtcgctattgcacagcaagccattcaacaagccaaagccaaaggcaacgatgttgttatcgtcgatacagctggtcgattggctgtcgatgaggagatgatgaatgaaatctctcaactcaaaaatgccattcatcctgatgaaactttgttcgttgtcgactcaatgacaggtcaggatgcagtgaataccgccaaagagtttaatgaccgattggactttgacggtgtggtactcaccaagttagatggtgatacgcgaggtggtgcagccctctctattcgtacagtggttaccaaacctattaagtttgtaggaactggtgagaaaatggatgccattgacgtattccatccgtcgcgtatggcagaccgaatattaggcatgggcgacatcgtttctttggtagagcgtgctcaagagcagtttgatgaagaagaagcgaaacgcttgcagaaaaaaatacaaaagaacaagtttgatttcaacgacttcctcaagcagatagagcaaatcaagaagatgggtaacatcaaggatttggctgccatgataccgggagtaggaaaggcaatcaaagatattgatattgataacgatgctttcaaaggcattgaggctatcattaagagtatgactcccaaggagagaacgaatccagaaatactcaacacctctcgcagacagcgcattgcaaagggcagtggcaccaatgttcaggaggtaaaccgattgataaagcagtttgaccagacgcgtaaaatgatgaaaatggtgactggaaacaaaatggctggtatgatgaatcgaatgaagggtatgcctaaaatgtgattataacaaagaacgaaataaatagtaaaacgatgcaaaagattgacggaaaagcaacagctgctgctatcaaggcaaagatagctgaagaagtaaaacaattggtcgccaaaggtggcaagagaccacatttggtggcagttttggtaggtcatgatggaggtagtgagacatacgtaaggaataaggtgttggcttgtgaagaatgtggtttcgagtctacccttatccgttatgaggagaatgtcacagaagaagaattgctgaagtgtgtagacaagctcaatcatgatgataatgtcgatggctttattgttcaattgcctctgccaaaacatatcaatgaagagaaaatcgtgatggctgtggactataagaaagacgtagacgggttccatcccattaatgtagggcgaatgtccatagggcttccttgttttatctcagccacaccattaggcatcatgacactattacagcattacaacattgatacaaacgggaaaaaatgcgtgattctcggacgaagcaacatcgtgggtaagcctatggcacaacttatgatgcaaaaagcgtatggtaatgcgaccgttaccgtttgccacagtcagtctgttaatgtcaagaaagagtgtcgtgaggctgatatcgttattgcagcagtaggcattccaaactttgtgacagccgatatggttaaagaaggtgccgttgtgattgatgtaggcaccacacgcgtgcccgatagtacacgcaaaagtggcttccgactcaatggagatgtgaagtttgatgaggtggctcctaaatgtagttacatcactccagtgcctggtggcgtaggtccaatgaccatttgttcgttgatgacgaataccttggcagctggaaagaaagaatattaccgataatggttgctcttgcttagtcttattaagcggagactatccattggctttgtcaaattttgagtttggtttatatgactgtaagctcaaaatatgacaaagccaattctttttgaactaactaaaaaacaaagaataaaagaacttaaaatagggcttgatttctgaatgtatgtcaatttaacctcttgaaatgtaaaatattttccggattatttgtttatttacgttttttttctttactttgtacatcgtataatcataatatacacattatttattataatttgaaaagatgaaaaaattaggattacttttaacagcagctttcatggcagcatctgtttcagcacagaccgtgacagaaagcaaatcgtatgacaatgtttacattggcattaatggtggcgtagcaacaaaatcgactggtcatagttggatggataatcttaaccccaatgcaggtctccgtttaggtcgttatttcacacctgtatttggattgacagcagagagcaatgcttacttctcaaataagccctacgaatctactggcacagctgtcagagcattaaataccagtttgttgggtacagttaacctcagcaattggtttggtggttatcctggagagccacgtggatttgaggttgtaggtctcttcggttatggatggggacacctctttggtaatacagaggcataccaccaaatgaaccacgataacttaacttcgaaagcagctattgactttgttttcaatttgggttcaaacaaggcttggcagttttatgtagagccagccattgtatgggctctcaatggagatggtacacaacctattgagtataacttgaataaatcattcacacagcttaactgtggttttgtttataagttccctaactctaacggaaccaataactttaccattgccaaattgcgtgaccaatctgaaattgacggtcttaacgcccaaatcaacagcttgcgtaacgacttgagtggtaagaatgcacagctcatcgacaaagatcgtcagatttctgacttgcaaaaagcacttgatgattgcaacaaacgcaaagcttatgtaaagccagctactgccaccaacctgcaaccaacggttctcttccgtgttggccagagcgttgtagaccgttctcagatgccaaacgtagagatgattgccaactatatgaagaatcataaggatgccaagataaccatcaagggttatgcttcaccagaaggtcctgcagagctgaaccaacgtctgtcagagaatcgtgctaagaatgtcaagaacttgctcgtagacaagtataagattgctcctaaccgcttgacagtcattggtatgggtgtgacagataagcttttcaaggaatatgacttcaaccgtgtggctacattcaacgatgacactaatgtagaataacatttgcatttattttatagtacaaatcccgatgctctctgtgagtatcgggattttttaggtctttatcgtgcttgcgggtcacgaattcttcttatctttgtgctgtctaccaacttttggagggcaaagacgtatatccacaacccattaacatcctacatatgaaccatcttgatactgttggtcgttacaccttcttagcagaacctttccattgcgatttctctggtcgattattcctttcgcatttaggcaatcacctgctcaatgcagccgactttcatgctcacgaacgaggtttcggcatgacagttttgcagcccatgcacaaaacttgggtgctgtcgcgcttcgccattgagatgaacgaaatacctttggcatacgacaagtttgaagtggaaacgtggatagagcagacgatgaagtggtttacctatcgtaatttttccgttcttggcaaaggtggaaaggtgtatggatatggccgaagcgtctgggcgttaattgataccgacacgcgacagcctactgacattcttgcctttgatgacggacgggtcaagcggtgtacagatgccaaatatctgtgtcccattgatgctgtttcgagagtcaaaatgaccgacaatattcaacgatggcatactctcgttacaacatatagcgatgtggacatgaatggacacatcaacagtgtaaagtacatcgagcatttgttaaatctttggccgatgacctttcatgccacgcaccccatcaagcgcattgatgtggcgtacgtcgctgaagcctatggaggcgatactttacatttcgatgtcgagacgttgggcgagctcacctatgcggtgcgcattataaggcaagcaaaggagcagtctgcggagcaggaggtgtgccgatgcaaggtgcaatttgccgagacactccgtccgaagaagctgtagttgaggacttattttttcagaataatctttacaaagggttctccatatttcgcatatttctgaacagagtctcacttgttgcaaaatatcgtagtattttgaaagtttgttaagtagcagtcaataaatgagttacaaggatatatcgttgagaaagccctaaaaactcattgtttttgtgccttatcacagccttttagcccatttgttacatgcactttgtgcctctatttgcatgttatagcgccattaactcatgtatatagccagttaaagtcatgtttccaagataaaaaagcgatattttacgattttttgtccccatattttttctaaaacagcacattcagaagtgttaaattttggcactttttcttgacatttctccaagcacataaaggcatcttccgttgctccccaacggttggctcattgtttatcttgcaactttcagtgtagatattcggtctcttgcgtaaaaaaccgtatctttgcagtagcaattggttctgaatgaatcagatgaaaagggaatcgggtgcaaatcccgaacagtcccgctgctgtgagcagtcgtttttggacatcacatcgtgttgccactgacattttttcgggaaggcaagtgtatgtccggctgcgagtcagaagacctgccgttgctattcatcgctattgtgtttcgcggaaagccaatagtacactgtcgatatagttagatttcatgccaagagtagttattatactgctttgttcagttgcgtttttgcatgccactgcccaaaccgattctttgacgcatcgggtgcatacgttggatacagtcatcgtgtctgaggggcaacgcatgcgaagtatgcgaagcacatcgcccgaacacgtattgcagcacagcgatttgcagcgcataggggtatccacgatggcggatgccttgcaccgtttaccggggattaccttgcgtgattacggtggagcgggtggcatgaagacggtgtcggtgcgtggcttcggcacacagcacacgggggtgagctacgatggcgtgatgctaagcaacatgcagacaggcgatatcgacctttcgcgctattcgttggcacacgtgtcgcaaatcatgctcaccataggcgacaatgccgacatcttcatccctgcccgacaagccactacgcctgccgtgctgtccattgaaaccatgggtggcagtcgtgccgatcgtcgtccacatttcgacgcgcaacttggggtagggtcgtttggctatcttcatccgtcgcttcgctacgagcaaaatgtgtcgcaacctttgcgcttttctgtcattgccgattatgtttctgccaacaacaattatccttatactttgcgcaatggcacgttgaaaacacgacagacacgcagcaacagcaggatgcagggtggacatgtcgaaggaaatgtggcttggatgccaaaaactaaccaactgctcaaggtcaaggcttactactatgacaaccaccagcagctgcctggggtggtgcgctattacgccaacgagagtagcgagctgctcgatacccgcaactactttgtgcaaacacaatatctgtggcaggtcaatcgcttttttagcatgaaatggctgggcaagtgggatgagtccaatacctcttatcgggagagtagagcgcatagtggtcctatggatgccgactatcatcaagatgaagcctacacatcgctttgcttgttgttcagtccagacaagcattgggcgttgagttatgccgccgattatgcctttcaccagctgcatagcagtttgacgaccgacatacagccctatcgacacagtgtgtggcaaagtttaactgcaaaatatcacttgcaaagactgacagcacaagctcggctgttgggttcgttgtatcagaatggtgcacgtgctgggacggctgccgacaaccaaaagcgactcagtccgtcgttgtcgttgtcatgggcaccatttcctcatcaacccctgtacgtgagggcatcgtataaaaacatcttccgaatgcctaccttcaatgagaattacttcttcagatatggcagcaaagacctcaaacccgagcaaaccgaccagttgaatatgggagttaccgttgacaagtcgttgccccatgtacagttgtgggctactttggacggctatctgaaccgtgtgaccgacaaaatagtggcagtgccttacaatctgtttgtgtggcgaacggtcaatgtgggtaaggtgcgcattgtgggtatcgacgccatgctgcgaaccacatggcgtgccaatgcccagcacaccttgatgttgatggcaaactacagttatcagcgtgcagccaatcgcaccttggcatcgtcaccttattataattatcagatagcctatgtgcctctacacgctggcggttgttcgctcaatgcgcaaaaccgctggctcaatcttacgttgcaatgggtgggggtaggtggaaagtggctcaacaaccagcatcatgaagggtcgtacctaaaaggatatcaagaatggagcttgacggcataccgcacgtttcgggtgtgtcagcaaccattgcagttgcgtgccgacctcaagaatatttttaatcagcaatatcaaatagtggcaggctatcctatgcctggcatccatgcagaaataacaatgaattataaattttaatcactcaaaaatgaaaaagtatttattaagtttggcggtactcctgatgggagttagtttgtttacctcgtgtgaggatgacgatgatgacgtaaatccacaggatttgaaaaaagtaacccatgcggcttatgtcgtaaatgcaggtcagcaggcgacaggttccacaggaactctcacacgtgtggacatgggtacgtggactaccgcacagaatgtgttcagtcaggtgaatgggcgtaatcttggagtaacggccaacgatgctattatctatggttcgaaaatgtacatcgtggtagacggtgaaggctcggtagaggtggttgataagaataccctacgttccattaagcgtatagaactgcaaaaactcatacgtgacaataagggcaagtcgcctcgtcgtgccgtggcagccaacggttgtgtatatgtaaccacctttggcggtgtggtggcagccattgataccgcgagtcttggactgaagaaaacgtatcaggcaggttcgttctctgatggcattgcctatcacaacggcaaattgtatgtctgcaacagcgactatggcaggggaaaaggcaacctgtcggtgattgatgtggcatcgggcgatacaacaatgattgtcaacgagcatctcaccaatcctgtagcagctaagttcatcggttccgacctttatgtattgcatgctgggagctacgataagaattggaatcagacaggagcaggggtcatgaaagtggttggcaagcaggtcaccaaggtgagcgatgctaccttaatggcggtgaatgacaaaagaggggcagaaaaaatctacaccatcaatgcgccctacaccaacccagccacacctgtaacctacaacgtgtacgatgtgcgttcgggcaagaccgctacctttaccaccactaaggtggaagcaccatcggctatggcggtagacccagttactggctatgtctacattatgtcatacaagttgaatccagagactcattatgctgattatggcggtgcaggctatgtaaacgtgtacaacgcatcgggcaagttgctgcacaccttggcaataggagtaggagctacgggcatggtgttcgactaccaataaggctactcgaaagggatagggcgcctgtcgtaacgcaactgtcctaaaatattctcactcgccacctgaaacatcacggtttcgggtggcgagttgttgataggggtggggttgtgcaaatgcgcttgtcaatttgttcgtttgtgatttgttttcgttatctttgcagaagataggctgcacctcaacatagaaagtaaactttctctgtcttcggcttgcgcaatctttgcaaaaaagtaaacttgaacaatcttttgatatgaagaaaacaatcttgatgagcgtatgcctgtggttgcttgcagccatgggatatgcgcagagtgctccaaacatggcaaattacagtgtgattcctttgccacgacaaatcaatatggtgaagagtaagggctttgtgctgacccctcaaacccgaattgtgtacccagcaggtgacagtgtgctgaagaaagatgccgaattgctggcatcctatatctttgaactcacgggcatgcaactcaaaatagcaaccagtgccaccgatgcacacaacattgagttgtgtacggggttgccacatcccaataaggaggcgtacagcatgcgtgtttccgcagaaaaaataaccattcagggagcatctgccgctggcactttctatggcattcagactttgagaaaggcaattcccttgaagtgtcatatggataagggaagatgtgagaaagaggacgggaaaagtaagaagtgctgttcagcaactgaacagaaggatttgctgccttattcgtcagggattgtgtttccagcaggcgagataatagattatccgcaatatgcttatcggggtgccatgctcgatgtggcacgccatttctttggggtagatgccgtcaagacctttatcgacatgcttgccttgcacaacatcaataattttcactggcatttgaccgatgatcagggttggcgtattgagataaaaaaatatccattgctgacccagaaggctgcattccgacccgaaacggctatcggacacacagacaagaaggatggcaaaccccatggaggttattacacgcagcaacaaatcaaggagatagtgcagtatgctgccgagcgtcacatcaacatcgtgcccgagatagatatgccaggacacatggtggcagccttgtcggcttatcctaagttgggatgtacgggcggaccgtacagcgtacgcacagagtggggcattgcagaggaggtgctttgtgccggcaacgacagcaccttgcagtttgccaaagacgtgattgccgaggtgatgcagctctttcctggtccgtatatcaatattggaggcgacgagtgtccaaagaaatcgtggcaaaactgcgccaaatgtcaggcgaagattaaaagtttgggacttgttaccgatgcacagcacaccaaagagcagcgtttgcagagctactttatgaccgaaatggcgaattttatcacccagcatgggcgcaaggtgtgtggctgggacgagattttggaaggtggtgtggcacctaacgcaacggtgttgtcgtggcgaggcattcaaggagccgaacaggctgcacgcttggaacacgatgccattatgtgtcctacctcgaacatgtatttcgactattaccaaactgaggacagagccaacgagcctgtggctttcaatgcctatctgcccattgagaaggtgtatgctttccagcctgttcccacctcgctgacgccacaacatgcagaacatatcattggtgtgcaagccaatctgtggaccgaacaggtagcaacgctatcgcacatagaatatatgatgttgccacggttggcagcagcgtgcgaggtgcagtggtcgagcgagcaggagaaggattatggcagcttcttacagcggttgcctcacatgctgcaactctacaaagcctgcggttatcgatatgctgaacattatttcacggtgagcacggtgctgacaccatcgcccaaagggcaatccatggaggtgactctcagtgcaccagggaaggcgaaaatctactacaccactgatggaagtgagccaaatgagcaaagcaaaccgtacaaaaagcccttttgcctcaagcgatctgctaccattaaagccattgcttatagcgatagtctgcacagtgatgtaaccaaggagcaaatcattgttcataaagccatgatgaaacccattcgtttttgcacgccacccaaccatgcttatcaaggaaatagtccacaagagttggtgaacggattgctgggtaacacttcgtttcactctggtcgctgggtaggattcgtgggaaacgatatggacatcatcatcgatctgcaacacaggatgcccattaagagtgtatcggtgcgcacactcaccgaacaatccaactggatattccccgatcgaggcgtctcgttattggtgtctgacgatggagagcatttcaaagaggtgtttgtggatactaaacaatcgcttccgcacgttgtgccacccagtgtaaacacacagaagataacgcttgaaaacgtgagagcacggtatctacgcatcaaggtgttgtccgaacacagtatgccccaatggcattatggctatggacagaccgctttcttgttcgtagacgaggtgatagtggagtgagctaccccacaaaagtggcaagtgtgttgcatcaaaaagtgacactcttgcaactttgtgaatattgtttgcgtcttatgtttgaatgtgatgaggaacttatcgcataaaataaaaaatataagacacgtaatatttattattcatccataatacgaaccgtatgaaaagaaaaatctatagtacattagcagttttcacactcttgctatttgcatcgtgtgcttgcacaaaaagtgatagaaagagcgaacggaaaatcacaaagtcgagtaaaatcaaatattttaagaatgtgaacatagaaggttgctataatgtttattttgaacaagccgattctgcaagcattcgttttgagggaagtgagaaagctatccaacaattaagaatcacatgtgatggcaacacgttggatattaagaggaaagaaaaagacaagtggttgaatttttgcaaccaagaggatgttgatatctacatcacatctcccgatttggtttctgtttacttaaagggtacgggcgaatttgaggttcataagcgtttagatacagatacgttgtctgtgtcattaatgggtacaggagacattgatataaaggatttgatttgtgataaggtgaaggtcaatctaaaaggtacgggcgatataaacattaaaaatgtaattacatcacaagcgtttgtttcgctcttgggtacaggagacattaaggtgcattttgaaaaatgtcagtgggcacagtgtagtttgcaaggcacaggagatattgatgtgtcgggaacggtaaacacatataaagagaaaatacaaggcactggcagtattgacaccgataacctgcacatcctttctaaatagagaaaagcaaagcagaaaagggcggaataattgaaggttccgcccttttttcaattatatatcttacctttgcataagataggctgcgcctcaacaaagaaagtaagctttctctgtcttcggcttgcgctacctttgcaaaagataggctgcgcctcaacaaagaaagtaaactttctctgtcttcggcttgcgctacctttgcaaaagataggctacgcctctacaaagaaagtaagctttctctgtacatatattaaaatagaaaataatgaaatatgctatcatagcagcaggtcaaggatcaaggttaagtaatgagggcgtgtccttgcctaagcctctcgttaaggtgggaaacgaatgtttgatagaccgactgctacgtatctttgtagcaaaccatgcggacgaaatcatcgtgatttgcaacgaggagatgaccaatgtgcaaactcatttacaagcgatacaacaaaaaggactaaatggtgagcctattacgctgaaaatattgataagaagtacaccaagttctatgcacagtttggctgaaatgcgccctttattagaagatgcgcccttttgtttaactacggtagatgccattttcgaagaagatgcatttatgacctatgttcaggggtttaagaaagccttgcaacagggtgtagatgcctatatgggtgtgactaaatttgtggacgatgagaagcccttgtttgtagaaactgatgagtcaatgcgtgtattgggctttcatgatgagggtagtgttcgttgcaaatatgtttcggcaggcatttacggactacatccgcatatcttcgacatcttacaacgttgcattcagcgtggcgaacaacgaatgcgtaattttcaacgagcactcatagccgagcaatgtactgtaatggcgcacgacatgggacaggttttggacatcgaccatttgtcggatgttgcaaaagctgaggcgtttcttcggaaattaacaagccaaacaaaggataaatatcaagagttggataggtagatttgaaaaagattttgaataacaatgaagcatcaaaatatcatagccattcgtcgagattacatttattcacttgaagcagaacagaaggatagggacatccttgttgctgtgatgcaacagcttggtggggacattcgaatggttgatgaattgaaactcacagtgcaggatgaggctgatatttacctaagcatgggacgccatccagccacattggcattacttcgtgcgtgtgaacagcgtggttctctcgtcatcaactctcccgatgcagtggagttgtgtgcgcgaaaaaaagtggcgcaggttatgcgagaaaacgatatacccatgccaccgcagcggggaaaacatggctattggctcaaaaggggtgactcgaaggctcaattggatagtgatgtggtgtattgcaaagatgaaaacgaattggctattagaaaagaagaatggcgacaacgaggtatttgttcgagcatagaaagcgcacatgtagaaggcgacttaatcaaattctacgggatagggcaacattttttcaaatggttttatcgcagtatcaagacagggggctatgattttgatgcaaatctattgcaaaccgaagcagttagacttgctcgcatcatcgacattgatgtgtatggaggcgactgtgtggtgaaccgagaaggagaaattagtattatcgactttaacgattggccaagttttgccgcttgtaaagaagaggcagcgcaggccatcgcacaattagtaaagcagaaatgggaagatttaaggaactgttaaaggcttcgatgaagtcgaaagataccgaagagtggctcgatgtgcactttacacgtcccatagggttggtctttgcattgttatggaaacgtcttggtgtgcatcctaacgctgtgactattctttctatctttcttggaataggggcagcttattgtttttatttcgtagatgtgtggcataatgtgtgcggagtgctgttgcttatgtttgccaacttctgcgatagcaccgatgggcagttggcacggctcacggggaagcacacttttatcggtcgtatgttggatggttttgccagtggactatggtttgtgggcatctatgtggcacttgccttacggatgcaacaccagttgatgcctggtacgacagtgccatggggtgctggaatatggacattagcgctcgtggcaggtgtgctgtgtcatactacacaaagctcattgggcgattattaccgacagatacacttgtatttcctcaaaggtaaagagggtagcgaactggggcactccaaacagcaataccttatttacaagcatttggataagggtgattggctgaaacgtcttttttatctcaactatacgtcttattgtcgaagtcaagagcgaagaactcctgcttttcaaaagttctttcagcgttttaagttacatccagataacactgtaaggcagcaattcttagaaggtagcagacctcttatgccgtacaccaacattctaaccttcaacacacgagctatctgtttgtatgttacttgtctattgaactgtccttggctgtattttatttttgaaattacggtgttacagttgatttatatttatatgcatcagcggcacgaaaaattgtgtagagagatgatttcattactttcaaaatctgcaataacgcaacaagccaaccaatcatgataacagatgttatgcctcctattcacgctttactctttgattttggtggaactattgatacgaatggtcaacattggggaaaaatgttatggcagatgtatcaaaaaataggtgttcctgtgtgtgaggatgattttcgtaaagcatatgtctacggagaacgaatgttagaaaaaagtcctttggtgaagccaacggacactttgcgcaggacaatagaagtgaagttacgattggaattggaacaactgtgcatgatgggagtgtggaatgtggacgaagcggaactgctacacacccaagagttgttgttatcggaaatttatcaacatgtgacgcagattatagatcaacatcggaagatgttacagtatttgaaagaaagatttccaatgggtttggtaacgaatttttatggtaacatgaatacggtgttgcaagagtttttgttgggcgatatattcgaaaccgtgatagaatcggctacggtaaacatacgcaaacctgatgtacgcatctttaagatggcacttgatgcactccaactgcctgctgaagaagtgttggtgattggtgatagcttttataaagatgtagaacctgcttcgaagttggggtgccaaacggcttggctcaaaggtgagggttggatagaaaagcagtacgatgaaacccttccaacttatatcttaacttccttgtcggcgatagtatctattgtggacgaagcttcaacaacaaaaggttgatttttgtggtcgtaatttgagtaccgaatgacctcagcggtgtttgctttctgtggtttcttcaatgagttgacaagacagacagtatttatttagaaataaaggtgttatatcaatttattttggctttatccctcgctggcgagataaatatagcttccctcaatgacgatgatttcttcggcaactaactgttctaaaacttggtctaagagtttttcaggaaacgctaacttatcaagctcggtgatatgatgtctttccttatcttccagtccatgaagaatagtttgtttgatttcgtttgttgtgatggcgcaatttcgttgtaaaccttggtctaaacaaacatcgcatctcaagcagtcttttgcttgtacatcaccaaaatagcgcaatagctgcttgcttcgacatacttcattgttttccgcataacgaatcacagacttgatgcgcttggaaaattgttctttacgctcttcgtagaccgcttttggtatcaccatgttttcaattgcctcgcggtctttcgcataagtgataaagggcatctttcgttgaggaataaagtggaggattcttctttgcgtcaatccttttaagataaggtacaactgttcgcgggtgatacccgtttgttgagccaaaagtgcctcgtcaatgtacacatagtcagtgaaaagtcccccgtatgtacgtaatagactggtgattaccttttcttgtagtggggaaacctgattgagtttgtataattcgtttctgtcaagaagaaacattactcgagcattggagtcaggatctgtatcatattctatgtagcccgcacgtgacagaatgagcaaagcggagttcacaggaatgggaaaataatggaagacggcacaaaacttcccaatgtcgaaagtaaaggtgtgcccacttccgcttcctaagcctatttcaaaataataagctaaatgctgatacacatctttaatatagtctttttcaggaaaattgtcttcgattcgtttgttgagtttatgcttatcactggtgttatacaacaagacagcgtaggaacgttgtccatcacgccctgcacgtccggcttcttgaaagtaagcttctaatgagtcaggacagtcgatgtgtatcaccacacgcacatctggcttatcaatgcccattccaaaagcattggtagccaccatgacccgtatctgatccgtttgccatgcacgctgccgttcatctttcacgctgtgttctaacccagcatgataataagtggcaggaatatcacaagcgttgagcagtgttgcaacttcctttgtgcgttttctactccgtacataaataatggcacaaccagggagtgattgcaagatatgtagaatttcttgatttttgtcttgtgctgttcgtaccacgtatgtgaggtttgaacgttcaaaactcatctggaagacattcttctctttgaagcctaattgttgttgaatgtcctcaactacctcgggtgtggctgttgcagtgagtgccaataggggagctgctggcttttcttttcgtatatcggcaatgtttagataagctggacgaaagtcatacccccattgactgatacaatgagcctcatcgacggtaatgaaactgacgttcattcgacgaagtttcatcaagaaaagctctgatcctatgcgttcgggagagatatataacagtttgatgtcaccaaagatacagttgtctaaggtcttgagaatctctcttcttgtcatgcccgaaaagatcgccgccgctgtaattcccttttctttgagatgttgcacttgatctttcatcaaggcaatgagtggcgtgatgaccaagcatatccctggctgtgctaaggctggtacttgaaaggtgatagacttgcctccacctgtgggcataagacctaaggtgtcacgttgttgaccaatgctctcaatgatttcacgctgaataccgcggaaatctttgtatccccagtattgctgcagaatgcttaagtatttgtcatgaacaggcatggcgtcatgtttgataatcttcaccttcggtaggtcgtatatcttcaatctgcaactgcacggcattgcgcttaaagacgttgtcctccagggtataagcaatgtcaaaactgcgtttggatttgatgtatcgtgccgatgcactttgtccaaaggcaatgccattaacaacgttgctcgatttggagtcgaccagttccagtttaatatgctcctgttcgcgccctaccaccttacttgtaccatagtcgtacacaccgattgtactaaacatgggtttgggattgcctggtccaaaaggtgagaatttctttaattcttgatgtagacgtttggtaatatccttaaaatcaatgatagcatcaatatcaataattggttcagtctgttcgggacgaatgtgttcatctacatatttttgaaaacgagtgcggaatgttttaatatcatcccaacgtaaggtcagtcctgccgcataggtgtgtcctccaaaattcaccaacaagtcacgacaactcttgatagcagcatagatatcgaagcctgttacgctgcgtgcagacccagttgcaaattctccatcacgtgtaagaacgacagtaggtcgaaaataaatttctgtcaatcgtgaagctacaatcccaataacgcccttcttccaattctcatcatagagaacaatagaggaatgatgcttttggctttctaatttagagacgataaggttagcttcttcggtcatctgcttatcgatatcttttcgttgctcgttatattcgtcaatgtgtttggcttgtcgtatggcactcgcaatatccttttccaccagcaagtcaacgctttcttttccattctccatgcgtccagaggcattgatgcgcggtcctatcttgaagacaatatcgctcatagagatgtctctgttgcctaaattgcagatatctataatggctttcagcccaacacttgggttttggttgagttgtttcaatccatgaaaagccaagatacgattttcatctaccacaggtacaatgtcagccgatatacttactgcacaaaagtcaagcagtgggatgagtcgagagaaagggatgttgttgtttttggcaaatgcctgcatgagcttaaagcccactccacatccagagagatgcttaaaggggtaggtatcatcgggtcttttgggattgagaatagccacagcaggcggcattacttcatctggtacgtggtgatcgcaaatgataaagtcaatacctaaacttttcgcgtacgcaatctcatccgttgctttaattccacaatctaaaataataatcagtttaacacctgtttctcgtgcatattctaaactctttttgctgacaccataaccctcgtcatatcgatctgggatgtaatagtctatgttagagtagaactgttggagaaacttgtacaccaatgctacagatgtacaaccatctacgtcgtaatcgccatacaccaaaatgcgttctttgcgccccatagcatcgttgagtctgtctaccgccacgtccatatctttcatcaagaaaggattaataaggtctgccagttgtggacgaaagaacctttttgccgcggactcagtagtaatgcctcggcggatgagcaacaaagcgagtatggtgttgatatttaatttatctcctaactccttagctgcctttgtttcttctgatgtaggtggtacataattccatttgaaatgcatttatattgttttttatttttgtcgagtcgtactcgcatgcgttcatacgagtaatggtcttcataaaaatgaagacttatttgtgtgtaaagttacaaataatttaccataatgcatcgtaaatgtcacaaataatttgcatccttccccagcaattcttaaaaaagtgtctggtcatgtgcattcttcttccatgtaacttttctgctttgtccttttcgcctcatgtgtttactgaagaaattagctgtctgtccatgtgttgaagcattggcataaaaaagaaagaccattcttcctatgtggaaaaacagtctttcttatcgtggtttcaagatcaacttgaagcattatttagatatttaatttcttacggatatttgcaggaacagcattcttgtttaccatgaaatccatggttttgtaagcaacgaaagcttttgtcatgtaccaaatacctttgtacttgccactttcgccccaagagttctttaccatgtaatattctttaccgttttggtccttggcaataccaaagatgtgcatgccgtggtcatcggttgtctcccaattatcgaatgcttcttggcgcatctcttgagtaggaacaacttcaggcgcattgatacctaatgaatctgctttggctttctttgaggatttagacatcttaacccaacggtcagcatctgttccagacaaatcgcgtgctttcttcaaatcgtaagcaatacctaaaccattgcgtgtaaatccatcttcagaaacatctccgccccatgctacggtataaccattgttgatagcgttgtcaatgatgttgcaaatctcttcaataggaacgttccaactcaaaggccaacgccagttgtcttgtacctcaaccgcaaattgtgtccagaagggatggtgtgtgtagctggtgaagtgtacataatcgttcatatccaagcctaaacttgccgcaaacgattgtggtgtataggtttttccttcgtatgtaaatgtgtcaggagtcttgccaaggtaagcatcaagaattcctaccattccttttttccatgtagaagaaattttcttttgcttacttttagctattgtttcaacataaggtgtcaagagttcaaagaattcgccaaagttagccaacgagtcacctgtcatcgtgccaggtaatggcattgctgtttcgggaaccatgccatagtgttgccaacaataaacagggtcgtatgtgctacctccttgtgcaaaactcacatcaccatgcatacgtacagccttttcagctcggtcttggtatgtcttgtgtgctacgaacatctcgcataggtcgtacgttttccctgtcttttttaagatttcactttccaagaaactcaatgtagagtaagcccaacacgtaccgctacggttttggtctttaacacttgtaatcttgttttgctttacaacagtaaatactggctggttgttttttggggcagtctttttcttagctgcttgtgcacccgttgccataatagccaagagggcgaacatcaaaattttcttcatgtttttgaatagttttaataaattatttagttgaattgttagccataaatgcttctacatcttttggatggtagggtatgcgctgctcaccaatgaaacgacatccgtttttggtaattaggatatcgtcttcaatacgaatacctccaaaatctttgtaggtttccaaaagttcaaaattcaagaactctttacagtgtccagatgctctccagtcatcgatgagggcaggaataaagtaaataccaggttcgtcggtcaccacaaatccctcttctaagcgccgtcccatgcgcaaggcattggtgccaaactggtcaaggataggtcgtgtctctttgtcaaacccgacatggatttgtcccaaagcctccatgtcgtgaacatccattcccatcatgtgtcccagtccgtgaggtaagaacatggcatgtgctcctgcacgcacagcctcttctgtgtcacctttcatgagtcctatttctttgagtcgctccgtcatgagcttgcatacagagaaatgaacgtccatgtatttcactcctggctttgcaacttcgagagcgtggtcatgacattcctcaacaatgctataaatctctaattgtcgttgtgtaaatttgccactaacgggatatgttcgggtgttgtcagaacaataattgttcaccgtttcagccccagcgtcacacaatgccaaccgtccagactccagtaagttgagcgaaggactgccatgcataatctctccatgttgggtaaagatggttgggaagctcaccatggctccgtaagagttggcaatgccgtccacctgtccacccacaaacttttctgtgacacccggtttggtaaggcgcattgctgtggtatgcatgagatagcctatcttggcagcacgttccagctcttctatttcttgttcttctttgacagagcgcatcttgacaaccgcatgaataaggtcgagggacgacttttcttgctgttgactgggatgaatgcccaacaagtcatatatttggagtttgatgtcatgtcgatacggtgggagaaaatgtattttttgctgcttctcctgtgcacgcttacagatagtagcgagttccttcatgggcgctgtctgctctattccaacctgcgctgccatatctttaacactatcaactgacccgaaccaaacgatatcttcaatgtctatatcgtctccaatcagtttttcttgatcgttatcgatatcaataacccccaccaatccgtctctgttttgtccaaaatagtacaaaaaagaggaatcttgcctaaaaggatgatacccattgtacggaccattagcaggagagttgttgttaccgaagagaatgatgatgccatgaccaacttcttttttaagttgtgtgcggcgtcttatataagtttgtttgtcgaacatataataatgttttatagaattaatcgtttctaatcatgctgaatactgtttgtaaatgtgtctgtcatagccagttagcagcaatcatcgagataatatagttggatttcaaggtaaacagctcaaatctgtttatgcttgttttccactatttcatgcaaagataataaaaactgatgaaaaatatataactttgtctcaattaataagtaatttatgcaaattgatagaaatacaggattagtactcgaaggtggagggatgcgtggagtgtttaccagtggtgtcttggatgcctttatgaagcatgatttgtattttcagtatgttgttgctgtgtcggcgggagcttgcaatggtatgtcttatatcagtagacaaccgcgtcgcgcacgtttctctaatatcgatttgttgtccaaatatgattacataggattgcgccatttggtgactcaagggtgtatttttgatcaaaaactcttgtacgataaatttccaaatgagtatgtcccatttgattttgatacttatttctcgtctccctctacctttgaaatggtcacaactaattgcttaacgggtttaccagcttatctgacagaaaagcaaaataagcaacgagcattggatattgtgcgcgcttcgagtagtttaccctttgtaagtaagattgtagagatagaccaaatccccatgcttgatggcggaatcacagattctatccctgtgattcgctccatggcgacaggtcatcataaaaacgtcgtaattttaacgcgtcaaaaaggctatcgtagtactgagcgagatagaaagattccccatttcatttacaagaaatatccgcgtcttcgcgtggctcttagtcgtagagtagcggcatataacgaacagttggaattagtcgaccagttggaagcggctggacaaattgtctgcatacgtccacaagacccagtgaaggtaggacgtatggaaaaagatacaaccaaactggagcggttatatcaagagggatatatgttgggagacgacttctgtcaatctcaggtcagttaaaaatgaaatgagcgttcgtccatgcttcgtcaaaagcactactgcaaacgccaagaatcattctttgtggtgacaaccttatcccattgaagaaagctgcgcacttgtctatttctctttttcgtttagataaaacagcgcagccccaatggctgtacagaattcactgtatttgggattgataaagttcacgccatacattttctctaacccactgaacaccattttacattgaggaagtaaagtaaggttgccaatgagtacataatctttgatacccgaccccaaagatgctaaaatcgtgctgctgccaatggtttgtaacaccatggtgatgatgcccaatgcaatgtcctcacgcgaagcgttgctcttggcatttccaaagagggaagcagtagccgtcttgggtagattgggaagcggttctggactgatatcaccgatacgaacatcgatatttgaggcatcgcctcgcatggcaagcgaggaaatttgtcggatatcatccgttttcagcatgatgcgtgacaagccgatgagggttccacccccaatacccattccacctatgtgtctaatgtcattgcccttacattgtataagactggttcctgtacccatgctcacaacaatcatgtcctccaagtcggtctcaaatcgggctcccaaaccgttgcagataaactcttctgccttggctgtcggcaaaccgtaaacggagctgtcgacataggcagcgcccacacctgtcaacatcacctgttcaacatcgttcagttgtatgttgttgtcatgcaaatacttaccaaatgcaccatagagcgacgtcacggggtcggtagccttgatgcgaataggagctactactgttccgtcgtcattgatacctacaatcttggtggtgctaatccccacgtcaatgcctataactattgccattttcttcttttattggtactaatcttctgcaaagattgcgcaagccgaagacagagaaagtttactttctttgttgagacgaagcgaatcttctgcaaatatacaacattatcaataattatttgtaaatttgaatcataataaaatgaatcacatgaaaacagaagttacacgcgtagtggctgctgtcgtccaacgtggcaagcgctatttatgtatgcaaagaggtcgttcacaatattcttatctttccgaacactgggaattccctggtggaaaggttgaagaaggcgaatcagaccacgaggcattggtcagagaaatcaaggaagaaatggattgggatgtgtttgtaggacgaaaaattggagaggtaacgcacgattatcctgatttcaaagtctctattacagcctatctctgcaaaggaggcgatgaggactacaaattattggagcatatagacgacaaatggctatctctcgaccaactgaaatcactcaactggaccgaggcagaccgtgtgctgattgagcggtttctgtcagaaaaggaatagaagatacctcaacactcctgcacaatcctttggggtagggcgctttagcctcttgtgttgcaacactctttttgggtattgcaagttctgtaatcgcttttgtttaggttgctctctaagcaacaattctgcaaacggatattgttgctttgttgatgcttggagatggagatgatatttgtaagccttaatggcattcacccatgtcttttcaataatcaactcaatgagttaatcagtagtggcattcttgtttttgtcctatcattttaccaaaaaaaggtcattgaaaatcttcaaaatagaaaaaatcaataggcaaacgacatgcaaaaatgggctgattttatcaaaattgatgtcttttcaaactgaaacattgatttaacggtcttagaaacactcattaggggtgttattcacatgcttcagcacccttaaagtatgcaaatagtcgccctatctcaatgcttcaatcgcccaaagatggtaaaattgcgaatgaaaagagaagtgtgaagcgtaataatctaaataacaataagttacgaaagttgctcaaaactttcgtatttgcgaccaactttgccgttggttgttttcacgcgagttatgagaggcactttgtaaagaaaattcagcctctatagagtgtgtcactaattttacagatgcagtttgcagtgtgttcttcttagtaaaaatatcagtcttcaaatgaaaggattgtgggcttatgcttcgtgtaatgtatatattgttttacacgtttatggagcgtaacgactttgtactgtggcttttgggaacattctgtcagtgttcctgttataagaaatcaatagtgggggcggataaaaaaaagacaaccttctatcaaagttatcttttttgcgaagtgaagagagagtttatctcctctttttaaattttctatatagtttccagcctaacactataccgtcaaaaactcctgctcctgtattcaacagtcctgaaaatcgcttggatggtaaattggtagtcaatgaggatggtgacgtaccaaataactgatcccataaagctttcatctgtgaatcatcgtttctgatgttatccaatagtgcttgcttacgctctcgaatctctgacaaagacgtatatttcgtctgaggtgtatcataattattctttgtcatcattaattctccatcaataaacttgccaagaacttgacaattggccgctgaatccattgtttgcggaacaagaaaaacagcacaaaagtgaataaataacagcccgcaatgatgaggaaggcaaaaggaagccctacatggggttcgagtgcataagcggcggcaaacgaaacatatatgagcgctaataccaatacaatggttaatgagagtgccagtgtgagaacggtaatcagccgaaccaccttttcaattacatcgagcttgacatactctgtctgaagcccgatgtaatgtttgcaaacatcaaccagttggctaatggtttctacgtttctgtcgtttgaaaacatataataatgtttaatctacgatatcagcagcagcatctttaatgtcatctaccaaatcgtctacgtctttcttagacaatttgagatcgtgctttttgcaaaaatcgtcaatcgtgtcgttgattttattacgtgtgtcttgtcccttttgaggtgcaaccaacaaacctactaatcctcctacaaggacgcctcctaagaatgcgccaatacaactaactgttctcatgtttctaaattttaatgtgaatattgtttattaacttttttagcattggatactcttccaaatgtcataacgcaaatatacgattttttttacaaacgagcaacgatgtaacgatgttttttgtgttaaaaagtttgtattctattgatttaacaaactttagtgggtacatttctttctttttgacagatattttgtaatttcgcccttgatagataaacgtagagtatcaatagagtttaattaataatatcgacaacaagatgatgaagaaaagaattgttttatgcgcaggattatgtgcagcacttgcactgacgggatgtaagtcgagcgagagtgcttataagaaggcttacgagaaggcgaaagctcaagaacaggcaaagactgagactgaggcagaagtacctacggtaacacctctgacgccagctcccgtgacagaaacaactgttcaggacaatgtagataacgcaacgttccgcacagaagatgttacggtggttagcggtaatggcttgagcgcctttagtgtagtagttggctcgtttggcttgaaggctaacgccgaaaatttgcagcgcacattgaatgcagctggctatgcagctcagattgcttacaatgcaggacgcaacatgtatcgtgtagtcgcttctacacatgctgacaaagcctctgcagtacgctctcgtaatcagttccgtcagcagtatcctgacgcttggttgctgtataagaaataatcaaccatgaggcgacagtctgccatctcttcgtttcagaagaggtggcataggaatgtctctcttggtatcttttcaccatgcgtatcctttcgatagattacggaaagaaacgtacgggcatagcagttaccgattcattgcaaattattgcaaatgggttggcaactgttgctacatctgcacttttcgactttctcaagacctatgtagcgcaagaggaggtggaacggattgtgataggcaaaccgatgcagacgaatggaaaaccgagcgaaaactttgccagggttcagcagtttgtcaaccgatggcgtaaggcgatgccgcaaattcctatcgaattttacgacgaacgctttacatcagtgttggcacatcaagcaattttgcaaagtggaattggaaagaaagcccgtcaaaacaaagctttggtagacgaagtttcggctactattattttgcagagctatatggaatcgagacgtaaataacgaatgtccgtcttaggttcttatttaataaagaaataatgatattacctatatatatatatggacagcccgtgttgcgtaaagtagcacaagatattaccccagcgtatgagaatctgcagcaactcatagcagatatgtttgaaacgatggacgcttcggatggcgtaggcttagctgccccacagataggcaagtcgattcgggtcgttgtgatcgacttaaatgtgctgtctgacgattttcccgagtacaaagactttaggcgtgcctacatcaacccacatattatcgagattgatgaagactctcctgtagcgtccatggaagaagggtgtctatctatcccaggcatccatgagtcggtaacacgccatacacgcattcgtgtgcaatacatggattcagattttcagtcgcatgatgaatgggtggagggttatttagcccgtgtaatgcagcacgagttcgaccatttggaaggtaaaatgtttgtggatagagtgagtccgtttcgcaaacagcttatcaagaataaattaaaagcgatgacacagggcaagtacgaatgtcattatcgtaccaagcctgtacgcaaatagaatgtatgtatcgcatcaaggtcctcatcttcttggcttgtctatcacttgcagcaaaagcacaatacaatgttgacaagctgttaaggaatggtcaggtggcccttcattatgaagactatgtgctttcgatacaatatttcaatcagattatttcgctcaagccttatctttatgagccatggcagtacagagcggtggcgaaatactatttagatgattttacaggtgccgagtccgacatctctaaggctatcgaattgaatccttatatccaccagttttttgatttaagagccattactcgcatcaagcaagaacgctttgaggatgccgttaacgattataaccacgccataaggttacaacctcaacagcaaaattattggttgaatcgagccatttgtttgatgaacgataagcagtatgccaaggcacagttgcaaacggatacgattattcataaatggtcacagaatgccaatgcctataccttaaaggcagaaatctatttgcatgaaaaggacactacttcggctgctaagtggttagataagagcttaaaggtagatccatacgatggtagcacttggaccatgcgagcctacatcagtctggcacgtcagcagtggaaagaggcagataaggaattatcacaagccattcatttcaagccgaatcaggcaaataactatgtcaatagagccttggcgcgcttgaattacaacaatttgcgaggagccatgagcgattatgacatggcactggacttgaatccacaagactttttagctcattataatagaggtctgctgcgtatgcagttgggcgacgataatcgtgccattgaagattttgattttgtcatcaaactggaacccaaaaatgtcatggcaatcttcaacagggcgttattgttggatcggacaggaaatcttcgagccgccatacgagactattctgcggtgatagagcaatttcctaatttctggacaggtttatcttatcgagcacattgctatcgacgattaggaatgacagccaaggcggagcttgacgaatttcgtattttcaaggcgcagatgaataagcacgtgggtgtacaaaagcgttggagtcgtaacaaactcaaagagatgcgcaagcgaagcgagatagatcccgagaaatacaaccaaattgtcgttgccgatgagaatactgttgagcatgagtatgatagtgaatatcgcggacagatacaacatcgaaaagtagaagtagaactgatgccgatgtacgaggtgtcatacctgccttatcagaatggcataagttcgtatcaggctttttataaagaacttgaggatttcaatttacagcatcatcctcaacacaaactcatgttgacttgtcgcccgaagcaactcacggcagagcaatcgaagatgtattttgcgaacatcgaccagttgtctgcccagatacaagatgctaaaaacataaaatctgtgaagagtttattgtttcagcgtgctgtagcctacacggtaacacaaaattacgatgctgctatccaagatttgacagtctgtatcagcgaggacagtacctctgccgttactttttggcaacgtgcggtgtgccagtttatgatgaatgactttaatgcctctaaaggagtagatacccagttgaaagcagccaagaccttagatgatttgaatcacgccattaaactggaacctcaaaacgcctatctttattataatcgggctaatttgtatgccactcggaatgatgaccaattggcaatcaaagattataccaaagctattgcccttgacaataggttggcagaggcttattataacttgggaatcgtacacatgaagaaaggtgatcgagcggcaggtatggcgaatttaagtaaagctggcgaactcggaatctatgatgcgtatagcttgatgaagaaaaatcgaacgtccaaataatttgaaaattacatggaatttagaaaaatatgagctcaactcgaaagaaaatattacttttgtagttgattcagataaaaaactaatttgttatggttaaaatcacatttcctgacggttctgttcgagaatacgaacagggtgtcacggggttacaaatcgccgagagcatctcaccggctctcgctcgcaacgttgtatcttgcggtgtaaatggtgagacagtagagcttaatcgcccaattaacaatgatgctactattgccttatacaaattcgaggacgaggaaggtaagcatactttctggcatacatcggctcacttgttggcagaggcattacaagaactttacccaggtatacagtttgggtttggtcctgctattgaaaacggattcttctatgatgtgatgcccaaggaaggaacgacgataagcgaaacagactttcctaaaattgaagcaaaaatgatggaactggctaagaaaaatgagccagtagtcagacgaaacatatcgaaggcagatgctttgaaggagtttcaagaagatggacaagaatataaatgcgagcatattgaccaagatttggaagatggtaccatttccacctacacccaaggtcattttacagacttgtgtcgtggacctcacttgttatccacgggacttatcaaagctgtaaaaattaccagtgtagcaggagctttttggcgaggtgatgccaaacgtgagcagatgacacgtatttatggaattactttcccaaagaaaaaaatgctggatgagtatcttaccatgttggaagaagccaagaagcgtgaccatcgaaagataggaaaagaaatggaactcttcatgttctctgaacgtgtgggaaaaggattgcctatctggttgcccaaaggcacagaactacgcttacgcctgcaagatatgcttcgcaatatccagcgtagatatggctaccaagaggtaataacgccccatataggcagcaagaatctctatgtcacgagtggacactatgcccactatggcaaagattctttccagcccatccacactcccgaagaggatgaagaatacatgctcaagccgatgaactgtcctcaccactgtgaggtgtttgcttataagccacgctcttacaaagatttacctttgcgcattgcggagtttggtactgtttatcgatacgaaaagagtggagagttgcatggattgacacgtgtacgctcgtttacacaggatgatgcacatatcttttgtcgtcccgatcaagtgaaaaatgagtttttacgtgtcatggaaattatccaagctgtattcaaaatctttaatttcgataattttgaggctcaaattagtttgcgagatccaaaggacaaagagaaatatatcggttctgacgaggtttgggctgagagcgagcaagccattattgatgcctgcaaggaaaagggtttggatgcaaaagtagaatatggcgaggctgccttttatggacctaagctcgatttcatggtgaaagatgccattgggcgtcgttggcagttgggtactattcaggttgattataatcttccacagcgtttcaaacttgaatatacagacgaagataacagtaaacgtacaccagtgatggtgcatcgtgctccgtttggctctttggaacgctttacggctgtcttgatagaacataccgcaggacacttcccattgtggctcacgcctgatcaggtagctattctaccgatttctgaaaagtataatgcctatgcacgacaggttgcgaagcagtttgcagcgcaacaagtacgtgcaaccattgatgaccgtaatgagaaaataggtcgcaagattcgtgataacgaactcaaacgtgttccatatatggtcattgtcggtgagaaagaggcagcagatgggcttgtatccatgcgtgaacgtggaggaggcgaacaggctactctccgtgtagatgaatttattgcacgtattaataacgaagttgcccaaatgttgaaagcaacagatattcatccagatgatgagtaatgacagcggattagaatgctgaaacttaaagggtggctctgaaacgaacaaaactcgtgttcagagccagccttaaacatattgtcaagttggtttcatcgtatgattgatgggacaacaagttgacagtttgacgatttttttgcgagagtgatgcttttcgaggcatcactttcttgctttctgtgctatttgtacagatagtaactactgtcagaggaaagagaaaatcgtttgagcaactcttgtatatatgtcgcattggcacgcacttgctcttcgctgccgtcatagccattgataagaacgatgagatgtgtagtgctgagtgtgatttttgttcgttcatggtctgaggtcggtgtgcccacacctcctaaggcatcacggtacacaggaagtcctgcaatgtttatcactcctcgtccaatgccctcgtacggctctccttctctcccaattcctaatgtcagcgtatctcccttgaactggtcggcgtcaaatccaccaatgctgtacccgtatgcaatgctcgccaagttgattaagtctacgagactgttaatttgatatagcggtttatcctgtaatatacgcctaataagagcttcggctgctggtcgataacgtgaggggtctttgccacatagccgatatactttcctcgtagcttgtatgccgctcatttctttgagtgattctgtattcagtgtgtctttgtatagctgggctttatgatgaatttcttgccataagtcttcgctatacgctgaatttttcaccgtagcttcaacgcaagcacctacaaaatcagggcacacttgttctatttcctttgaaacgattatctccatgttggcaaaggtacaaaataatttgctatctttgcaaatggagaagagacgagtttgcatggttgcaactccgccagtacggttgatgcgctttaccatgtttacttattggtgtatgactcgtcagcaaagaaacttataaaacacgaaacttatatggatattcagcagcgcatgcgcaaattggttgacaggctcaacctcgcatcagataattattatggtggtaagcccgaactaatgaccgactatgagtgggatgctctgttcgatgagttgaagcaattggaaatgtcgagtggggtagtactgcctgatagtcctaccaatcgagtctctgatggcgaaatgaacggtaaaaaagaggcacatgagtttcctgcgctctctcttgcaaagacaaaacagcctgctgatttggtgaaatgggcagaaggaaagcctgtttggttgtcgtggaaattagacggtctgaccttggttgttacttatgatggcggaaaattgtccaaagtggtaacacgaggaaatggacatattggtacaaacatcacgcatttagcaaaggcgattggcggcatgcctgccaccataccgttccaaggtcatacagtaatacgaggtgaggctgtcatttcgtatgccgattttgaaatttttaatcttgaatctgacgatgcgtatgccaatcctcgcaatttagcttctggttctcttacgttgaaggatgtcaaggaggtggaacgacgccacatacaatggattccgtttacattggtctttgtagagcaagaaattaaaacatggggcgagcagatggattggcttgaacaacaaggttttcatcctgtggaacgagagcgcatcaatgaaccttccctgcctgtggttgaacaggtgattgaacattggactgagaaagtaacccaaaaaacaaatcctttccccgttgacggattggtagtggtgttcgacgacatttcttttgctgctacagggtcggtaacagggcatcacgccacacgtgctggattggcttttaagtggcaagacgaagctgcaacaacgacacttcgccatatagaatggtcgtgtgctgcctccaccatttcgccagtggcagtgtttgctcccgtagagttggagggaacaaccgtgcaacgcgcctcgctctgcaacattagcgagtgtaagcggttagggataggtggtcctggtagtacgctgtcggtcatcaaagccaataagattatcccaaaagtgatacgtgtcatccagtcggttggtacattcgatataccgaagagttgtccagtgtgccaccacgaagctgtggtgaaggagagtgctgtgagtggtacgcttactttacactgcaccaacgaggcatgtcctgcaaaacaaatcaaaaagtttgaccgtcttgtgtccaaggcgggaatgaatatagacggcatctctgagcaaactttggacaaattcatcaatcttggttggatagaaacctatgcggatatttatcgtttgtcggcacatgccgctgaattggcattgttagaaggctttggtgagaagtctatgcgtaacatgatgcagtccatagagaagtcaaggacagtagaagcatgccatttcctgtatgcgctatccattcctttatgcggtgtagatgtttgcaaacgactgttagaggcttatcctttagcagaattgataagtgttgccaccacagccacctctttagaggcttttgcccacattcctggcattggtccagaaaaatcggcttcgcttgttacttggtttcaagacgatgcaaatcaacgaattgttaatgatttattgagtgaagtgcaaatcgaagaaccgtcattgcagccacaaggtgctcgttgccaaggcatgacttttgtgataacgggcgatgtacatcattataaaaaccgtgccgaactgaaaagttacatcgaaagtcagggcggcaaggtaacaggtagcgtgagtaagtctaccacctatcttatcaataatgatgtcaattccacttctggtaaaaacaaaaaagccaaagacttaggcatttctatcatatccgaagatgagtttgtagagcggtatggatgagacgcttttgttaactctatgggttaaaatgtccactttgcagctaaggttggaatcgcatagaacttattgttttgtcctttggcattccaaacaaaattgttgcttagttcaacctctccaccaatacttaggttgacatcgttccaactttttaaggtgttaagattcagccacaactgaggttcggacaggaagatgagcttaccattgacatttgggtggtaccacatatcgcagaaaccactgaacgtgagtagcccttttgcaagattcatgccccatacttcggtgagctgaaagctgttgatggacgcctgtcccaaatgattgtttttgaaaaagtatttatacaacacctgtacagaaaacgttttggagaaatttccattgtgccaattccatgcaccacccagtaatgcggcatgttgaaagcgtgatgaaaaatacgagttgttcgctctgcctgacgataatccgccattatattcagtatggatggcccattgcttgttgtgagagatattgaactcgcgggatatttcccaatatgcccctgccataccgtcggattgtaagtcgaggtcggtaaacatataggtgcttccccatttgtcgggtttgaacatttcaatggtagcggttgctgctggtctgctacttaggtcgttgtacagttgctgcccccaatcatagtgcagctgaatgttttgtgctgtggtccataaactaaatcctgccagtagtaatgttgtcaaacagttctttttcattgtcgttattttatttataatttttagtgaacgagttggtaaaggttgattaacagaccgaatgtcttgatgtgaagccttgcttttccaatggcaaagatacaaaatctttcacattatttaagagatagagcatagaaatattaatcttttttgtctacttttgtataactatgagaatagacatcattaccattctgcccgagatgcttgagggctttgtgaacgaatccattttagcacgtgcacaaaagaaaggtcttgcggagatttgtttgcatcagttgcgcgattataccacagacaagtggcgtcgagttgacgattatccatacggaggctttgcaggtatggtgatgcaatgtgagcctatagaccgttgtatctcggctttgaaggcggagagagactacgatgaggtgatttttacctctcccgatggcgaaaaatttacacaatcggtggctaacgacttgtctctgaaaggcaatatcattatactttgcgggcattacaagggcattgatcagcgaatacgcgaccatctcattacgcgagaaataagcattggcgactatgtgctcacgggtggcgaactggctgcagctgtaatgaccgataccattgtgcgccttattcctggagtgataggggatgagcaaagtgcattgagcgattcattccaagacgacatgctctccgcacctatttatacacgccctgccgactacaaaggctggaaagttccagaagtattattgagcggtaacgaggctgtcatcaagagttgggaaatggaacaggcgttggaacgaaccaaacgcttacgtcccgacctattagaaaacacctaaacctttgttatccaagaatctacaacctatgatgaataaattattagtacgaccacaaccaacctttcctgaagctgtaaaagagggatgccagcgcattttcgactttacaggtcgaacgcgccgttcgagtttttggtggttcatgttggcgtataccgtttgttatttcttcttaaccaatgtttggaaagcattctttcccctaatgctcgctgctatttttgacttaggcatgatgttttttgcgctcgccattaccgtgcgacgcttacaagaccatgggtccagtaaatggtgggcgattgttaactatctatcaataacgatttacaccttatatatatatggtagtgggattggcgaggcgttggtgaacgtaaactccagcgcaacacatttgacgaacgtttaccaagaccctgttttcatgaccacactttccgttgcattcataacggctcttatcacatttgtgctttgtttgctcgatagtcagcccaagaccaataaatatggtgcgtcacccaagtatttcatcgaataaaatttaacataaggttgttagttatgcttcattataagacttattttcgagaaagatattgtgtgtaattaatcaactgtcatacactctcatctctatatgtttttggggtagtgcctgtgatacgcttaaaatagttactgaagaaactttcattaggaaatccaagttcataagaaatttgagctatttgtttgtcgctgtggcgtaacataactttgatgcgttgaatagtagagcggtctatccactcctttgcagtgataccacttacttgtttgacgacagttcccaaataacgttgtgtaaggttcatgcacgatgcgtaatacgatagtttacgttttattccattagattgattgacgagtaggataaacgtttggaaaatctttttttctcgcttttccgtcctgttgttatctttgctgtatgtactgatgatatattgtacatgatggaaaatacagctcatgaggtctggaaccattttacaatcatcgccataacgatgtgccgtattccatagaaggttgaacagttggaagaaaatctctaaatcttcagaattaggctttagcacgatttcgctcatctgattaataagaaaagtgggtaatgattctttgtgccaaatagccagctgctcagagtttagcgttaagcccattaaattaaagtttggacttacttttgtcaattcaagtatggtattaggcgttaaacaaacaatgttgccttttgttagatgataatggcgcaaattaataattccttctatttcaccctctttgatgcaatccaaacgaatgtcagaaaattggaggagattattagcaaatcctgatttctttagtgcagggataacatttttaaccatggcgaatgttcgacctgtatagggaggttgtgaggatgagtcaacatggtttttgagtatatcttcaaaattgtcaaaactgatatgatgcggttgtttgagtttcatcttttaaatataaatatgacacaaagataataataataacctattttaccatgtttatttgtaataactgtacaaaaaggacataatttatacctgatagataagcattatcaactgttttatatgtaattttgcaatcaataaaagtaagtcaaagatgaaaaggaaaattttagtctttattttatctattctgatttctccatgtttagcacaattggatatcgaccagtgtcatgacatggcacgacagcaatacccactcattaagcaatatggtctgcttgaaaagagtgaagcatatacattatctaatgcgatgaaagcctttttaccagaagtaaaattcagttttggtgccaatggttttaccaatcctaccaactcatcgcccaagacagatgctatggggatgggagatatgaagaattacctgctgaatggaagtattcaaatcagcgaattgatttatgacggaggtgctatttcagcacaaagaaaactcataaaggctcaagcagaggcagataagaaacaattggatgtgcgcttgtacgaaattaaccagcgtgtcaatcaattgtattttggcattttgatgatagatgaacaaagcaaacagttgaagttgttgcaaaacgatttgactttaagtttgaatacggttcagtccttgatgaatggaggacttgctaatcagtcggatgtggatgctgtaaaggtagaacagttgcgggcagttcaacaggaaagtagcttgcgcacatctcggaaatcctatatccagatgcttggtttgtttattggtaaagctcttgatgagaaaacgacattggataagcccaccccactacctctttccaaacctcaaggtgtgctgcgtcctgaactatcttattttgcggcacagcaaaacttactcgacacccagcgaaagtcgttgaccgctcgtcttttacctcaattaagtgcttttgcgatgggcatgtatcacaacaaagtattggatatgatgaaaccggcaatgttggctggaggtattacgctctcttggaaaatttctcctttctatacgcgtaagaatgatttgagaagcatagagaccaagaagtctatgattgatcaagagcgtgaaaccttcttattcaatattcatctacaaaatgaaaaagagcaaagtgttgtcgaagatttgcgtgaaaaactcaaacaagatgatgaaatcatccgcttgcgcgaaaatattcatagcgtatccgtcacaaaggttcaaaacggcattcaaaccatcaatgaaatgttgcgagatgtgaatgctgtcaatgaggcacgtcagcaaaaaagcatccatgaaatccaactcttagaggctatgtatcagctcaaaaacatcaataataattaatatgaaaaagataggcttaaccctcatcagcatcgtggcactcttgtctggatgttcttcgaacgaacatccatacgatgcgacaggaatatttgaagcaactgaaatcatcgtttccgctgaacaaaatggcaaattactctttttgaatgttcaggaagggacaatggtggaagaaaatcagcaagtaggattgatagatacagttcagttggcattgaaagctcgccaggtaggggcaactacggcatcaatagcgaatcagaaaccaaatgtcaacaagcagattgcagcgctgcagcaacaattacagactgcggaaaaagaagaaaaacgtttcgaagagttagtgaacagtggtgcagcaaatcgtaaacaactcgatgatgccacatcggctgtaaatgtgttgaggcgacaaatagaggctcaaagaacggcattgcacagtgacagacgtgcactcaattcccaaatgaatgccaacgatatccaaaagcgtcagattttagaccagttagcgaagtgtcatattacgtcgcccatttcaggaaccgttttggaaaagtatgccgagcaaggcgagttcgccaccataggaaaaccattgtttaaggtggctgatatgaataatgtcattcttcgggcttacgtgaccaatcaacagttgcagcaagtgaagataggacagcaagtccaggtctttagcgattacggcaatgagcaacgtgacacttaccaaggcaaggtggtgtggatctcacctcgttctgaatttactcctaaaacgatattgaccgatgatgaacgtgccgatcaagtgtatgccgtcaaggtagccgtaaaaaatgatggcagaatcaagattggtatgtatggaggcatgaagctttaattgtgatgaacgctattgaagtaaaccacgtcagcaaacaatatggtcgcgtccaggcgctcgatgatgtttctatcaaggtcaatcaaggcgaaatctttggtttgataggtccagatggagcaggcaagacctcactttttcgtatcatggcaacgctcttgttgcccgatgcgggtactgtgagtattgacggttgtgatgtggtgcaacaatataaaaccattcggcagcgtgtgggttatatgccagggaaattttcactgtatcaagatttaacagtagaagagaacttaaagttttttgctgacttatttggtactacagtcgaagagggttacgaaagtgtcaaggcaatctattcacagatagagcctttcaaacatcgaaaggcaggtgcattgtctggcggaatgaagcaaaaattggcactttcgtgtgccttaattcatcagcctcgtgtgctcttcctcgacgaacccacaacaggagtagaccccgtatcgcgcaaagagttgtgggagatgttgaaaacgttgaaacaaagaaacatcacgattgtagctgctacgccttatttggacgaaattaagtgttgcgaacgtgttgccttcttagatgaagggaaggtgagagcagtagatactgctgaaaacatcctcactcaatttgctgatgtgttcaatccaaagggattacaacaccaacaatcggctgctgatgctgcaacctctgatatagaagaggtgataaccgtcaatcatttggtcaaggcttttggggatttccgtgccgttgatgacatctctttcagtgttcgtcgtggagaaatctttggctttttaggagcgaatggagctggtaagacaaccgccatgcacatgttaacaggactcaacaaacccaccagtggtacaggaacagtggcagggtatgatatacggaagcaatctggagaaatcaaaaagcacattggttatatgagtcaacgattctcgttgtatgaggatatgacggtggcacagaacatcaagctttttggaggaatttatggaatgccaccacagctcatcgaacgtaagttggatgagttgttgcaacggttaaattttacagcacatcgcaactcattggtagcatccttgccactgggctggaaacagaagattgctttttcggtaagtatcttccacgagcccgaagtggtgtttttagatgagcctacaggtggggtagatcctgcaacacggcggcagttttgggagttgatatacgatgcttcggcaagaggaatcaccgtattcgtcaccactcattatatggatgaagcagaatactgtgaccgaatatccatcatggtagacggaaaaatccgtgccatgggtacccccaaagagttaaagcagacgtatcaacttgagagtatggacgaagtgtttacccttttagcgcgtgaagctacccgtggggaataacgtaatgggaaagacatcatgaatcaatttatatcatttgttatcaaagagaccaaacacattgtgcgtgatcgccgcataatgctcatcttgtttggtgtgcctgttgtaatgatgcttatttttggttttgccattactaccgatgttcgtaatgtaaaggtgaccgtggttacggctgtgatgaatccacgtattcagcaggttgttcaacgcattgatgcttcagaatattttgtggtgacacaaacggtgagtaacacaaaggaagccaaacaactcttagccgatcatcaagcagacatggcaattgtgttctcaaatgattttgccaatgagcgatacagtgagcaagcaagtgttcagtttttggtagattatactgatcccaacatggctgaacagcgcgtttcttatattcagcagataatcatggacgagttgcgtagtcagcaaacagttcagcaacaagcgatagccaacaccaagctactctataatccgcagatgaagagtgcctacaactttgtaccaggtatcatgggaatgcttttgatgttgatatgtgctatgatgacctcggtgagtattgtacgtgaaaaggaaagaggaacgatggaagtacttttggtatcgccagtcaagccattgtatattatgatagctaagacggttccatattttgtgctttccatctttattctcattagtattttactcatttcaaagtttatcctggctgtacccatagagggtagcgtcatcaccattttggcagtttcactgttgtatattgttttggcattggcattgggtatgcttattagtgttgtatcccaaacacaggtggtagccctattgatatcgggaatgctgctgattatgccgagtaccatgctctctggaatgatttatcccattgagagtatgcccaccgttattcaatatatctcaacaattgttcccacccgttggtatgtgtcggctatcaaaaaagtgatgattatgggcgttggagtgaacatgatttacgaagaactcattatcatgttaggaatgactttattgtttttaggcattgccttgaaaaagtttaaaatcaggttgtcatgacactgcgttatcttatacagaaagagtttatccaaattcggaacaatccatttattccgaagctcatcttattctttcctattgccattatgcttatctttccatggataaccaatttggaagtgaagaatatctacatctctgtggtagataatgatcacagcaccttgtctcagtgtttagtacaacgcttgcaagcttcaccttattttaagtttacgggtacagctccaacatatcctattgccttacagcagattgaacgtaatgatgctgatatagtattagtcattcctcccaactatgaacgaaatcaagtgattggaaatccgcaaccagttctcattgcagcgaatgccgtgaatgggacaaaaggcggtatgggttcgtcttatgtggctaatatcgtaaatcaaaatttgcaggacttacaaatcaagccaatgaagtcacccttttcaactttggctttgttcaatccacataagaactacaaactttttatgatacccgctctgatgacactggtgctcattatgctttgtggattcctattggctttgaatattgtgagtgagaaagagaagggaacgattgaacaaatgaatgttacgcctgtaagtaaattgcaattcatcttgtccaagatgattccttattggttcatctccatgtttgttcttacagagtgtattttgttagcatggatggtttatggcatatatccagcagggaatatcggtttgatttatctcttgtccatgatgatggcgcttatatttagcggaatcggtctgattatctctaattacagtgacgcaatgcaagaggccatgttcgtgatgttcttcatcattatgtttgtcatgttgctcagtggcttgtttactcccgtgtcgagtatgcccgattgggcacgtagcatgactatcatcaaccctgttacctattatattgacgggatgcgaaccgtctttattaggggtggcaactttgctgggatagcagaaaatgcgttcatcttaatgatttttgccgttgtgattgatgtgtgggcggtgataagctataaaaagataaattagcggcggaagaagagaaattgttgatgtgttgaaaggacacaattcctttcaacaaaaacagaaacaatgaagtaaaataaatgtggagtagagagcgtcagccttaagcccttgctgacgctcccatgtgcttacactttcagtttgttgctacctgcagccttaaaactcatgtctaacactttgacactgtgtgttaaggctccaaaggaaataaagtcgacgccagcttttgcgtatggtatcatggtgtcgaaggtaatgccgccactcgattcggtttcacatttgccgttgaccatggctaccgctttacgtgtatcttcgggcgagaagttatcaaacatgatgcggtcgcatccttctgtcaatgcttcttccagttctcggaagtcgcgtacctcacattctattttcataccgtcttttccgtgttctttgatatactgtttggcacgtgaaatggcattgtgtacaccaccgcaaaagtcgatgtggttatctttcagcagaatcatgtcaaacaagccaatgcgatgattcataccacctccaattcttaccgcttctttttccagcattcgcatgcctggcgtggttttgcgagtgtcgagcacgcgtgttttagtgcctgcatcaataagtgcttgttggtacttatgagtcatggtagcaattccactcatgcgttgcaagatattgagcattagtcgttctgtttgtagcaagctctgctctttgcccttcacgctcatcacaatgtcacccggtttcaccggtgctccgtcttgaatatacacttcaacgttgagtgtagggtcgaatttatggaatatttgtttggcaatttctacccctgcaaagataccctcgtctttgataagtagtttactctcgcccatagcagtgggtggaatacagcacaacgtggtgtggtcaccgtcgccaatatcttcgctgaacgccagttctataagtttgtcattgagttgatttacagatagcatattatcgtttttattcttttggtttttattctctacaagcctaattgctttgatatctctaacatcctgtggatgggtttaatggcttttttcgcaatctcaggttcaacctcaacagtcggccattcgtatttcagacagttgtacagtttgcgcattgtaataagcttcatatagctacattcgttgcaagcgcaggtactgtcgtcgggtggagcggggataaaagtcttttgtggtgccgatttctgcatctcggtcaagatgccactctcggtagccacgataaattcttgtgcttcatcgtgaatactataattgagcaatgccttggtactgcccaccttgtctgccaatttcacaactggtcctttgcattcggggtgcactaatatctttgcatttggatgttgagcctttaattcgagaatgcgttcaacagaaaacttttcgtgaacgtgacaagcaccgtcccaaaccagcatgtctctacctgtgagtttgttgatgtagctacctaaattgcgatcgggtccaaatatcatgggtgtgtctttggggaacgactcgacaatttgtcgtgcgttgctactggtaactaccacatcggtcagtgccttggtggctgctgtggtgttgacatagctcaccacagtgtggttgggatgtgccttgacaaacttttcgaacgcatcggcaggacagctttctgccagcgagcacgatgcattgaggtcaggaatcaagacctttttatcgggacatagtattttgttggtttctcccataaagtgtacaccgcacatcacgataatatccgcatcggttgtggcagctttctgtgccaacgccaaactgtctccaataaagtcggctatgtcttgcacacttgcttctgtataatagtgtgccatgatgagtgcattcttttctttgcacatcttccttatttcagccttgatgtctgttccttctggaatgggttcatcaatatagcccagttcttgccatttcttgtctaccatttcttttgtattcttatgtttcagaggtacgtttgctcaacggagtactctgtgttttgtatttattgatgcttgtttttacgcttgcttatcggtcgtatgcgtgtttgggataatctactgtgtaatgcaacccgcggctctctttgcgctcaattgcctgacgtgtaatgagatatcccacattaatcatattgcgcaattcgcagatgtcgcgtgtagctgttacgcttttgaatagtttttccgtctcttcgtacagtaagtcaagtctatcccatgcacgtttcaatcgcaaatcgcttcgtacgatacccacataattgctcatgatttcgcccacctctctgacactttgtgtaatcaggatgcgctcttcgttggtcatggtgccttcgtcgttccattcgggtacgttggtgttaaaagaatagtggtcgataacactgatagaatgctcggctgctgcctttgcatatactgctgcttcgatgagtgagttgcttgctaaacggttgccgccatgcaatcctgtacatgaacattcaccaacagcgtacaaacggtgaatagagctttcgccatgaaggtcgactttgatgcctccacacatataatgcgcactgggacaaacaggaatatattgtttggtgatgtcaataccgatactcaaacacttttcgtaaatatgtgggaaatgttttttggtttcttcggcatctttgtgtgtcacatctaagcacacgtggtctaagccatgaatcttcatctcacggtcgatagcgcgtgccacgatgtcacgtggtgccagtgacaagcgttcatcatacttctgcataaactcttcgccatttggaagtcgcagaatggcaccatatcctcgcatggcttcagtaatcaggtatgcagggtgtgtttctgcaggattgtaaagaaccgtagggtggaattgtacaaactccatatccttcaccgttcctttggctctatataccatggcaatgccgtcgcctgtagcaatgacggggttagaggtcatggcatacaccgcccctgttccgcctgtagccatcaaagttactttgctcaagtaggtgtctatcttgttggtatcgggattgaggatatatgcaccatagcattctatgtcttgagttttgcgtgtaacgttttgtcccaagtgatgttgggtgataatttccaccgcataatggttctctaacactttgatgtttggatgtttcagcacagcagccatgagtccgcgttgaatttcaaagcccgtgtcgtcttggtgatgcaggatgcgaaactcgcagtgtccgccttcacgatgtaaatcgtactcgtcattttgctttttatcgaagttcacgccccagttgactaatgattgtatggcctttggtgcattgcgaactacctgttcaacggcagcacggtcggagatgtagtcgcctgcaatcatggtgtcattgatatgtttttcgaaattgtcaacggctaagttggtaacggaggcaattcctccttgtgccttagctgtattggcctcgtcaagtgttgttttacaaacgagggctacttttccttttccgctattggcaacgctcaaggcgtagctcatgcccgcaattccgcctccaataatcagaaaatcatattcatgtaccataaactatctgtttttagacttcatgtattgattgcaaagataatgaaaagtaacgagatatggcaaactaaatcttattagtttgccatatctcgtgttggtttttatttcgtcttatcgtcttataagaaatgacttccaccaatgaagaagagaacgaagtagccaagaatcatactaatgatacctacagttagtccaaccttcaacatatcgttctgctttaccaagcctgtagaataggcgatagcatttggcggtgttgaaatagggagacacattgctgacgatgcagcaatagcaataccaatcaaaatggttgctgtaccaccaatagcattcagtgtatcacccatgccggagcaaactacagctaaaattggcaccaaaagagcggctgttgctgtgtttgaaataaagttggacaagaagtaacaaatcagtccagaaagcatcaggatgatgattgggctaaattggtggaatgggatactctcaatggcacggtcggcgagtccagaaccgttcatacctaagcccaaagcaaaaccaccagcaaccatccagatgacactccagttaatggcttgtaaatctttacccgtgatgacacctgtgacagcaaagatacccataggtaccattgcgacggtattggagtcgatgcctgtaatatctcgtggaatgagccaaagcaagatggttagaataaatgtagcacacactatccacatgcgccatccatgagagatgtgtcctttgatttctaactcaatggtcttctgtgtgaatgggaaaaaattaagaataatgcgccatgagattaagagtaacacgattactaatggaaacatgaacgccatccattctccaaagtcaattcctaagttcagtccatcgggattgttgagcgcctgtaatgcaattgcattaggaggagtaccgatgggggttgccataccgccaaggttggcagcaacaggaatactaagcgtcagtgctatacgacccttacctgaagcagggagagctgcaaatacaggggtgaggaaagtcaacatcatggctgcggtagcggtattgctgacaaacatagagaaaacgccagtgataagtaagaagcctaacaagacattttcgctcttttttccaaaaggttttatcagattctttgctaataatacatctaatcctgatttcgtagcagcgattgccaagataaaaccacccaagaaaagcataataacagggttggcaaaggttgccatgatttcttttgatttgagtagtgtaccaaaaacttcgttctcttctcctttgaaaaaagccaaactattattggaaacggtgagacacataacagtaatgatagctaaagatgtggcccaagatggaatggcttctgtaatccacgataaagtggcgaaaacaaaaatggcgatgatacgctgttggacgatggtaagcccatcaattccaaagatgtctgttggtaggttccaaactattgcggtcagtataataatgcagatgaattcaatgagattcttcttgcgcaactgaccgccaagaatattagcattttcttgttccatggttgtataagatttaagttagtataacggggcaaagataaaaaattttttgtttcaaacaaaaaattaacataaaaatggcggttggaaacatggctcttttatttaagagaaataatttaacgtgagttcgacaaatttagaacagagcaagctgtgtgtcgatagtcctttgtacattgatacacggctttttggggaacaggcaataggctgcaatagcgcctaataaattgacgataaaattgtcaaagcatctatgtctggagtgcttcaccagcgcaatattcttaagctcgtcattaacagtttctatgatggctctttttctgaataagagtttgtcagaaacgctcatcaaagctcctttcatgttgccaccaaatttatagacacttataattcgtcgaactcacgttattttaattaaacgcggtattcgtttacttcgcagtcgcatcgttggttaatccacttacattatcttgattattaagtttggtgggaccatggatgcttttctttctgccaatcgtaaaattgtatctaaaatttatggcaaatagattttggaaattattccaaatcgtttcttccttaaagttcatcaaactattgttggaatagatgacagatggcttgggattgtgaatatactgcaatgccacatatacattgtttttggagtaagatagttcactaaaaacataggctttcttcttttccgttacatcccccaatagatcggtcatagaacttcctacgtttcctaatatggaaaattctttgtaagtaatgtttgccgtgatagaaaagtattttgaccactcacttagactggcgccatcaggctttatggcactggtatatacaattgttgcgaacggctggattttcaagaatgggaatggaagccattgaaggctgaggtccgcagctgtgtatgaggtgtgtttaaaatgttcaagggtcttcactatctctgcgtctctactctcaaataatgtcatataagggcggcgcaggtacgaatgccgtattgcggcactcatatagaaagtaggcagactcagttggtattgaagacgattatagaaagtatagtagggatgaagatgaggattgcccacactataatattgatagttgagatagactggatggatggtgagctgtgagatgtcaggaacattggataagataagcgagttaagcctaatggaagaggagtgaccaatctgatagctcgcagacaatgaaggtttgaacacggtataatgccttgccttcatttctccattgtcttgaatactatgttctatacctacacctatggtgtaatggagattctttaacttgcctgcaagatttgaatatatatagcagacttgctgttccattgtggaacgggtgttttcattataggtctgccgaagttgcttataaaagtatcttgccccgatgcttatattttcattggaaaaggacttgttgtaaagcaactcggatatgatggaattagagtaattcctgagatggttgttgtaccgataagttattgtattatctgaattttcttgggaaatctgattgttcgatttggaatcaaaataagatcccacaaaattggctgtcaattcctggttgtttttcaattttctattgtaatacaaatctaatgatatagcatcataattacttttaagtttttttgccgaataaccttgttgtagaattcctgtaccaaatttcgttgttgcagtttgttgatggcgttcccgccccgggttgaggcgataccttactttagcagaaaacagttggttgtcatctggacgaaacatgtaatttgcccctatgatatgatactcccccttgtaagtaccgggaagtccttgcagtttgctggagaaatttgcatggtctatctcatactcgtaagtttgattgattctgttgtcgttaagattcctgtaatcaatgaaataagaaagcgcaatctggtgcttgggcgtgtaccatttcgcattgatcgtgtttgttccgtaacccgttgtaaatgagtttactgtattgataaaactgttaaacccgctatccttttcttttatggtaaagacgcttagcactgcacctacgtttttattggcaaatcttgctggtggctgtgtaaaatactcaactctcctgattttttttgcaggtagagccattaagtcattttcattcgcctgtatgccatctatgagaatgagtatattctgccggtctgtcgtttgaaggatatttgaaattctattcaattgaaattgtggcatttctcccaaggccgccaaggcagaggaggctctttctttcagactttgtgggatgagtagtttgtccttactcccgaaggtctcaatctcccttgcagaaataactacttcctgcagttcttcagaataccgcttcaagatgatttcttggtgagacttgggcactaagcatatcgtttcgtaacccacggaagatatttttagtataagttgctgggagacagtattcgggaaagaaaaatatcccttattattggataccgtactggcaatcagaacactatcaggaatttggtacagcctaatagttgcaaattcgacaggttgtttttcctcatctattatcactccggatatctgggcgttgagaactttgcacgaaaacaacagaactattataaagacaaatctcatgattgtatgatattatataataacgagtattttctcttcagtttctcaatatccagctcccttccaatcatggaaagacagaaagaatctccataatacaaagagcgaaacgtagaaatcaccagttttaggtcaaggtcttttttgagttcgcccgcctcgatgcctcggcgacaatactcaatccacaagtcagagatattcgtttccagttccttgaacttctcctcaaaaccttcatagtgaaaatacgcagaagacaataaattgacaaactgagtggaacttgcctctacgttagcggttttcattctttccattctctgtcgtataagctctaaatcgctcataatgaaatccaaaaacggcgtttcttccgaaacagatatactgttgtgcaaggactcggacagaaaatcgaggacgaacttgtcaatgacagccttgtataacccttccttgttcttcactttataatatatggcaccacgcgataacccggttatctcctcaatatctgcggttgttacatctgcatattccttcactaaaaagagcttgaatgcccccaagaggatattatatctgcgttcttctttctttgtcatttatacatgtattagctgtatgagaataatattacgttcgtactatttttatcagtagcaaatatattgatagtttttaaattttccaagaaattgccgatttttattaaattatagtaaaaacaatcttctcctttagtttcaatcatgaattgaagcgtataaaccgaatcgaattgcttgtgttcaatgtctacatcatttgcttacatggttgtaactacaatgccccttcaatgcaagagttgctacttttattttttatcattcttggtaggggaatacagttgtttttgtcctgtatttttaccaaaaaacgaccatctaaaatcttcaaaatagaaaattttaataggcaaatgcccaacaaaattacgctgattttgacaaaataaacgtctcttgcggctggaacattgatttaacgctcttggaaacactcaatagaggtgttattcacatacagtagcggtgttaaagcatgcaaataggaggcttatcttaatgctttagccgccaagaaagggaaaatttaaacataaaaagagaggctttagtcgtaatgtgttcaataacaagagattacgaacatcgctcatttctcgcgtatttgcgaccaactttgctgttgattgttttcacgcgagttatgagaggcactttgtaaagaaaattcagcattttatttcctcctatgtagcgtatcaccaattttacgaaccgattgtaaacaacgtatgaactctcctcatcattatttatttgttcctcttattttcggtgaattggatagagcgcaaatgctttcgttatcaacatgtgcgtaaatactttttggtttcgttcgtgtttttcgttgtacaaattttattcttatacgaagaaactgtgattggaaaaaagaaaaagcacaattgatgaaaatgacgttcgcgtgaaaaagtgacgaatggatagcttgttacttcttaatttttgtacatttgcactgatttatggatgatttgctcaacaattaacgcacatgaaattatgattaaatgtaactcttctttctctctcatcgcttgtggaatcttgatgatgacctccattactatggggtgccaatccaagcagtcaaagaaatcaactcatgaaggcacgaaagtagaactaaaatatgcggaacatatccaaatgcaaaaatatcccctgtttacagtcgttactttagcaaatccgtgggatgaaggaaaggttctacatacgtatgtgttggtcaaccgcaaagactctgcaagggtgaatcatctgccaaaaggtaccttggtttatacgcccattgagcgtagtgtggttttctcgaccgctcattgtaagctactccaatctttgggcgcattggatgccattgcgggggtagccgatttgaagtatattcttattccagcaattcagcatcaagtaacgacaggcaagattgttgattgtggagacgggatgagtcctaatattgagcgaatgatagcgctacatccgcaggctcttcttttgtctccttttgagaatagtgggggatatggaaagttggaagggttgggttgtcctgtcattgagttggcggattacatggagacatcaccgttgggaagagccgaatggatgaaattttatgggatgctctttggctgcgagcagcgtgcagattcgttgtttgccgttgtcgacagtgcttatcaacagttaaagtcgcaagcccaatcatggccagagggtgcttctctcttgacagagcgtcaaacggggagtgtttggtactgtccaggaggaaagagtaccatagggcaaatgatagccgatgcacatgggaaatatgctttctctgctgacaagcacagtgggagtttagcactctcttttgaagaagtattggaaaaggctggcaacagcgaggtgtgggctttcaaatatcatggtgaacatcccatgaccaaacaagatttgctggcagaataccgtggctatcgagttttgcgagcttttaagcaagggaaaatttatggttgtaacagtcgcataaagccatattttgaagaaactccgttccgtcctgacttcctcttgcgtgatattatcattatgttgcatcaaccccacgcctcttgtttgggtaaattgcggtactacgaacctctgccatagctctttcacaggctccttcttatcaatggaatgatacatgggatgctgtcaatcatctgtaaaactgtctaagagtgtcaatttcaaggataaaaatgtaagggttagcaatgctgttgcctcaccgcattgatttcactcgagagggatgtctagaaaattgaatatcgaagtacgggaatctctcattatatataaggtgaaactcatggaacaggatgtgcgtctgtcatgcgattgaaggagttgcagacagcagaggacctactatgaggcagaaatgaaaaaggagaccgaagtctcctttatgtttattcatcaatgatgagcgtgtgcaactgttaatgtgcagcctcaaactctttgaggaagcgcaaatcattctctgagaaaaggcgcaagtcgctaacccgatatttcagattggtgatgcgttctacacccataccaaaggcataaccgctgtacaccttgctgtcaatgccgcaagcctcgagtacattggggtctaccatgccacatcccaaaatctctacccaaccagtttgcttgcaaaagccacagccttcaccaccgcaaataaagcatgagatgtccatttcggcactcggctctgtaaacgggaagtaacttgggcgtaaacgaatgtcagtatctggaccaaacatttcgcgtgcaaacgtaagcaacacttgtttgaggtcggtaaacgatacgttcttgtcaatatacaggccttctacctgatgaaaaaagcagtgggcacgtgcagaaattgcctcgttacgatacactcttcctggacatataatgcggataggaggctcgtgcgtctccatatagtgcgattggtcgcccgaagtgtgtgagcgtagcaatacattcttagtcacatcgttgggatgcttgtgaatgaagaatgtgtcctgcatatctcgcgcgggatgatcgggtgcaaagtttaatttggtgaagacgtgtaaatcgtcatcaatctcaggtccatctgccaaggtgaagcccatgcgttgaaagatattacagatttcgttcttcacaatggttagcggatgccgtgttcccaagcgaataggataagctgagcgtgtaagatcaagcgatacggaggactcattggctgttccaaccgtgtccttaagtgagttgattctatccttagccaactgctttaattcgttgatcttcatgccgacagttttcttttcatcagctgccacattgcggaagtcggccatcagcgcattgatttcacccttcttactgaggtattttaggcgcaactgttctacctcatcggcattctttgccgagaggttgcttacttctttgagaagttcatctattttgtcaagtatcatacttatataatttcctctttgcaaagataatatttttacattaaaaacacgacttatctcaaaattaagtagtaaatttgcataagaatggttaaagggacgtatgaagagtacgtccactccgtcaacaatcaataagatgaggtatgtttgacaccaagtaattcgttttaagatgaaatttgagagaccatgatgaaagagaaaaataatctgttgagaaaggcaacttttgttgccttaggtttttttgcgttgatatctttgctgttttcaactgctggttgtttcgataaaaagccaacagcggtggacacgcttgcggtagactctgcgacagctgatacccttgatgacgatacgctgtcgaacattattgccgaatcgccgatgtccaaatcagcagatgagttgtttgatgacttcttctttaactttgctgctaataagaagctgcaatacaagcgcatcaaattccccttacccgtcatgaagaatggtaagcaggaacgcaccattacaaaaaatcagtggaaaatggactacttttttatgaagcaaggctattttacattgatttttgacagattcaagcagatggaagttgtgaaagatactacggtgaggaatgtcacggtagaaaaaatattatttcctatcaagaccattaagcagtatcaatttgagcgaattaatggcgaatttatgttgacgtccattatttaccagcctattcatgagagtgtgaatggttcctttctcaacttttatcaacgatttgctgtagacagtgcttttcaaatcaaaagtttgaacgaaacagtagaatttacggcacccgatcctgatgatgattttggaacgattacgggctctattgtccctgaacagtggccaggatttaagccacctatcattccaaaaggcactatttacaacatcatgtatggacaaaaacatgttgctggtaaacaaaaattgttcgtggttcgcggtattgcgacagacttagaagtgattatgctttttaggcatcgaaaagatggatggaaattgatgaaatttaatagttaaaatgacaggatgttagatcgaaataattacagtttacgacagcataatacatttggcattgatgcacggtgtagacgattcattgcttttgattcgaaagaagaattacagcaggcgttatccacattgacactacaagatgaacctttcatgccactgggtgaggggagtaacctgttgcttacgaaagattttgaaggaactgttttgcactctcgaattcaattcgttgacatcaagatagaagacagtattgctactgtaaaggcaggtagtggggtaatatgggacgatttggtggctgcttgcgtggagcaaaaagcttacggattggaaaatctttccctcattcctggtaccgttggagcagctgcagtgcaaaatattggtgcttatggttgtgaggtaaaggactttatccagaccatcactgccgtagaaatagccacaggtcatgaggtaatctttaccaatgctgattgtcagtacgcttaccgctatagtaaatttaagggtgagtggaaaaataaatatgtgattatttcggttgaattgaagttcaattgtacctattctccgcatttggattatggtaacatccagtccgagttgcaacgcaaaggcattgaacatcctacaccacagcagttgcgagacaccattattgccattcgacaggcaaaacttcctgacccaaaagtacagggcaacgcggggagcttctttatgaatccaatcgtgagcatgcagcaataccaagcgttggcagttcgatacccgaaaatgccacattaccaaatagatggattgtctgtaaaaatcccagcaggttggttgatagaacaatgtggttggaaaggcaaaactttaggacgtgctggggtgcatgacaaacaagctttggtgctggtgaatcgtggaggagcatcgggaagtgatatcgaacgtttgtgtaaagaaatccaaaaggatgtcagcgagcgttttggcatcgccattcatcccgaggtaaacattctatgaaacttacatttttaggaacaggaacatcgggtggggtcccttcgttggggtgtcattgcgccgtttgtgagagtcacgatccacatgacaaacgattacgtacagctgcactcttagaaacagacactacgcgaatactcatcgactgtggtcccgatattcgtcagcagctaatgccttttccttttcaacctcttgatgccgtccttttaacacatattcattatgaccatgtggcaggaatagatgacttgcgacctttttgcgttttcgattctctgcaaatctatgcagataaaccgactgcagaggcattgcatcgcaccatgccatattgttttggtgctcatctttatccaggtgttcctttattggatttacatgttgttcagccacatcaagagttgcgcgttggtgacatagatatcatgccgtttcaagtaatgcatcataagttgcctatcttggggtttcgtttcggtagctttgcttatatcacggatatgaagactattcgagacgaagagatgccttttttatcaggactcaaaaccttagtggtaaacgctttgcgctatgaaccgcagcaccattcacacatgaccgtagcggaatccattgagttttcgaatcgtgtaggtgcaaaacaaacttatttggttcatatgagtcatggtataggattacatcatgatgtgaatcttcaattacctgatggcattcagttggcttatgacgggttgcaaattgaagtgtaagcaaaatgaacttattttagacaaaaagacgaagtttgtggcaaataacggacaaaaacatctttaatacggttaaaaagtgttataattcaaacatttcttttcaaaagaattgcatctctcattatattttgtaactttgcaatgtgtttttcatagtattagatttaaggttaacaagattgagagtacagcggtactcttttttttatgcctaaaatttatatatcttggtttacaagtgctatctgacgatattgttaaggcgacttctttattacagtggtgttaaaaaaggagatagacattcctgtaactatttgttctgaaagtttatcaatgtagtatcttaaaatctttgcaagcgataagaaaaataagaaatcatcaagagacaattctttaatgtcaattatttttattatatttgcattatcattttccaattagcctaccttttaggcttttttacttaatacgaataattttttaggttgatatgattcttacactcgttgtactattagtaacggtcatcttttttgtgattggtcgtctgcgagccgatatcgtggcactgtgtgccctttgtgtattgttagtagctggtgttttgacaccagaagaggctttttcaggcttttcctcgaatgtggtgattatgatggtgggactgtttgtggtaggtgctgccgttctacaaacaggtttggcaaaggctttaagccaaaaaatcatacagttggcgaaaggtagcgagataagattgtttttgttggtgatgctgacgacttcatttattggagcctttgtgagtaatactggcacggttgcgctgatgatgcccattgtcgtaagtatggcagcgcaatctaattccagtccaggaaaattacttatgccccttgcttttgccagtagcttaggcggaatgctcacactgattggtacactaccgaaccttgttattcaggagactttggtagacgcaggctatgaaccactcacgtttttctcattcactcctgttggaattgtttgtattgccgttggtattatcgttttgttgccattgagtcgaatgtttcttgggaaagacaagaaaaaaggtggaagaagaaaacctaaagataagagcttggacgagttggtgacagagtatcatcttcaaaactatttgcaggcataccgtattggtaaccattctccactccatggtaagacagttgccgagcttgatttgcgcaaccgtcacggactgtccattatcgagattcgaaatgattcttcaagtagtggacgtattatacgtcaggtcaagcaaaaggttccaaaaccgtccaccgttttacaagcaggagacgtgctttatctcacaggagacatcaaggacatggatgtatttgccaccaaaaactcactcgccaagttggataatagttctgttgacttctatgatataggtatggcagagcttgtactcatgcccaattcgcgtattactggtattcgccttaaagattctaccattggtgaaaagtataacatcaatgtggtagggattcgtcgccgaagagattatctcgtaaaagacttggcagagcagaagctccaagcaggtgatgtccttttggtgcaagggttgtggagcaatattgacagacttgaaacagccgaaaccgattgggtggtattgggacgacccatagagcaagccagtaaggtaacgctcaattataaagcacccattgcagcctttatcatgttattgatgatttgtatgatggtgttcgatttcatacctcttcaacccgtcacagcagtgatgattgcaggtctgctgatggtattaacgggctgcttgagaaatgtcgaggctgcatacaaagccattaattggagtagtattgtgctcattgcagcgatgatgcccatgtccatagcgttagagaagacgggcgtttcctcgtttatctctcaatcattagttgattcattgggtgatatgggaccgatgattctactggcagggatttattataccacaacatttgtgaccatgtttgtcagcaacacagccacagctgtcatcatgtctcccattgccatgtctgccgcttcgcagataggtgtcagtccgtacgctttcttgtttgccgttacgttaggagcaagcatgtgttttgcttcccctttttcaacacctcccaatgcgttggtgatgaaagcaggtcagtacgagtttatggattatatcaaggttgggcttcccttgcaattgctgataggagtggtaatgacatttgtattgcctttgctattccctttctaaaagtctcgtaaaaaagtacttgtattattggatagttccaatgttaaagtttgcttttccttttgatgaaaaagtacaaaagatgacacaataagagagttcttcggaactcttttttgtgtagaatggctgcccgtttatatgattcttttacgctcttcccatgaaagataacgcacttcaaatatttgtgtgataaaaaatagtagtatctttgcagatacttgacaaaagaaaacagacaaataaatgatttcagtagaaggattgtgtgttacgtttggcgtgaaacccctgttcagggatgttagttttgtcgtcaacgaacgtgataggatagccttggtaggcaagaacggagcgggaaaatcaacgcttctcaagatattgaaagggttacaacagcctactaatggggtggttgctgttcccaacgacactacgataggctatctgccacaggtcatgaaactggctgacgacactacagtgaaggaggaaacgcgcaaagcctttgccgacaatttgcgcctcaaggctcatttggaggagatgcaacatgaaatggcaacacgcaccgactacgaaagcaccgactatctaaacttagttgagcggtttacgcaagaacatgagcgatatttgatgctcggtggtgagaactatgaagccgagatagagcgaacgcttgtgggtttaggctttgaacaaaaggattttgaacgacccacatcagagttttcgggcggatggcgtatgcgcatcgaactggcaaagatactattgaggcatcctgacgtgcttttactggatgagcctaccaatcatttggatatcgagtccatacaatggctcgaacagttcttggttcaatctgccaaggcagtggtactggtgagtcacgacagagcctttattaataatgtaaccaaccgaacgttagagataacttgtgggcagatagaggattataaggtgaaatacgatgagtatgtaaccttgcgagccgagcgacgtgaacaacagttgcgagcttatgaaaaccagcaaaaggagatagccgacactaaagccttcatagagcgtttccgctatcaagccactaaggcagtgcaggtgcagcagcgcattagacaactggagaaaatggtgcctatcgaggtggacgaggtggacaacaagcgtatgcacctcaagtttccaccatgcttgcgcagtggcgattatcccattatctgcgaccaattgcgcaaagattatggtgcacacaccgtgttttctggtgtaacgtttacgatcaagcgtggtgagaaggtggcatttgtgggcaagaatggcgagggaaagtccaccttggtgaaatgtatcatgggcgagataccttttataggaacgctcaaagtgggacacaatgtgcagataggttattttgcacagaaccaagcacaactactcaatgaggaattgacgatttacgaaacgatagaccgtgtggcaacaggcgatatgcgtctgaaaatcaatgaccttttgggcgcatttatgtttggtggagatacttcagagaagaaggtgaaagtactatcaggtggtgagcgcagtcgactggcaatgattcagttgttgttacaacccgtgaacctgctgattctcgatgagccaaccaaccatttggacatggcatcgaaagatgtattgaaagaggcgatacaagtatttgacggaactgttatcttggtgagccacgaccgcgacttcttggacggcttggtagataaggtatatgagtttggaggtggctgtgtgagagaacacttaggtggcatctacgatttcatccgcagtcatgctgaagctacagacggcttggcatcacagcagagcattgacgctattttgcaaaataagagtgtgacaatggctgcaaccgtacaatcagcaccaccaaacgaagaaaagagtggggtagacgattatcaacagcgcaaagaacagcaacggaaattgcgaaaactgaagcgtgatattgaagaatgtgaaacgaagattgctaagatggaaaagcgtatcaccgaacttaatgccttgctgtcacagcccgaaaacgcctccgatatggaattggtaacggaatacactaccacccagcgagcattggacaaagaaaatgaacgctggatggagctaagtgagaaaatggagaaactttgaacgatcaacttgtaaactcgtaaacttgtcaactaaatactcataaacttgtcaactaaatactcgtaaacttaaatatttcaaaacttatgaaacaattatttccgatgatgctactcatggtagcacctgccatgggaatggcacaatcgaagacaggacttgtcgagtcgaattttgacaaatctgtacgtcctgccgatgatttctatcagtttgcaactggtggttggcagaaaaagcatccactgcccgcagcctattcgcgctatggcagcttcgaccagttagcagaggacaacaacaagcgtatcaactccatattgagtgagttgcagaagaagacgtacaagaaaggtacgatggagcagaaactctccgacttctataagttggctatggatgccgaacgtcgtaacaaggaaggtatcactcctgtgaagcctttgctcaacgagatagaggcagcaaagactaaagaccagctattacaattgcaactcaagtatgctaatatgggctatggcataccttatggttcgtattttgctgccgatgagaagaatgtggcaatgaatattctcaatatttctcaaggtggacttaccttagggcagaaagactattacgtgaataacgactcggcaacggtggctattcgtaatgctttcaagcatcacattgctcgtatgttccagttgtacggcttcacaccagcacaagcatctgccaaggcagatatcgtgttcaagaatgagacagcattggcactcatctcaaagagcatgaccgagctgcgcgacccacaagccaactataacaagatgacgctaaagcagtttaaggcgaactatcctaacatcaacttggaggcttttgccactgcagaaggcgtgaagagcgactatatccaagaaatggtggtaggacaacctgcctttttggaaggatatgacaagctttcggctgctgctacagccgatgatttgcgtgccatcatggagtgggatgtcatcatgtcgtcagctgcttatttgacagaccaaatccgtgaagccaactttgatttctttggtaaaacaatgagtgggcgcaaagaagattatcctttgtggaaacgtgccaccaaccaagtagaagggcaaatgggtgaagcattaggcaagatgtatgtgcagcgatattttcccgaatcgtccaagaagatgatggaaaaattagtacgtaacctgcaaattgcattgggtgagcgcattgatgcccaaacttggatgagcgataccaccaaggcagaggctcacaagaagctggataagttctatgtgaagataggttatcccaacaagtggcgcgattactcgtcattgagcattgacccttctaagtcgttctatgaaaacgtgatggcgtgtcgtgaatttgcgcaccataatcacattgtagaacgtgcaggcaaaccagttgaccgtgatgagtggttcatgactccacaaaccgtgaatgcctactacaaccctacgaccaatgaaatctgtttccctgctggcattctacaatatccgttctttgacgccaaagccgatgaagctttcaattatggtgccattggtgtagtgattggacatgagatgactcacggatttgacgaccaaggtaggcagtatgatgccaacggaaacatgaacgactggtggactgcgggtgatgcaaagagatttaacgagcgtgctgacatgtatgccgatttcttttcgaatatcaatgtgctacccgatttgaagtcgaatggacgttttactttgggtgagaaccttgccgaccacggaggactcatggtaagttatctggctttccaaaatgctactgccaaaaaaccattaaagacgaaagatggttttactgccaaccaacgtttcttcttggcttatgcaggtgtatgggggcaaaacatcactgaaaaggaaatacgtaaccgtgtaaagcgcgacccacatgccttgggtaagtggcgtgtgaatggtgcacttccacacattgacgcatggtatgaagcctttgacgtgaagccaaccgacaagctttacctaccaaagaaccaacgcttagaactttggtaaactcatttttctctcttcaaaaaataattgaaggatagaatacagtaatttatatgttcgctccctcctctctgttcgttgtccgtctgatatgtgacaacctatttagaggagggagttgttgtttttcggtattgctgtttgataaaacaaattgaaagtccacagactgttcgcctcaggttatactggtcacggctcttttatagaggaaaggtggatgatggtgaaaaacaacctttcttcttttgtttcaactccaaaactaactctatgcacgaactaaatggtttgcgttcattagctgtaacaataatctactttcaatgaaagaactgcaccgttttcaaaattataattttgtcctataattttaccaaaaatcgaccatctaaaatcttcaaaataggaaaaaataataggcaaacgaactgcaaaaatgggctgattttaacaaaatagacgtctccaagtgttagaacattgattttatgcccttggaaacatgtattaaagctgttattcacatgcttcagaggcattaaagcatgcaaatagtaagcttatctcaatgctttagccgcccaaaaatggtaaaaataataatataaaagcaagatgtaaacgtaactttgtcaataacaatgatttacaaacctcgctcatttttagcgtatttgcgaccaactttgacgttggttgtaaatacgcgagttatgagaggcactttgtaaagaaaattcagcatttattttcattctatgcagcttgatacaaactttacataagctgttttgcgggtgtatttcgttgtacaaatattacttttcaatgaaaatatagtttatacaaatactttcacttgatgtgaaaaagctttcttgattgataaggtgatagcggttaaaaaagatacgtatcaaagaagagaattgagcggattatcgttaaatatgtaaatatttttatacttattttagtaatttgataaaaataatgtcaattaggtctaaaatcaaagtaaattatgtacttttgcaaaaagaaataaaatataattttcaggaagcaattttaccgaggaatactcattctgcatgattactatttatgttgtgatttgtttctcaaagtgtgaaaagttttggtgaagaaagatatggaatattaattaaacacaactcaatttatgaaaaaaacctttctgttcttttctattttggcttcttttttactcatgtccattccgcttagtgcacaaagccaagcgaaactaaccatgagttttaatgatgaagccctaataagtgtttttcagcgattggaaagtcattccgattacaagtttgtttatgacaatgaagaggtgtccaagtataaggtgacattggatgtgacaaatgtcacagtcccttctatagtggagcaagcccttcgtaccacaaacttgaagtacactattgcaggtaaacttatcaaagtgatgacacgatctgcctctacaaacggtttgcaaaaaccagaaggacaaaagaagcaaaccataaaaggatatgtctacgaaaaagacaccaatcaacctgtcattggtgcgcagattaaagtgataggtactgatgtaaagggagtaaccgatgtggatggtgctttccatttggatgttgatgtaaaaccacagacgaagatagaggttagttatttgggtatgaaaactgtccaaattcctgtgagtaaggagatgaaaattttcttggaaagtgatgtgaaagaactcaaaggagtggtggtgacaggtatcttccgtaaagcgaaagaaagttatacaggtgctgtttctacaattgataggaaacagttggatatgtatcgaggttccaaccttttgcaaacgctcaagaatattgatgcatctgttaatttcccgattaacaacctggcaggtagtaacccaaacgtattaccaaacattaatatacgtggaacagcgtcgttgccaatgagtgttgaagagtttaacaaaaatgccagtcaaacggtcaatacaccgttgattatcatggatggctttgaaatatctcttaccaagttaatggactacaacgatgagcagatagagagcattaacattctgaaggatgccgcagcaacggctatctatggatcacgaggtgccaatggagtaattgtagtgattacgaaacagccaaaggaaggaaagctgagagtaacagccaaagcaggtttgagtcttgaaattccagacctttcaagttatcatttgctcaatgcagcacagaagttagacttggaagtaaaagcagggctgtattctcgtgagcgtcaaaaattacaattggaatataatgaggtgtacaacaatcggttgaaaaatgtaattgatggcatagatacagattggattcacaaacctgtgcgcacgggtgtaggacagcgttataatgtgcaattagatggtggcgcacaagcatttagatgggcagcatcattgggttataacggaattgagggagcaatgaaagccagtaaccgacgaactattactggcgacatcacacttttgtattctgtgaaaaatcttatctttaggaattataccagttttgcaagtaacaaggcagatgaaagcaaatatgggtcgtttagttcttatgtagatgccataccatatttttctccttacaaccgaaaagggcatttggtaccttctttccccagtttatatattggtgaggagcctttgccaaatccgttgtatgacgcttcgctcaacagtattaactcatctgcttatcaaacattcatcaacaacttctctattgaatggctcattacggatgccctgcgtctgcgaggtaaaataggtgtttctaccaaccgcaaccattcagatcgattcttgccagctgagcattcttattttaatgcgaaggaatataacacggctgcaggtttgctacgaaaagggtattaccgttatggaacaggtgaaaacgatttgttgagtggcaatgtgactttgagctactctaaagcttttgcagagaagcatcaagtgtatgtgggactcgattatagtatttcgcaaagaaacttaacagattacatttttgaggcagagggcttttctaatgcgaatttaagttttatggcaaatgccaagcaatatctatatcagggctcaccaaggggcgataggtcaatggtgcgaatggttggagtaacgggtaatgctaactatacatttgacaatcgttattatgccgacttctctttccgtgttgatggcaactccaagttcggtagtgagaaacgtttcgctcctttttatagtctcggtgtagggtggaatcttcacaacgagaagtttatgaaagagctgaatgtctttagtaatcttcgtctcaaggcatcttatggtatctctggttcacaagactttaccatagaaagtgttaacacgacgtatcgttattatccagaccaaaggtatctgttatggtcggctgcgaagttgatgggatatggtaatccttcacttacttggcagaatacacgcgaaatcaatattggtacagaaattggcttgtttaagaatagaatcatggcagaattgaattactatgataagaatacaaccaatttgctgtcgtcaatggatttacctttaagttctggtttttcaaactatacagccaatattggtgaaatgaacaacaaaggtattgaagcctctctgaacgcttatatcatacgtgactatcaacgagaattaaactggatgataggtggacaaatagtttataaccgtaataaaattatcaagctctcggatgctattaaggcgcaaaataagcgttatttggaacagggcacagaagttagtaacctgttctatgagggcaatcctataaatgctatctatgctgtacgttctgcaggtattgatccgagtacaggtagagaggtgtactatgacaaaaatgggaatttggctaaaacatggaatccgcaggacaaggtatatatgggaagctcagaacccttgtggcgtggcaacttccgtacgatggtaatgtataagaactttacattcaatgcttcctttggatatcattggcgtggcatgctctacaattctacattgcgtaacagggtagaggtgagcagagcaacgatagctgagaagaatgtagatgaacgagtactctcgcaacgttggttacaacctggcaatgttagcttcttcaaagcgattagcaatgaacctactaaagctacctcacgttatgtattcaatgaccgaatgctcgaactgcaaaatgtttcattgcaatatcgctggaacaaccaatggttgcgtgataagacaggcattgaatctttggtgttcggcatcaatgcatcgaatttagcttattggtcttctgttaaatacgaacgaggaacaagttatccatttgctcgaaacgtacagggatctatcacattgacattctaaaaatacaaacctatgaataagtttatcaatacaatattgacagtcacgttggtagtgagcggattgacttcttgctccgactggttggatgttcaaccagaatcacagcaacgtgagaaagacatgtttaagaactatgatggttttaaagatgctctgacgggttgttattcgtccatggcatcaagaagtctctatggcgaacgacttaccattagtgatattgaatatctggcttgcttgtggaatgagcctacgaataacacgacacccagatggaaatatttataccagcataattataagaaccaaaatgcggagaacgctatccgtaatatttatggtggtttgtttaatgtgattgcacaagcaaacaaggtgatagagtatgcacaacaagcagatgttataggtgatgatcaaatacggaaggtgattcttggtgaagcttatgctcttcgtgcttattgtcattttgatgtgttaagattgtttggtcagatgccacagaatcctacacggcaagtcatgttgccttacgcacttggtactggtatcgagtatgaagcaccttatctgagctttaatgagtatgtagctcaacttgaaaaagacttgaacgaagcggaaaagttattgaatggttcggatcccatccaaacatacaactatgatgtattgaataatatggtaaaagaggcaactgttcctgaagatgattttatgcagttccgccaattccgactaaactactttgctgttagagcattgaaagcacgaatgtatctgtatataggacaattggagaaagcacatcaagaggccagatatgtgattgatgctaaagtggcaggtaagccatttatggagttatcaggaattgaagacattaaaaagcattactatagtttgcccaatgagtgtatctttgctttgagtaataacaaaatagccgactatctaccagagatgatgcatggatataatggacaagtaacaggtgacagaaacttggtgataacgctcgacatgctgaacaaaattctttatgatggagcaaacacaacgagtgataaccgttatctgaaagtatggaataaagcatcatcagatgtgacaggaacgaagttccctaccttacttaaatatagttataatccaggagactatgaacggtcagatcaactttctaaactaatgacgaagctacaattcatgccattgatacgaatgtcagagatgtatcttatcgctatggagagtaccaacgacttagcagaagcgaattctttgtataaaacctatatggcatcgcacaatgtgaatgtcactgaaggctttaaatcgttagaggctgtgaaagaagaagtgatgaaagactatcaccgagagttctatgcagagggtgttatgttttatgcgtataaacgcacgggaaccaaacaactgatgtttatgcggaagtctatgacagaggaaaactacatcttgcctttgccaacttctgagtcaaatcctaataagaaacctactaaatgatagcaaagatgaaaaagatattatttccaatatttgcgatagttgcaattctttcttcttgtgaggaggacttgccgctttacagtgaccagcaagcttatcttaatttcgatatacaatatcgagaagatacgctcgttaactattcttttgccttttctggtggaaaacaaaaagataccgtttggattaaactcaaaacaatggggtatctttctgataaacctcgtcaatttaagcttaagcaaattccctttgtaaagaacaatgccgaacctggcaagcattatgtggctcttaattcaaaagagatagagccttatcttgttgttccagccaatgcggtgagtgttgatgtgcctatcattttacttcgagacccttctttagacgatgctatttataatctgcgaatcgttgtagaaccgaatggaacgtttatgcctggttatcaagagcaaaacttcatacaagtaactattactaataagctcaaccgaccttctaattggagtgggtttatgaatcattactttggcaaatggggaccagtgaaacatcagtttatgatggatgtaacaggaaagaagtgggatgctcaattcttacaaacactctttgctgatcaggtttatacgcgatatctgcaaagtaagttaaaacgtgcattggaaaaactcaacaacgagcgcaaggcagaaggtaagcctatgttgaaagaagccgatggaacgttagttacgattggaaaataacaactgattaatatattgacacaatgaaaaaatatgccatattattgatagcatgtctatcgctgttctctgcctgtacggaggacaattcaaccacagttggtcttgataactttatccatatagctggagtagaaaagggttatcatgctatttcttattctggagataaattacaaattaatcctacagttgaaagtagcttcgcaccttctgatctcacatacacgtggacttgttatgatacaagagatgcagatcgagaaaaaactgataagaaaggaaatggttattatgttcaacccgatacaataggtcatgaacaaaacttagattatccagtaagtctgagcgatggagagtacacttttatattaacagtcaaatcaaagagtactggttattttcaacaggcagtcacttctctacttacgcaatcggcactctctcacggtttttatattttaaaagagacagtcgatggaaataccgacgtagatttatttatttctaaatcaaacaagctgttggcagatgtcatcaaatcaaatcagggacaagccttgccaggcaaaccacgagcacttgacatcaatcatcaactgggatacatagatcctaaaactgatgataaagcaggtgataactttttgtgtattacaacagaaaatgataaagtttattggattcgtgcccttgattgcaagacgctaaaagataattctaacttttattatgaacaggtgccagaccttaaaccttatcgtgtggtgcgaggcttctttacagaattctttctaaccaataaaggattattccatggttatacagcaagtcaaagaggcattggaatattaggagaacttgcaggctatggtgccagcaaacatattgtgcagggctcaggaaatgttgctaataacatgatatattggtcattacctgatcatagcttgaccatgattgattataatggcaatattatagatgtgacgggtaaaaaagtaacagttggtaacgaggagatagaatacaaaactaaaggactcaatgagttggagtgtatatatgcaggacataattttgccgatgccaatgcagaaaaggcgtatttcttattcgaagatcaaaggaatcatcaaaagttgatgtatgaaatatctcctgattgggataaggctgaccttaagaatgtcaaagtgattgatcctaattctcactatgctaaggcttctttgcgcgcaatttgtgcaaaatccgctacaatcgcctatgctgtggatcagaataagatttattcttataatcttgtcggtccattaagcgagaaagaactaaagttccaaggtcttcccgcaaacgaaaagattacattcttaagtaaccgctattttctacatgaaacagcaggcttcgattatctgatagtaggaacgcagatgggtgatacttataaactatatttctacgatgttattggtggcgaaccagcaggtatgcccaaatatacaacttcggggaaaggcatcttaaagtccttgggatacatcgatccaacggtggctgatttagatgatggtgccattgcgcccgtgcttgatgaataatgatttgcgctaactgtaggaaatatagttagcgcattttttcataattcacaaatgcgtatgcaaaggcatgtttctcatcgatttgatgctcttcacgcgatacctctttccagttgtcgtatggggggaaaaaaacatcggcatgcgttggcacatcgtctacttcggtaaggcacagcctgtcggcatattgaatggtttgctggtaaacatgtgctccacctatcacatagatgtcttcatcttcttgacaatgacggagagcctcttcgatagatgaaaatgtttcgcagccttcaaaatgagattgcgaacgacttaatacaatgttacggcgatggggtaatgcacccttgggtaacgactcaaaagtgtgtcgccccattatcacagtgtgtcctgtggtgagagctttaaaccgtttcaagtcgttaggcaaccaatatagtaatttattttcatagccaatggcgcgattgcgagccacggcagcgataagtgtgatggtcataatagatatattattttaattttaggtttgaatgaggaaaatgcaaagaggataaagttaatcttttgtttctccttttagagtttccttccccctttgtctttgtctatttcattgtattatactgcaacatctgccttgatatgaggccatggattataattttgtaattcaaaatcctcatattgaaaatcaaacagacttttaacatcaggattgagtttcatttgtggcagtgtacgaggagtgcgtgtcaactgtagttgggcttgctccagatggtttaagtataggtgtgtgtcaccagttgtgtgaataaactcgccaacttgtaatcccgtcacttgtgccatcatttgcagcagtaaggcgtaagatgcaatattgaacggaacgcctaagaaagtgtcggcactacgttggtagagttgtaaggacaatctgccattggctacgtaaaactgaaacaaacagtgacatggcggcaaagccatttgctctatttctgcaggattccacgccgtaaccatcattcttcgactgtctggatgatgtttaataagattgataacattttgaatttggtcgatagttccaccgttataatcaggccacgagcgccattgatgaccatacacaggtccaagattaccatcttcgtctgcccattcatcccaaatacgtacaccatgttctttcaaatatttaatgttggtgtcgcctttaagaaaccatagcagttcataaatgattgatttgatatgtagtttcttcgtagtaagcaatggaaatccgtcttccaagttaaagcgcatttgatgtccgaagatactttttgtacctgttcctgtacgatctgtcttttctataccttcgtctaaaatgcgttgtagtaaattcaaataaggttgcatattgagatgatttatttgcagttgaacaaaagaatgtttgacaagtcatgcgtctgtgcgatgaagctgttgattgtcatgttgaaagtctgcctctttattcacatggttataatttgcgttatgttttcggggctatgggtgctacgtatacgccactcgttgggatagaggttgtttgcacggttgcccatatttttgacaaaccccaatgctacgttttgataagttaccaatataaagccttgtggagtgttgggagggagtgttatcgtgttgcgtccaagatattgaatggcatccgcataggataactcaacacgaggaaaggcagtaggagccagacaactggatagtgccaaaccttgtgagggaatgaatgatctgccctttagctgcaatagattgatacctgctgcaatgactcgcaagctacgagctgcttgttggtattgcgaatgtaacgatggcgggatagcccacagctcattcttcacccatgtaaagttaaagtgtagactttcctgtaaccaatgggtaggaatggatagtttgttatctgaaagttgatgacgcactttctgcttactcgtcttttctgtcatggattgagctgttccttccttacgtaacacagccatgaacaacccctctccatagatgttgccgggtttagcttgatagccaggaataaagcgatagacgttgaatgcagatgaatgtttggactccttgttggttgtatcctcggtggcaggggcagataaaagatttcccatgatattccaatcttcctctacctttaccttcaaggttgtggcacctaactcttggcaaatccaagctacattttcttcgttctctttggtgttaaatgtacaagtagagtagatgagtaaaccgccgggtttcaaacattgccacgcctcggcaacaatctcacgctgcagctgttggcatttgttgacattgtctacactccactcgtcaattgcgttggcattcttacgaaacatcccttcgccagagcagggtacatcacaaagaatcacttgaaattttaatcccgactggcgtatttctttcggatagttgttggtaaccatcacctctggatgtccgcatttttgtatattttcgttcagtatttgtacacgacttctgttgggttcattacagacgagtgtgctacctttaggtaattctaatcgggctaaggttgatttcccaccgggggcagcgcacatatcgagcattctcacaggcgattgaacaaattggcgcagtacctgtgctaaaaacatggatgattgttcctgaacataatacaagcctgcatgaaacagagggtcgaatgtaaaagcaggacgagcgtctaaagcgtagccatactcataccatggcacctttgacgcagctaacgccatctttgccgtagggcacttgtaatgattgagccgtacgaaagctgtggcatcttgttgcatggaatgtgcaaagtgagcaaataaatcatcgcccatcatcgctcgagtgtaattttcgaatgcttcaggaagcaccatccttttagtttgttttattgaattgtttttgcaaaattaggaaaaaaaatgtttctttgcaacaaaacaccgttacatatcgtcatatagatgttaaacaaaaaggattgaagaaaatgaaacagtatttattaatgttatccatgttgcttaccctcagcatctcagggatgcaagcacaagggaagcatcgcagccatcaacaaacaggtactacaatagctgtgaaagatacagccaaacaaggagtagaagcgtattcagacactacaacagtgatggacacagatacaatagatgtagtagatgataatgccgcatatgctaactctgatgatgatgagaattgggacagcgacccatttacattttggaataaaaacattggatggaatattggtggcatttttttagctatctttgccatcaccattgtttttctctttttggcacttccctttattgttatcattgtacttctacgctatcttatcaagcgacataatgaccgtgtagatatagcacagcaagccattgcttcaggacaacctattccagaggatgttaaaccaacggcagcgagaaacagtgactatctatggaaagggggaattacgcatatcgctactggtgcaggacttgttattatgtttagcatttggggttcgaacacgcttattggcattggctgtttactgatttgttttggtattgggcagctcgttattgccaaaacctctcgcaaggacaatgacaaagtagaataaggtgaaacaagtcgacgatctttctctggttcagcaggtgactgtatttcacgataagcacagctttgacaagcttgttgtgaaataccagtcgcctattcggcgttttctgctggtacagacgaggggcgatgaggcgttgagtgacgacttggcgcaagacacttttattaaagcttacacacatttagcgcaattcaagggacagtcacaattctctacttggctatttcgcattgcctacaatgtattttacgattatactcgtcgcaggaaacagacagaggatattgacacaccttcggtgagtggcaaacatgctgaggcgaatcatggatatttgaagatggacttagcagaggcacttgacattctgaacgaccaagaacgtctttgtgttaccttgcaactcatggaaggagaatcgatagacaaaatagcagaaatattgggattggcaagtgggacagtaaagtcacatttgtttagaggaaaacaaaaactcgctaattatttaagaaataatggatatgacggaaaaagatgatgatttattaaagactttttttgaagagtatgccatcaatatacccgacaacggatttagccagcaagtaatgcgccaattaccgcgtaggttcttgaaagctaatcaggtatggttttggttctgtactttggtgggcatcgctttcttggcgttgagtgatgccatggagcaactgcgtaccgttgccaacaattttattggcgacattcacggtttttgggcttcatttgatttagactctacgtcgcctctcaccgtttatatgctcgcattagtgttggctcttatctctagtttttatatttttaatagagatgttggttatcgcaatcttcacgagaggtaaagaatttcattggtgtggttaaaacttcattagctaaattgaatccaaataaaccgtgatattaccaatcgctggtcatgaatttatgcttgtctactactgtcagttttcttgacaacaagcctctcatatttcgcgtatttcaaacaaatccttaactgattgaaaatatgccagaaataaggaagtttcgcattcctttgtcacacaaagggttacgaatgttaggcaaatatttatgcctattcgtcaccatttttcgttactaaaacaatgcttttagcgccataataacatgctttaatccccttacattatgttgacagaagcactatatggtgtgaacaacctcattatctcattgctttaattgttcaaagagaattttttgccaaaatcatcaccatattgtctatttcttgcctattgtttttctccagattgtcattttagaatgaccgtttttttgtcattttataggacaaaatataacttattaatgcagttttctaaagtctaagatgcagatttatcaaacacattcagagcaagaatttgtgcgcaacgtctctcggcagtcataacttttggtgaatcaggaaaatcttgccaattctttgacgacacattttcaagtacaatgtatttcctttcagaacgattgaaactcctctaaatgtaccaattaactaaaaattaactgtatataaacaagaaagaggactttgttgtcaaaatcctcttcctctcctcaagtgattccgttggggttcgaacccaagacccacagcttagaaggctgttgctctaatccaactgagctacggaaccataaatcgtttgcaaaagtagtcatttagaatgaaatagagggggaagttaaagatggatttcgttttggttatatttttttaacaaatttagaattgaaatgcaacttttcaaaataagactgtctttcaaaacctttttggctggttctataaattaccaccgcacataatcattaaatgtttatgaaatacgttttgttatcttttggcttctttttatataaacccaaatcggtcattagaaaaagcttcttgtcattttctaatgaccgccattagaaaaacagcattgtatatacttgatccataaatatttactaactttaccacgaaaaaagtatatactcctatgcgcgactgtgacataaagttcgtaaataagaaaataacac
